United States Patent Application Publication US 2021/0254056 A1 - sequence listing, part 21

SEQ ID NO: 42681 - DNA, 5612 bp, Homo sapiens
acccggctgcatttatttacttatgtatagtttacaaatattcttctttctcatctcatttataattaactaataaccttggaattattaagagattgttgtttttaacctatttagctgtgagaaaggctcacagaggttgtttcttgctacttaaaggttgttcccttatttacccagctacttgggacaatccagaacttgatctcaagtactggggctgccagcctcaccttcttgcctgtgctagaggcagttacccaaggttcagaattcctgaatgagtcctgaatcagagacaagtagatacctcatgcatgcaccattgtccttccttttcaggtttggagtgtggtttcttttagattattgaggtctttcttcctttgacatgacaattgtgtttctgtcctgaaaacctggtgtgctgctgtcatcctggggcagcactgaatacaaagttccccagagggcaaacgctatatgaggtcccatcaaaattccactaggaaggatgcaaactaatgcagtcaaatcttagaagcattgtgtttggtatattgctataaaggattgaaacaacattaaacttagtgctagttacttatatttgaaggttagaacattgggtccaaatttcaatcagaagtttccacaagtgaagtattcagccactcactttttatggttctgttatgacacaaactacttgagttttgaaaaacaaaatattttagccaccattttattgacagcttcattaaattgtcaacaattatatgaaaaattatttagcaaaagcaaacaaatgcgatcccttgttaagataactacaagaatttaattttttttaaatgaaaacaagtttattaagaaagtaaagcaataaagagtggctattccataggcaaagcagcagcctgagctgctggttggccatttttatggttatttcttgattatatgctaaacaaggggtggactattcatgagttttctaggaaaggggtgggcaatttcctagaactgagggttcctctcttttttagaccatacagggtaacttcctgatgttgccatgacacttgtaaactgtcatggggctggtaagagtgtcttttagcatgctaatatattataattagtgtataatgacgagtgagaacgacagaggtcactctcgtctccatcttggctttggtgggttttagctggcttctttactgtaacctgttttatcagcaaggtctttatgacctgtatcttgtgccaatctcctatctcatcctgtgacttcgaatgcctaacctactgggaatgcagcccagcccagtaaacctcagccccattttgcctagcccctattcaagatggagttgctctggttaaaacgtctctgccatatttcccccctccatatttttaaggaggtaaatttgagtagcaaggtagtaaggaacttcttgtaaaaatggcaatatgtatcagtgattctcccatcaggggcaagaccatagtttggtaaggcacattctttactaggtgagagccaaggggagtgacagcaatcaccacatgaaattaggcataattcatagtttatctgtatagcagattgaaaacccagaaaaaaattgagaaataaatattgatgtaaatcatcagatttttcagcaaatatagtccttgtttcccccaaaataaaacaaacattttatatttttaaatattttattttcctgttctttgtgaaaacatcaataaatatcgaaacctctctgctctaacacagagggaaacactgcataattaacattaaacaaggcagtatgccttacaagaaagacataaaatgtccaagggatatttagaacattttagttcttaaagcttcaacatgagaaatgttgaccacacactgtgaaatcatttcaataaataacaactgacattcatctttacagttacaaaatagacacacatacatttccctgccgtcacattgatctcactggccattttcttggattcctcagcctctatcacagtggctgacatgtgatatgtcatcacgaagaaatattaacaaatgactagagaatatctgcaaaccttctatcttcaaattaaatatgaatcaggattgaactaacttgggtttgacctaaaataaacaataaatataatgggagagtgtgcaagtagattcaatcataaccttattttacacataaaatattaacatagaatcttctaaaacaaacaaataaataaataaataaataaatagaagacttctcctaagtgatgctcaaacacattaggcgcaatccaggtggcctctgcagctgtgtctctctttcctcttctgttcctgtaagggcagggcctccttcaggaacagccaccaataagcttcctccttccttctggtcagttggatttgccactgtaatgagaaaatgggtgccctgagtaggtgctcaggaaagctgactgcacaacagtcttctcctgtcctgtttccccaggctctagagttttctgaatgcagtttccccagcctggcacccaagtgggtactgcctgtgacagctgtgctgtgtggcaaggacctctaggcttgggatgctcttttaggaatgggggtgacgtggggtggaggagtggcagtctacactgttttactggctaaaacagccagagcctattgctctttgtcatactgggcctcacttgagcctcaaagcaacctcatgatgtagctaccattattttccctgttttgctgagtctcagataaactaaataatattgtctctgagtgacatggctaataggtggtggcaaccagttatatacccagtgcaatattattgtgaaatctctgcacttcaaccctaaacttttacaaaaaaccagggggtctgcttttcaggtctgaaagtcagtaggaactaggggaaatgaagcttgtgttttttaacaggtggaaaacacttcagcacaactggcaaactccaatgagaccttacatgaaagcagttttacctacattcactggcaggagggaagaacctgggtggtgaccctgggcactgggaatatcctctggcaccagaacagattaataaccttaatggcaactttgtgaaaataataattttttcagtcctgcagctaaccctgggttttcctgatttactttttagggggcagacgccagtatttctgaccaacagctccagtcgcctgtgtacatggaaattataacttactttttcagcatcttttcgatgattttcttaaccatgggcgatgcggggttgagacaagctttctgcccattcttgagtgtggctctgcagagagaagggaatctcgtgagacaggaggtcgggctgaggacagggtttggggcagcgggagagtcggggaccccagcagtggcagcggcagcgatgggcgagacttacatgacttcggtttgggcgcagtggggtccgggggacttcaccttcacactttggatgttcttgaggtgaattccctgcagggtctgcaagcactggcagcgcagttcagtggccaggggcgctcctagggaagaagagactcgctgattgagcggggctgtcggcgcggggcgcccaccccagccgcgtccggcccggggaccccagggcgccgggacccacctgctgcgcgccggctggcggccaccaggagcaggagcagcagcgccacccgcaggagccggggattgctgggggcggcggagagcgtggcgcgggccatggggctcagcaggcggttcgagcggctgtgcgaggaggagagctggcaaggagctgcctgtggcccgggctctgtggctctccgagaacggcgaaccccttttatgcatggttggggctggaaagcccggagtcccgggccagggaaattcccggagctccagatcgatcccgagttcggaaggaaggcgatggccccgcctctggggtggaggggggtcggggcactcacgagtgacgtccgggtctgactgtcttgcgtaactcccgccaactgtgggatgttctctttctgccccgaatccctggagcgggagcgagagcccgccgctctcagagataccgagataaccgcctgcgaggaggcgcttcgtgaacccagtgcagtgcgtcgtgggtcagatcccttagacccacgtagggaccgcgctacatccttaccggggggagttacttctctggaagacatttcagttgttgggattgaaagttagggcaagaactgcagcatgtcttatctatcctctctctttagtttgggttctgcaaatttcattaatgtttgaaataaacgcacgctttaacagtacatgtgtcatctcagatgacgcataagagcttttgtctccttcctggtgttttatgatcttaaaagcaaatatcacgtgtgtgtgtgtgtgtgtgtgtgtgtgtgtgtgtgtgtgtgtgtgtttcaacgtagtggagccaggtgttgggtgcgggaacagaccattgccaagggtcaattcagtgtttattttagttaacagtgttgcaatcccccatcctttctctctttgaaatcttggaacatctcgaactctagtaattccagtagcatcaattttttgttgtatggaagtctgtgttttgatccatggaagtcactgggagctgcgaggggcctgttgggctcaggaggtctgccttttctagtgctgtccctgggcagaaaaggccatagacaccaccagaaaaggagcagggaatgagactccgcttgtttactactctaagcacaagcagacatgtctgatatatacatactagattgctaacataattgcatttccatgccatatgtatttaccagcatcctgggattggttccctctagagaaacagctatcgaggaaattttagttctagaggaatgtcaataaagcatttccaagcctgtttagctgatgccttctcactggattactgacttttcatcatcaatttcaatgaccccctctctttaaaaattaagctgtaggcctacaatactctgtcttaattcttcctggtggatgcagacttcagggatatggagatattctgccactgctatgagaagggctgggagtggcacgaggatgaagaagtgggactaccttaggaatagagtgttccctggatgctgcagctgtagagatcacttgataaggatgtcagggctgaagtttcagccataccactaacttgcttcatgacccttggtaatttatgctttatttgctcatgtttctcccctgtagaagagcttataatagtgcctgcctcacggggttgttagaagtattgattgttaatatgtgtaaaccatcagtgcatgtaaagtgttatgtaaatatttgttaaataacaaaatagaagtggtgtttcacaaccttactgatataggctggatgtttgtgtctctttcaaattcagatgatgaagccctgactcccttatgtgctaatattagaagacaggaccatgggaagtaattaggtttaggtgaggttatgaaggtatggcccccat

SEQ ID NO: 42682 - DNA, 1210 bp, Homo sapiens
aataaaataggatagaattttaaaatgcatgtgccataatgcatcacatattgttagtttaactgttattttatgacacttttgtgtcttatatagataggtaactgtgtaaaactaaacatttgatgcacaagatgcaaaaacagaactcccaggagtgaaaatatcccttcagagacgttattatattgatcaaggctgtgactatataataagttcccagtttgtagacattatctcctgagaatttccaatcaggaaaaaaaagttgaagcatattccattttaatgtcatcactccctaaaagtttgcacaacagggagttccagtaaattgctgagcttttcccagcaggaatgccaggttcggatgttcctgctgataagggtggccacttggcagtgttctcagcagagttgaaagattaacatagtaccagtattggttcgcttagcagaatttgtttcagtcccttggtcatttgggccacaccgacgaattattatatccagctatgaatgttgcttgtggcaggtacaaaagggaaataaagaaaatattaaaccttaatactttaccattgtcaccctacttcctggtgtgttaatttttcaaaaaaaatcagtggaagtacctgttcaattttaacattctttgtttatttttgccaaaatctttgtcttttctaagtgtctaactcaacctaccaaattatctatgacagtacacaaataacaatatactaatatgaaaattataattatgaataataactaataataacaaaaatgctcttttgtactttttatatctggaagagggctgagattttgcatgcatgtgcatatgtgtgtgcatgtgtgtgtgtgtgtatgtgtataatatctccttacatgtagacacaaactcaagagatagatactcaaaatatgcccatttttcacattatgaaaccaaggtatctgccatactaacaaaattggaactcaaaatatgggtgaaagagaaactttgaatgtttatacgtatgtgagtgacatggttgtatttgtattttagcaaaataacttttgtggcattgaaggtaaaatgcaggggaaatatttaggttacctgggatcattttgatattttccaaaattgtttctaagatttattattgtgggtccacaataccccttagttttggattaatttgacccacagaag

SEQ ID NO: 42683 - DNA, 2917 bp, Homo sapiens
aaaccgtaaatatttagacagagaatcatgggcttctctgaactctctctcaagaccccacaattgttagatatggcctcatgaagcattgaagagtgcatatggaggaaaattatgaaaaattatcctagaacagatgactgaaaagatgaattttggaaaaaatctaggttattataacatattttaatttgtactaattttgacaccccctcagaggaatttttatgtttttgaaacaagaattatttctgtttttatctacacacagagttcattttataagtgcttggaacccaacagagcttaatgaattgaataggatgttcttgggaaagagagtatagataatacgcttcaatagttaagacatcaggtgagaaagccattaattttagttaaaattaccattttaattagtcattttatgataacatagacaatggaagatgattaagaaaaatgaagaatcagcatttcttgattcttcaatagacacttgaaaaactacaacacaaggaaaacccactgtttgatggtctaagatcctatcccactatgctgacatttgtcaaaacacttaaattgtttggtttaaagaaactcctttttatccctgctactaatacaaagaatatacttgtgtttgttcattgaagagtttctaagtattagaatttcagcaacaggaaattcatttctcaacttgtattcttcacacaaaaggcatcaaattgctcatgagttaataggttgacagctattgtcatttcctggtgggaaactttcatagttagaggaaaagaaggctgaacaccagatgctgttcatcatgtattttgggatatgttcttgaaggtctgagatttacactgaatttataaagcaatgccattgagtcaagtagagaagaatctagattatagaacaaggctgtgaagtcagatggttgtgccaacagtgtctgctgtgcagaacctttagctcccacttctctctcacatgcactgagtcagaaaatgctattttgtaggctgtagctacttgtcaggtttatgactcaacaaactgaaatattagccaaatgaaatattgttgtgcaattcagggtgctcactcatagcacatacagtgttgaatataatcatctatagcttcaaatgtgctggtcatgagtccactaagaaatgcagaaaagaagcaagaggagaaacagtctgaccttagctgcaaagggcaccaggatgccagcatgctagagtcatgctggtttcccccttcatggaagtgacaggcccatgacaaatttacgcaaatatgacatggaaaataatttcttgaagaaaacttcttttgccatatgtttcctggttttcttctggtttggcctgtgaatggtatcagtttattttcgagtctagtatccaatattcctggaagctagggctgaggaatgttcatttcacaggatggccaaggtctgatatgcaaggctgggattgagtgaggccccagggcaggctgagaacaggaagcggtttcactgacattccattcctttctctccctgaccactcccatctcagagtggccaaggatcactgaagaaatagtaattgtcatctaaacctcataacaggggtgtctggcacttgagagttgacccacttcaatttattcaagctcccactcaaaaaaactctccttgacttacaggatatgaataccaattccctaaagcaaagcatagtgagaatttcagtaaaagaaaagaaacgaaaaccccagaaaaagtattcagtaattgaagagtcaccatcccgagggtcctataggagctcacccttggtcggtgagaactactcagtcagcctcacttacctcattgctctggccagctcatacaggcttacaagagcaggttattaaatggtcaggaattttgatagccagttattcattgttggaagcataaatttgaccacagtgggagtgtttatggaaatcagcaaatgctacaaatctgatttttttttaaatttgaaagctgttttaccaacacaccgcggcttatagctctgcataaacataatctgtatcaactttatcctctttttcctccccttactatagcctctgtcctctgccctcattatcctctgctgggatctcttgaatattttttcccctttagctggttttctctttcactcattgatttgtcctgggtttcatcatctaggcaactctcacgcacagaaaattcttgggagttgttctcactagactgatagcaataccacttttatttattattattattattattattattttgaaacaagcaaaggctctaggaatgaaatactagaagatgaaggatttttttcttctggatcataaatctgggcatcccatgcctacatgttctgggactcatgaggcattctattgatccccaaattgctattaatagataccaagtgaaaatttggtatctcttcccatcagccctaatctcagaatgcattatcttttctaagcaacaactgaagcctgtgtgcactagcagttaaatgtgtatctgcaggaggtttaaatattcctaagtgaatgtgggaagtggtagtgtattttggaattcaagggatcttagaaataatgtagtctaatttgctcattagtctggtgagtaaacagagtttcagacagattagcagttagtggtagaatcagtactagaattcagatccctggcttcctcttctgggcattttcaaatctgcaacaatgtctatcttaattaacattataattaggaccaagataatcttcattcaactcaacaaatattttttgactaccagatatatttctatgtgcacttattttatactaggtactgttccagtagttg

SEQ ID NO: 42684 - DNA, 1353 bp, Homo sapiens
ctagtgactagtaacagtaacaaatgaaagaagatgctcttgtatggccaaaacgatgaaacagacctacatgattttatgaaaagttttccttggctttggttcaaagagatttttctttccttgacactaaagtggtagtttgcactaggcatatagataccgttctatctttctggttctccacttaaatgacactcatgtctgctacattaaaattagcttgttaggttttatttcaccaagtttataaagtaaaccacatatcgttttctcttttgtagatgctgaaagcaaagttcatgtgggaaatgtttggcaatagctgatttatcctcagggtaacaatattctataactcctttgatcttgaggcctctgtgatggaaatgcttggagaaagggattttaaagggagattctgaagtccttgggaaagtccacaagtggacggggcttcatagccatgacaacaaatgacattgtctaggaaacagtgagtcatggcatgctgagcttagaatggagccaacagaaggaacctggcctcggacacagaatcttttggctgctgacccagaatgactgtgaaagactaacactgtttagcagatttttcttgagtgtttactatgtgtgaggttcctgggattcagattcagctactattgttaagaggaaatcaaccaggaagtcagttaagaaaaggtacagtgggttttcaggctgcagggtacagaaatgttcccaggcctggagaacaaaccttcagatcttaatctgtacagggaggtggagggtgaaagaatgatctttcaggaagcgttcaagtagggctgctgcttggattgaattttaaagaatgcataggttatatgcaggatctatatatagatcaatagcttccctgagcacatgttcaaaggttcaaacatttggggtcatttctttgcaagaagagtcactcagtggcctgaaagtccatgcagcaacttccctcatgagagctgcttccgcagcaggcccagggtttctaaaggagagagcacacagatgtaaacactctgtggttctgaggactgtcacctcttcttttcacccatcacttttgtcttaagaactctatgctcaaccctaattctcagtctctatatcaattcccaccaaacagatgcaaagtcctgtccatttgcttccatgaactctgtacttatcgatgatataatactctgctgactacattttacttgccacttcatatcctcactagactgaaagacctataagggaagagatatcttatttatatatctttcttatatatctttcccatatatcctatttactgttgta

SEQ ID NO: 42685 - DNA, 1504 bp, Homo sapiens
gaagagcaagggggaaatccatccccatgacttaatcacctcacaccaggtacctcccccaacactgggaattacaattcaacttgggatttgggtggggacacagagccaaccataacagggatatattataataaaacgtactgagaggtacacaacagcaccctggaatattgctgccaaaaatggacctaatcataaggaaacatcagataaattcaaattgaggaattgttccagaataaacaagactaaagcaacatgacaactaaatgcaatacttgaatctgcattggatcctgaaacagttttatctatctatccatccatttatccacccataacggtaaaggatattattgggataattgtcataatttgaataaaatctatagattaggtattagcattacatcaccattaatttcctagttttgatagttgtattctgcttttataagagaattttcttgttcttaggaaatactggataatctgggcaaaaaaattctggaattctttagactcttctttcaacttttccatataagttttaagtttatttcaaagtatgaatgctataaaattaggaattcaaacaaaaataatcaaattgagaggtgtgtacatttaacaaaacagttatattaaatcaggttaaattttaagcatgctgaaaatttgctgagacctgggagtgtttgtttctgccagtgttagtttcaaagtgcatagtggcatattgaattttgtgtaatttccagtaacatagtgcaaggatgagtagccacacacatttagtgttgcaataatataaaaagcctcaggagcactccagccagcacaacaagtccccagggacagctaagcactccagtgtctagggactgtgggaaactggaaagaaacaatccagtgtaaatatgacttctaagctggctgttgctctactgctttcttggcagttgcatgctttctgtagcactgtgtgaaggtaggctcatctttctaatcaatagagttttcttttgtctaaatatgattctccgaaagcaaggctatccaaaatgctttgagatttgcttattaaaacaaaaaaaaatccccatttgcattcatttgatgttgtcatgagtacaaaataacttttgtgggccttagacatttttacctttgtgggactcttcagccatcataatatcaatacttaaaatttttttatgtaacttagaatgcttcaacattttttctgttttaggtaaaatttaggggatttttatgggccctaaaaatttctttatttctgttgtgagaaaaaaataacactttcttagattctaaaacttcatgtttttcttccgactttaaaggcaattaaaacaatttcatgggcttctaaaattattgtgggccctaggcactatgcctactggccctaatgcataagttacccctaatttgcattaaatttggaattatttaggttctatctctatacctctca

SEQ ID NO: 42686 - DNA, 2355 bp, Homo sapiens
cttttatgaattgtgatttaagtgttttatctaaagtctcattgccaaacccaaggtcacctagattttttcctgtattttcttctaggctgcttatttgtgtcaaatggatttagatcagccaggaaagagtagggtatcccattcttattgatatgattttaaagagcatattttctgacagtctatgattttaaaaaacaagttttctcagtaaaagtgcagctatgaaagacgttgttctgactcaacagcagcagcctgaccttgggagaaaagttgtttcctgttaacttcccagctggttttatctgtgactgttttttgtgtgtctgtcttaatttgcaaaatgaatggacagtctaatgttttactttttcagagggagcagatattttgcttcctcaccacacaagctcaccacacaatgcagggttcttagcctgcatcgacttgatcataactcaggaaaagacagatattggtcaatatttccttccaaaagtggagatgataaagtagaagtatagaaatcctaaagtccagaccttccttgttcagccaggttttgctccttctccacacacctttgttcttttctccaacttccaaggaatctcacaaaggaagtgggaaacaatgaacctattacttctttcctgctttaaatccaattccacgtagtcacggagactgttgggcaggatctctggcttggtggaaagtggggcgtgctgcctaaagtgatagtttggaggccttctctgtgccgtcgctatgggaatgccagctatatgttggctgggtgcggggcccagtcgccaggccacactgcacgcttccacatcctcagagggcccgggacttgggtcctggccccgccccctgcggacccggcactctgtcagttccgtccccggtcctgggaaccgctctttaccccactctgcgtgtctgccggaacctggctgggaagcgctacttgctgccctgccagcccgggtgagggcggagccaggcctccagccgcgaggactggagtcgcgggaggtggagccccagtccggaagccggggatccgcggccatgacggtgccggtccgcggcttctcgctgctccgcggccgccttggccgagcgccggcgttgggcagaagcacagcaccctccgtaagggcaccgggagagcccgggagtgcgttccggggctttcggagcagcggtgtgaggtacgagggctgcgggcgccgggtgcggagccgctggcggtgggaggtcggcgggggcgcgggcggcgctcgcgcgcgtggggcccaaggctcgtgggcggccgcgcggcggcgggctgggtcgaggacagccttgtctgtgaggtggccttgccggtcgcgcgggcgagtcgcagttgcctcagcttggggaacgaaaacgtgctctgctctgggctctcgcaccagaatgttccatctttgcagcaggtgcacttgatttaggaagacatttgaggcactaagaaaaggtagtataaaaacacgtggtcggcttggtcaaacatttgtttttactttggttattttagtgtttcgtaaataaaggagtaggcgttgtgcagatgacttactaatgtttgcgtttctgaattcctttgttaatagtgttgtctaagtcttttccaactctaaaattatttatggtttcacaaaaccaaatatcaatccagatttctcagtcttttcatgtatggctctccctccctaaacctctgtcaggtgatgagacttagattcattacatgtcttggttgctggcaagaaccatgcaaatacaacagggtacgcactcttctatcttatgctttaccagtcttagttgcaaaatccgtcttaacaagatgaaaatatatcttcttgacccagagcttgtgagtccagaagagcctctgttttcagactttcagggcttccagaaatgcgctttcattgccattttacgtccaaaattgtgtctcactcgagtttttgtatccgccagtgcccagcacaatccctagaaaagcaatgactggtaacgtggaaacttagatactgtttatttaatttaaatcagttaactccctattgtgtacatttagatcttagtctcgagtgtctgaatttaaaaattacttcctataggatttgctttggacataatttcttgtgactaggtcttccacaaggatatgtgagaaaataacagtgaatcagagttgtgtaagctgtagtaggttgggtaagaatgttccacttagtttggaactaccagctagatctactacctaggaaaagcagattctgtagaattctatttgtttta

SEQ ID NO: 42687 - DNA, 1221 bp, Homo sapiens
cataagaccagtaagatgaatgcaaggacaggtgagtgggcgtggtgagcttggtgtgagcagttccaccaggatactattattacacaatttccaaggaccagaaccttgaccttgtacctccaggttcccaactaaaggctagggtactgtacttactagtgaatctccaggacagtcaaatacctagaaaaatttaacttttgttggttatactagagtcacatatactttccctaatatcccctagtttgttaattcacgttcagcctacagccacatgattaggtagagcatcagcaaagagatcggctactggtacctgtgctttcaggttcctaaatgtcctcagaggagtttctgcttaaagaatttcctctactttattataaaacttaaaatatttcaaggaataactcagatagttccccttcccacttaaaccctttctcttcattgctccatttaatataccaacccaatatggtgcataacatgggaagaatgcaatgctatagtgatgcaatatggttaataatcattaacacgtccacagtacttatgtgccagagtgttcaaagagctttgtaaacattaactcatttgatccttacaaaaaatctatgaagtagttagattctattgttagttctattttacacttgaggacaccaagggccaaagagattaaatttgcccaaatctagctccacagtccagattcttaaccattaggcaacccataaatactctttatgtgaattcaaagcaaccttataaaagagaacccaagaagtagggcttttaaatcacattaaactggcagtaactgcctcctgaagtgcctatgaggacaaagtgtgaaaacgcatcagatgataaaggcctgaaccctggttagatccacatctagggccttttctgggaattccatcaactcattgcctaaactcattacaggaaattactaagcattgagatgactctagtattatgagctcttaaggtggccagccaaggataaaaccatacattcaattttaacggcaatctttactttgactatgaagtccaactgagtgggaatccagaacacttttgcttgagaagcagtttttttcatttcaatctgtaattttgttgtaagaaagccatgtggattctgctgtatgccagtacaccacctcctgggagtgcaaaacatattttgattattaaaaa

SEQ ID NO: 42688 - DNA, 1157 bp, Homo sapiens
taacactgagcttctttgctcctagcaatgaaagatgttcaccatataatacgcatgaggtcacaattctaatactctctatttgcccttccttttacatgagataggatcatcctgaaagctgcaatccctgatgtttatcttccttatgactgcaatcatgtattttatgcaaggttttatcctggacaacagtgaataaaaaatgtatctacttttatcacattaattaaagctacaaatatatattgctcacatactgtgtataaccttctttggcaaaggctgaggagaataaaaacatttaaggactgactttacctttttaggaattaagagtatcacttgaaaaaaaaaaaaaacaacaaccagcactacaaggtcaacaatcctggcagataagggatagaaacactgagtgctgtaagaggtcaaaggagggtgagctcatctggctggatattcaaggaagacttcctggaaggagtggggtttgagctaggccttaaaaaatgagcatatgggaggtaaagagaagacaagaaggttttccaggcaaagagaatagagagtgttcttgtatacattctttggagaaacttattaaactaaatctaaactggatttacaagaaaaacctcctccttttcctacctcttagcccctaaaaggaagaacaaggaaagtattgattcagatgtcaaaaagtttaggggtatctctagcttcagatatggttggaggcaaatgcccaaatgccactgtgattctctgtcttcattctcagaaggctgtcctctagagtggggccttgaaggtccagattcatgtcctgccaactcagcaaccctacagaattcaggcacttacatcttgggattgagtctcatttgcctgacttgggacaagcctggccctgagccagtcactgcagccaagatgacaaaatactcttattgcataacctaagtcataaccccctggaatttggttaggctggggatgggggattagtgctaccttaatctaatatgtgatgagctaggtggggataattctattagaaagatctgagagatactcctagaaggagaaatggatgctaggagaaatcaagacggaataaatacatattcagaaacgggtgagaggtcaaa

SEQ ID NO: 42689 - DNA, 979 bp, Homo sapiens
aaattttgagttagatttctatgggttgcaatagaagttctgattaacgtaaaaagatgtcccaagagaatttgaaagatattagcaaggagttcattgttggctcaacagttggtgctgacattttaagcataagtttccagtttacattgggtagataagcaaaggagataaagttctctgttaactgctattcttctcatcaggaatacccagtggaatgcaatgattgttgacctcactacataaagcacagtatttctcactaagctaggaaatcattaatctctttatcaaaccctgagaaaggaattatttagattattgcctccactggttactggccaagtgctgtttccattgcaaacatggttccctgaggatcaaagtgaaatgagagtggtttcatgagaagaaacaagggaattaagtctggccattacttttggattgtccaccatttctcttgatgtaaccataacttccaacagcccctttgctcatagagatttcagtttttaggaagtaaacctaggtcattcactaagatggagaattttggaaactagagaaggtggatcatggtagagtgaagcaatccaaacaagtgaagctatgacacactctatgtctgagtcatcccagcttatgaggaatttcagtaggagtgaaaaggtgcagccctgctgcacttcatgggctaaactttaagaacctgatgttatcaccccggggaattcttggtcagctagcacctgttactaggctttcacaggcctgctagattattatgaaccaggggacaaagaatgagcattgaatgatatccacttttttatatttaatccaatctgtattaaaataaaaaagggcaaatccaagatgtctcaaaaatcccttgcatctcttggattccattactctactattactcagtgattcaagagaagttttgatgtaggcatgatctgatagatgg

SEQ ID NO: 42690 - DNA, 2875 bp, Homo sapiens
ctgacaaactcaagattcaaaattgtttttaacaaccaggagttgggggttaaaacaaacaagttgaaagttaaaaaaaaataaagtccttcatgtaaggtgaaaacaaaaatatgcaaaatatggtagcaacctggcttataaaaaagatatggaaattttagttggcctcaggttcaatatatgttaaaagtgtgaaaagacacggaatattaacttatgatttttttaagtaccttttctggatcaagggaggtaagagtcaagaggagtctttgcagttctctgtgctacattttaaggattttgaccaactagaaaaaaatgacctgtgtaatgaagagtttaaatgcatgccaaatgagagtcttagcttgagggtaaagggcctatggaagacttgataagtttttcaaatactggaaaacttgtgatgtgaaaagagtgaattcctccagtgtaaagaacagaacaaaggcaagtggagagacactaccaagggtggaacttacaatgaaagcttctggaaaacaataagcttatacaaatatatactgttttaataatggtgaggcaccagtggttgttatttctgaggccagcatcctatgcagtgtaaaagcccaaagatgaatggagaaacacggctcctattttctgttctacctgacggcacaaggtgccaatgatgcattactcatcaatgacccctggcttcaaaacgaaatagacaataacgcagaaaaaacagaagacaacctaattgtataaactgaagacagtagaagataagcactcaaagacagagaatagaatgacaaaggaaaaaagaaatgttttcttttattttctcattttactctctcctctgcttttttaacctacattcttgtttttatttttcaactatcatcttctgcttcttaaagaatggtgacagtcttgcttagtgagttccaggactcgtgggattttaaagagataacttgagaaccacaataaccacaaagtttatgtagcaataaacatcctaacatactgcacaaagtgagaacaaaatgaagtcaaagtacagtttaaatatactgatggaaaattaatttacaatgagtcactaaagggaactggggacacatcctgtcaagatgacctcattgaatccacacttctctctcctatacaaaggcccttggttctttcctaaccacaacaaaattatagtataatattttaaaataggtgaatgcctggtgggccagacctaattttgagcttccagtatttcctcttctcttcttttcttagaaactaccttagaaaaaagtatttctaagcaagcaaagcctgcatttgtcagtgtgagctaaagttacctgttctgttgaacgaaaggattgtagcctaggtttgctaatttagacacagttgaatataatgagcagataaagacgaggagctgcaattggtggtaagaaggaacaggattgttgtgtcataggcataaatgtatcttagctatttttaaaatatagaaataattattggttcctgagaagaagccgatggttagttggtcagtggattacttcctgttgaacattagatgatataccaaatgctgggttaagtccaaaacagttttacctcagatcagtctgacggctttgaggaaaggaggaggcagtcacatcttatgatttttgcgaggaaatatcatttctgatattaccttgagtttggaagatgaaagaagactatgtgaaatattaagctttccaaattatagattctttggccatgtgaaaaaacaagcatcattcttcatggcctcaccctgtattagctgtgacttgcataaaatggctaagcttctctacacagtcctgatgacttgttgaggttgttctccaaagagaaaataaagtgactgtttcacaggcagaagatctggtccaatgcaatttaacttgtagagtatggaggagcatacattctaacaattataaaatgacttgtaatagcattattgtgtaatgtactttcacatttgtggtgatgttccccatcacttacttgtgatttctacacctgttaacatgtgttgaaacatcttctcagtacacattttacttttttctatagactgtaaaggaggcaaaaattaaatgcttccttaagcttggaaacaatattgttctccaagagcaaatgtagaatcaagacgtcataaggcagaaaagtacataaatatcctaaagaaacaaatggttcccaggttgtcaaaagctgattgtaacttgacaggatacattaacatagcaacaacaaaaaaagaacatgactatcagagggaggaaatcattgtatcagtcaaggatcagtactggaaattgaaactgctaccaaaactctttcattcaaggacatgccactagagctgtgatgaaggagtcaaaaagctgccactactgcaaatagatttcaaagcaggagactggatgctggaactctgttactagcagaaaacagcacagaaaaaagcatcagaaaacaaaaatggccttagcctcctatgtctcccaaatgttgcacaaatgaacacactggaagaatctacttcacctccagacccctagttatacagaatgggaactaattcttacctttccaaactctgtagggcagaaatgcccactagaaggaggtaagaatagatgctcagagctagtccaccctatctgtgaaggtcatcaagtgccctccaaggaactagtgttgcttaccttctgatttagagatgggtgttttaaatgtacaatttttaaaaaacatttatatcaaagaactaactctctctgattggatttcatgttca

SEQ ID NO: 42691 - DNA, 575 bp, Homo sapiens
ggcaatacagccaaaggccaggccctagactgtggtactttcatcaggagagtagtatcctgttcagacccctcttggtgaccagcacactttgagattacatctctctctggccttttgttcatattgcctgtccgtgcagagttataacagtttttagtcaatgtccacttatgcagtgaagtttggtaaggcaaaaggcagatccttcctaccttacataaacagaaataacacagcctcagaggcagtagttcctatgcctatgatgcaatactattcttatctttgttactttactgtttcacatgtacctggggtaatgattatcacgggtacatgagataccattaaaaagaaaaactgatcaaatgaggacggataccaaccagcaccatctgtagttatttaccgaaaagccaggagctgcaagtttgaaaggtcatttaaaaataaaatatcaagcaagtataatagctcatacccaggcttaattacctaggaaatatgccaagtggcttcaaagatattatatgtgcatgtttacatattatcttatttaaatacatgggaag

SEQ ID NO: 42692 - DNA, 1278 bp, Homo sapiens
tagatgaggacagatacagatgcctgtcaacttgttgtctccagtccctagctcaatgcctggcacatagtaaaccctttacacatgtttgaatgtgtgaataaatgttttataactacttcctagatctaacaaagttttcaggaaaagagttttctcatttaaaaaaactgttaattttgctataattaccagtccatgttattgtagtaattctgactgggccacttctaaacagaatagctttatctctctgtgattcaatttcctcttctaaaaattgtggataataataacactaacttgtagagttgttactggataaattgcaattaacatatgtcaactgttttgaacagtgcctggcatttgttaagtgttttattaatgttatctaggagaagctgtaataatagtgatagtaaagtaatagcagtaagaaaatcaatttatatcatccaaggatatatcataaagctccattaaaatgtgggttttacaggacaatagtaacaccttcactaaaactttcccatgtttaagtgaaaaataggtctaaattattaatctataacccacactagaaaatgttttactggtacatgtttccagcaatatagtcaaataaatgactaaaactattaatagatttgtatttcttgaaaatgataaaatattgagattattttaaatttctaagttgcaatgcgttttacaacttccagttttttctaaaatgtttggatatacttactcttttcctaagttctgaggcactcaccaaggagagttgactctcagtcattggcacatttgcccatttgtcttttgctcgggagcacctaacctctctgtgcctgggtgggtggtttcctgtctgtgcttggtttgaacctgttccagggcttgtggtttttggctaggcttgtactttgtgttatcatcctactgcatattaaacgatggtgttgattttgcaattgggcgtatgactcctgcatttctcagagggacttatgagaatctttcatgttctggtttgtatgttcttttctcttttcactctcatacccagcaggcttcatcaagcccagtctttgagctgagacatcttttttttttttttcatttcaagatgagaaacacattttgagtagcggagtcctagaattattagatagaagattcgattaagctaaagtaactaggaaatgatgtgaaagaaaaaatgttgcttttcttatcaaactaaagagcaaggcagtaactggagaacac

SEQ ID NO: 42693 - DNA, 3347 bp, Homo sapiens
ttctggacatatgcttttatttcactttggaaaatacttaggattgggaatgctgttatggtaaatatataattatataataaactgtcaaactgtttcttaaaagattatatcattttgcatccccacaccaatacatgagagttataattgctctacatctttaccatatctcagcattgtagatcttttgatttttatccattctagtgggtttgtagtagtactccatcacagtatgaatttacatgtccctgatgactgtgatattggggatccttctatggacttcatgcatttcttatatcttcttttgtaaagcatgggttcaaatcattttaaaatcaggttatcctcttcttactcaattgtgttatttatcagacataattttataatattgtctcctaatctgtgatttaccttttagtttcttaacatttttcaatgctgggtgcatttttccttgttattgtttctttgtttttgctctaagaaatctttgcctcctcaagactacagagatttttttattataatttctctagttttgtagttcaagtgcttagcttaatgttcaatttagagttaataaaaaggccttttaaaaaaaaataaataaagctatccaaacctcagaccaatgtagaatctgtctcacagagtcgttgtaatgctagtaagtcataactgttaaataattattagccatagatatcgatgcttacctctagaacaaatcctctcagagcacggaaggaaattctgagttagaaaggcaatcttagcagaaaacgttttaaacattaccgaaaaaatgtaaacttacataggaactacaaataaagcccattcaccaataggacacatctgaaaattctgaatgaaaccaggcattcttaacttcttaaacgtcattccacaaatcttctttctaatcttcctcaaatctaaactgatttgttttatcttaggactgaatattcatgacagaccaaagatgctttgtttgataccgtttgatttctataattatattctgtaaatatgtctagaaattggcacaaaactgagaaggaaatcacagaaaaagatcagaatattttttcctactgcttttccttagagaagaatctatataatctcttacatctttagacatcagtaggtttcaggtatgaagaaggttagctacttcttaataactcaggagcagagtacagcatagagtccagacaaacatccacaaagataattgtagtacttttcctaggattacctggtggcttatcaatttgtgcacaaacctagagctacaaatggaagaggggctaattcccatagaaaattaatgttaactgtttatgtatttttttttcttctgacctttccaggtgagagttgggttttccagagcccagtcacaagaaatttacctattgatcctctgacgaaatgcaatggtaagctgtgctaagtaaactgacccagctcaccctaacttgtaactgcactgcaatgcttgaaacgcagcgaaaatcctacagcatgttcccttgttctctgaactcacctgcccattgcgtgcaagaaaaagctggattccttctcggtctagtaaatgattttcttgaatgatgcaaccggcttatctagtgggttatctctggacctgttcacaagctgacaagtatttgcagggatgtacagtcatgctttctgttcctcaaactgtaatgtgtttgtaagtgaaaaatgatgagtatgatgtggatccgagctggtaaatcaccccattatgatgtggtctcctcttttgatctgacctgaggcctgaagcaggagaatttatttatcaggggcaaatgaattctgactcagataagtgtgacagaatgtaaggtcttcatcgatgcattgattcaatttttcaataaatatccattgatcttttactaggtacttttctagccccaccagagaaaaagacaaaatccctttccccattgggtgggtttctgacaattcgtatatactaaggatgacaatgaacttttagtgcttttcttcatgctatgagacataacatgcaggtcgatgactttatcttaattcctttccacaaactatacttccttaccctctagtccttggcaaatagggtaaaatcttaaaccaagagagattctagcacatagcccctcagtccatgcattctctttgtgcaggggaatttaggaaggaattggtcttgacatgagtaaaaagaccagatcctgaggcagactcccctccaaaagagattgaatttactggattgtgcttattgctttcaactcaagaagcaatacttcccttaagtagtcctctaagtttaaagtggaactcagcatatctccttttggctcagatgtatcaacttttcttcaccactttcactctggcactcacatctggcagtattcaagctggtggctaatagaatcaaaatgataacgtaaaaatggaccgtcggtacacctcacttcgtgtttggcactgtttgttcatctgtggaaccacttcatattaacaaagatgaaactttaagctaagtctagaaattcagtataaacctcagagatccttgagtcatagtctagataaatctgtgtgcctgaattacaggtgcatgaaataaagcatgagagaccaggatttatcaaatgctcacaatgaaaaagcaattcctgtggaaaagcaattcatatatacacacacatgtacacacacacataaattaggcagatctagatgaagaaaagaaaataactgctcccttccaggaccatgccctaaacctgaggctaccatgaactcacccatgtgcagctccagctcttggaggaggcctcaccttcctcatcacattgctggatattaaacaaatactttgggatgaaggagacaaacaagagtatcaacactactacttaatggtccatatgtatctagaagacctggttggaaggaagatggtgaaagagggaaaagcacaaacatacttgtgccatagtgatgcacactttgcctgcctcccttcaggacaccaagatgcacatcaaacaaaatcttcaaaactgaaattcaatctcaaataatattcaatcttgtatcagagttacccctgaaatactcaacctttctaagttgatccattgggataaagcagggagtagaaagtcgaatcatagccccaaagataaaattcccctaaaagccagtcataagaggcagttcaaatgtaagatatgagactagattatccatactggttcattatccccaaacaatgacacacctggttt

SEQ ID NO: 42694 - DNA, 1866 bp, Homo sapiens
tctctactaaaagtacaaaaaattagccgggcatggtagcctgtgcctgtaatcccagctactggggaggctgagtcaggagaatcacttgaaatgggaggcagaggttgtagtgagtcgagatcatgccactgcactccaacctgagcaacagagtgagactctgtctcagaaaaaaattacaaagaaaggatgtttttcctgatagtacccatacccaacaggttaagacaagagtagtgtaggtgtttgaattaaaaaattgaggtgaatttcctgcatgtcacaggttgtaagtgagcttgcacaaaccactgtataaaccattacccccacaactgaagttaattccctaattgtctcctcctccaagttctggggagtgaatcagccatttggcattcttccctacttctgactgactcagaagtacttccgtcacaactgccacacatttttgaaaaagaaggagtggagttgttatatgagtcataagagaatgagaaacaggagtgaggtgaaaggtgaggtcaatatcccaaatgcatttcaaaagaggtagtcaaaggataaaaaagatgttttacactagaaacttttgaagatattagtaactaaacagacttttgatgactactctttacttttgaaaggtcatctttcttaaccttcaaaaaacacacagatatccacatacaaagagagacagaaaaataaagagagagatctgattctcttctcaaacaccttattgaaaatacacttttcctatgattttcttcatccttattctatcatatggctaaatttaacgttccaaatcattggttatagataaactaaatgaaatcaggcttttcaactccatggttggccattgaacaatgtatggtcttagaataattaaactccaagagcacagtttggttattgataagaaaaagatttttttttttaaagtttaaccggaacctaattttcagcagagcacaggcaaattgatttcttttttatttacaggtaatttaggattttcaaaataatgtgataaaagatgggccccagggtaaaacccagtagatcggataacagtataaaaatcactgaccatactcagcaaaaaacattagttcagcactggccaaagccacaggtgagagatttagccagtaagtctccacaatattttggaagatatttatgagcctcttgggacccatgtcaaataaaaccttgtttacaaatctgtaataatgttagttaactttttaactcccaagaaaagtttcaaaaagtgctgccttacctttattatatttgaagtagatatatccaattttctacgattcaaggcctgattggatactaaatttatggaggaatagacagactattcccaggggatttttttctctactgtttgtagcatgggatcttatgaagagcaattgagcactgtggtcagtagcaccagctcttatagcagcttgcttggaatggaatcctacttggaatggaatcctactttgccttctccttactccattccattagacggttttccacttctctgtgccttactttccctgtccttaaaataaagatagagacaatacttatttgatagtgttgttatggagattaaatataaagtactcagaacagtgtcagacatattaaaaactctttgaaaatgtacactacaaaaaccatgggtttttgaccttttccaggttatgcagatgcagagctgagacttgaacccacacctctgaaacccctgacctacaggctcagacgtgctcactaccattaccccagagctaggtgctgtgtgaataattgtcatgctgagtaattaatgaa

SEQ ID NO: 42695 - DNA, 1307 bp, Homo sapiens
agaccctctggagggctctaggcatcctgctactcctcctcccgctggcactcttccctaacgccaggtgatcacaccttcagtcaaagagttcccgttcttctgcctcctgcaggatatgcttcttggtctatactaccacgtgagcttctttagtgggtttccctgctcgcccctgcccccaccccccgaccctcacttgcgagcacagcgcctcaccccggtggacagcccgccggcgccgccaggccctctgctgtgcgcacaagtcagcagctggcggcctgctcgcagcactggcagcgaggacctcggaatcgcttccgccctcgggccttctcacgcgtctagggactgcctccagcaggtgcagccccaggtgcccaattgccagatctttaacctcgcgctctcccagccttcaaagttctccaacccgcgcctgccagccccagcgcgccctcttgtccagatgccagctcggttcagggttcgccctccccgcgactccagccccagactttcctcctggtttccagtgcccagcacggccacttacccagggcaagggccaggagcagtggcagggagctggcgccgctgcaccgggcggcccggtccatcaaccccgctctgccgggccgggcagcccctagacaagtctccctccttcttcgcccccttcccgggcctcgggcgcctgagagggtgcctggaaactaatcccggaggcagaaggaaacgaaactacttcccaggctggcaccctggctacaaggcagggaaacacccagggcgggaggccggccggctccgtgaatgtcgccgggaggagggagcctcctatttatcccccctcctcctgcacacaccccgccaaagaggcgcaggacttggtcctgggagcctccacgctgctcccacccaaattgccccacacccatacccacacccagggacatattcgggctgccctcggaccagctcaccactccccctgctgggtctcacctgactgactgttcatttccctaccccctagggcgtaaacaaggtagggagggagatgtaaagaatccgcgtggaggggtgtcgggggttccggtcgggcctgcaggctgacctaaactcctggaagccaccgaggaagagtcagagacccaaacgtgttctggaattctaacttcctttatttcagaggattgctagtgtcatggagaaaccagactcaccattcattgtggttgacttcaggcatttgataatgcaggcaatttcaaaagagtcattgttgccttttaaagtct

SEQ ID NO: 42696 - DNA, 2095 bp, Homo sapiens
ctgttaaacactatacacgccctttagtatataatcctcatacacttttatgaaacaggcgcgatcatctccattttacatacggggtagagaggagctagctaaaatcagttattaaagaggagagctaagatttggggatagggcggttgaggttccaaagctcaagttttctaagcaaaatttttgtactgtttcttgcaaggaaaatcaggaaacttcaattgaatacgtgccaatttaaaaaaaaatacagattaagaagttttctcagagtaacaatacatgcttattaggcactttcctatgcataatttcctatttaatggcaattacatgattgtcttcttttttgggacacacgttttctcctacgtctgaacatgtgcactgcctttaacatgaagctggcaggctataaaactttaccacaggagctgaaatcgtattcgggttctccacttgcttatttccattatctccacttccattatttcatcacacacctgaacggaaaaccccagtacaggcccggggctgcctcagtctacttcggcagcaaaagacgaataagcccactggcagagaccactgtgcaagcctaatcacttcccaagaagggttttgctttaaaggtacgaagcaggtaggaaaggtggggcttatcgccttgccaaaaacgttctcctcaagaagaacccagttccaggtggaaaaggtatcctgaaaatcaggttaacctcaaacttaaatccaagcctaaccacctgcccagcccgccccagcccaacctgacggaagcttgtcagggaagagtccatagaaggcgtcacctttaggagacatcctctgtcatagtgctcgcagccccgctgacctcgctcttgaccgctggcgccatcttcccgggccgtcgccgccatctcctccacctcccctcacattccaccgatccttcccccaggataaaaaccacgcccagagaagctgcgcctctctagcacacccctcccagccccagcggccactagcgacaatatggctcctaagcacgtgacccggggcagacggatttccggttcccggggctacgaggcggaagcgaaggcagacgcagtctccgtcgttgacgttagtcgcagtcttcgctgctaacggtaataactcttaggttgcctgttttcccccaatcgctacccgcccaaatctcagggcgtagttcggcgcgaggttggcggcagcggcgcggagacgctggttggccccagaggaaaggacgctcactgggcgcatcgttacctgtgacgggtcctccctctctccctccggtggcggggagcctggagaaaggggcggagctcggcccgggccctgggctcagcgggtcccgcgcgctgctcttggacgccagggtgctcgctggcacctcgaagtgcttcttgcttcctccctttcccgtttacttgctgttctttcaaaatatgtactgacattcactattgccagtcaccagctaaaccgtgaggacaaaaagtaaggaaaaatagacacactccaccatgacctcatggaactaacaagactggtggaggaggaagacattaataagagcaatcactgcaataaatgtaagattacaacctggagaagtgctaggaagaagtgtgtgtcctgtgagagctaatattagagcagctctgacaatctgagtgtcagtgagggaaggcttccctggggaagcgatgcaagccgagggctgaaagatgggtaggagttagtgtgcaaaaggctttgtggcacaaagaacatggtacctgttagaaggtggaaggaaaatgtacaagccaacaaaattgaaatcatactcggggtacacagctaaatatgtttctccttattaaagagtcaaggccctggaaaatgatgtaagcaaagctgcaggtgttagaagaagatatttgtctttagctttctatcctgattttgtgtttcctaaaacaccgggaaagggaaaatattccccttcagctttccggttactaactcttaacattctaattttctttcagttttgttatgagttgctaaaatggtg

SEQ ID NO: 42697 - DNA, 505 bp, Homo sapiens
acccagagactttgattcactcattgttgaattgttgctgaacattcacaatgtcttaaaggccagacttcagtcactccatttggaagctccagttggggcatttagaggctgaaggataaaatgtgaactcatcttgtgtctgaagctgaggaaagcccatagttactcattaccacaatctggatctgtctgatgctactgccaagcataaacagggcagatgcacactcaggatgaagtcaccttaccacatacacaggcaaaacattcaaatatccacaggtctcaccagcaaaggagtctgtctagtcacctggtttctctcagctctcaggaagaatgcatggaatgataaaagattggtcctgatctctgctaatgctttactcagccactggaactgacacaattttttactctatgtctacatctctagtctataatcaaatacaagagcataaaaaattaatagctcttcttcctccattttaatactaggctt

SEQ ID NO: 42698 - DNA, 2762 bp, Homo sapiens
tcagaattagtttgtaaagattaaatcataacataaaggcccataagagtaatcttaaacatttaagaaaaatgttactgccaaagaaaggataattcaatcctgaggttcaaactcatcgtaccgtttatctcctaagaccaggaatcttggattatcaaaaagaccactggatgctaacagggccaaaagtttacttagaaacttggttcacatgcctaaggctatattaactgccaaatatggagctagagaaaaattgccatcatctcccactctagtacaccggggctctcttaacgacagttaatgtttcctagatccaggtacctgcaacactaacgtttgaaagaccagaacaaggtacagagccttgaacctaaaaccacagtatcttaatccaagttaatatcccacaacaatcatacagggagaacaggactttactattccagctaaaagtgcaagtgccttttttttgttgttgttatgaaggaaaaggcactctcctcccaccccccaaatccgttagaacattaagtatgtcttggggaaaaaagctgatctatgcaggaaattatagacgaaaatctatattcgccccaaagcggcaaagggccatcttaagaaatctgcttttagagacgcaggaaaaattctatcagattccactaacaaaatcaacacaatctagggaagcttctgttcctttctgtccccccatcccaacaaaagcgggaacccatcccccaaaagccattcccgagtcaataagggatcgtctgcataagagggggacgaagaaggcgcacgttacagttccagtatccgaacacgttcggattaaacccgcggtggcagggagaggggggttggtcaaacacgacggaacactaggtactgggtaagcgaagcggcggctgccttcaaacccggattctgtttccgtgcacagaaatggtgcccggaggccgccactttcgcatctgcgtcgcttctgcctccgtcgacacaacctcttttcccctccccccacgggcggggtggcgacggcctctccgctccgaaggaacaaggtacaagagccgaaaacgattcggaaacaggaacggtgggctacccaccctaaaacatcccctccagaaagcctgctcccacacttcctgtattaagcttccatcagcgcgccttcgggagctgctgcgtgcctccccccccacttcgccacctcatccccaataaacctcaaccccacctgtgcactcggagccctctgcccgcaagacgctcgcgggtcacctcccttcccaggcggcctcccacccctcacctagaggaaagactggtcttctctcacgcacacacggcaccgtagggagccggcaagaacaatgtctctgccgctacacctccggctcccgggctcacacaccggacgattgcctcgcgccgcggagcgcgaatggaatgtccctttccgaccaccacaccgacctcccctcccggcgcccgtacacacctccagccaacggcggcggcgggtacgtcgcgcggaggtcagaagagtcgctgaggaccgggtgcggcgggttcttattgctcgccgcccccttcctccgacaactcggaagcctcggaagccggagagccgcgagttcgtctgcctcacaaccacctcttcccgggcgccaggcgctgcgacgtgcgacaaggaccacggacgtcccgccccctttgccaccgccccctcttattgttttacccctgccgaaagggccagggaacccccgagcacagcgtcagccaatcacgcatctcctccagagccggacccaaccttcccgtgtccctctgcggagcacgcgcagtacgctgccgcgctcgcacacgctcgcgcccggaaagccggggaaccggaaccggcctaaagccaagataagagtccgctgatttgacgtcacaagcaggctgcctttctccggtcccgaggctccagccttgccgcccttcttcctgatcgcgcaagcgagagctggttcgcagcaacgcagtgtcttttgtagactgatattctggtcctttttattaatgggaaggagggaatttagtaatctctctgaataggtgtctgcaggttgctgctgtagacgagcttaaaatgcagccggtgatttcagctgtttgcacactaaactcacctacattgtttacttaacccatcctaggttttaagccccattaagaggccctgcagtaaaggaagaacatgacgtgggctttacagagggggaaaagactatttctttgtgtccttgttacgaatttaggcatggctaaatatcagtagatactaaagcattttacatactaaagctaaaagaaggcctgaaatacaaggattacagtcctgttctagctctaagcccagacttgcccccagggtgagacactggtgaccttgtttcatggacaaagccaagccaaatcttgtagtcaaggaagccactttgcatcttaggtctggcagtgttttcagagaataccgagatagcacaggaattttggaatgaaggactgaggaagtgttcaaagaaacggaaaggaaaaaatacattaatgaatgcttacgaactaaacatggtggacgcaagcatgtacatctcatcagttttcttcgcaatcctgtaagggcaattttaaggtatttggcatgttaagacaatacgtcaaataccttaaatattggcagaggcaatgccaac

SEQ ID NO: 42699 - DNA, 765 bp, Homo sapiens
tgcttccatgaagtaaactgcactataaccagactgcaatgtaaatatatcaacagaaggagtcagtgagaccctaaaaggataagaaggagcccagggaacagctttggagtgatttctggatgcattatctggggcaagggccacttggccactccattggaatactatgatctccatatcagggaggagtcgaggctcctaaactccctcagctgaaggacactccttaaaatcacccacattcttttgttgcgatgctaagtaggcactcagtaaatgcttactgaatgcatgaagaaggctcctccaggcagccttctgattgtaatctggcttccctgtaacttcctatggggagaatgtgcagacaggaggagtctcttccttcagacagttaacatttcttcttacacattaacaaatgatcaaacacgagtgtggtgcaaggttcagatagcaaaagcagatttcacagggcttaaacagtgtctgcaccagtgatgagaaccagacagcactccaggaccagacactgcggaggcagcagccagcaccccacaacactccacctctcaaaagtcccccaatccacaccacttacccttagtcacgtatgcaacttctactggtttcccccaacccctagacctttaattgaataaatatttactaaatgtctacaaagggccagtcctaaaatgtatacgactgtgaaatagacaaacagggtttttagccagtcctaaaatgtatacgactgtg

SEQ ID NO: 42700 - DNA, 3138 bp, Homo sapiens
tttcaagaatgatgtcagagttgagccttaaggaattagcaggagtttgcttgatgaagagaaaggaagggaagggcatatccaggtctgagaaaaatgcccagagtatgtgggggaggcaggagctgaaaaagtaggcaggagctaaatcataacaggcctgtatgacaaactaaggagtttgcactttattctggacagaatggggaacaactggaggattttaagaggaatgacatgaacagatgttttgttgttgttagtctcacccaaggatggactggagattggactggaaggaagccagggctgaatgcagacaaactaattaggaggctgttgctgtcatctcaatgagaaatgatgagaagaacataatctatgtcacaggcacagaggatggagagcagaacacctatttgagaaatattctataaatagaaatgataggacatgactattgattggacatgtgtgggtggaaagccagagtctaagattcttcccagcttcctctgtctagcttaggcaattatttggacagtggtactactgagcacggcacgcacacagtagaagcagcatattgactttttttctttaagggaggcagggaaagatgacgagttcaattttaaatgctgaatctgagacctgtggggaatccaaggggagaggtgcatgagtcagttagctaactagacctgtgctttttagcctcaagaaatttacaagactattccagaagcatgtgtactgacaacctcactgccaaaggaacaggcataccaattagagaaaatgacaatttttcatgttaaaaaaaaaaaaactgaaaacacaggggttgagagttaataacgaaacattatgttactcgccaaactgacacagcagaacaatgtatttctctagtaagctaaatgtagggtttgatgggtttcctcctgacgacacttgaaaatagaggtgtacctggtgtttagatctaggaattcctttcagcaggtttgaagagcaagagctgagaaatgcgccctccagtggcagtggaatgaggggtgtctagtaaccctttttaccaccaaacaaagccctgtaaagaaatgcaatttaccgggatcagaaagccacaatgctggtaccagtaaaccgtcaaaccaagcgaaccctctcaggcgccaggaagccttacctgtcacgttggccaaaggaaaatttcactttcgactcaacaaaataagacctcagatttgatagcttgcagtaagtcccgcttggcgacgattaaacaccctgcaagtcgaaacgcgtagtctaatcaaatcctctccagcctgcagggccgggcttccaccacgtgggtggctgcggccagcaggatcaatccgcgaagggtgggggtaggaggcgtgcccctgcggtgggaggcggggtctgcgcagtgggtggggcttcggcggaacctagctaagaggttcctctcgcctccgctccccttttgccttcaaccttcgagccgccacgtaatgccacgtccccgcgcatgcgcatcttggccgctgctggcggctgtttccgggcttagagggctggagtggccgccgagttggaggcggtggtggcagcagtaggagtgtgtagagtgcgggattggggcccaggccctgcggagggcgggggaagttgtcttcttttttttccggaggggccggtaaacctggtggctgaacggcaagatgaatttcctccgcggggtaatggggggtcagagtgccggaccccagcacacagaagccgagacggtgagaggagcagcgggtctgggacttgggaaggggtccgggcagggacggggacggagcactcggagacccgaaggtcacctccagcgtcccaccatggagggggcatccacatgccgcctccccctttgccctccttccgctcctgaaatcccagagttattcaatcacgcccccagctcagtccccattgctgccgttcggccggactgacggcggccgcgccccgcagctctgtaggccctgaagctcgggctaggagagtggtccgcaggtggtaccgcacgggaagggacggatgcgcggccgagctggcccgaactgcctcccacgcccctcggggccgtgggcccctccctctttctctttcgctcgtctgcactggccgagaggagcctgaagtcctgctccctccctcgcagtctgaaactggggcgttggggaaaactgcgagaaggtttaaaacccagctgttggtgagagcatttggctaagaataaaacgatattctttgaaggacaaatccacctgctcctgtcccatcaactggaagagcggtcgttctgcctggtgttatttgttcagatccggcttttcgggctcacccaaatatatatcatttggcaaatgctaccttgaacgtagtagggatcttaagcgctcaaactgctttggggacacgtccaccgctttctgcctgaactcctaatgacatgatttgcggcgttatttaaaaaaaaaaaaaaatggttagccgctgaaaacattatttaatagttgcttagattctaggtttagaatacacttattttgaagtttggttagtgtttaatggaatcgagggtgtatgcctttttgaaataaactttttatttgagaagaattttagatctacataaaagagactaagtataacactttaatggctaactttgttaatgggatcctgagggataatatagtagctttcatttgtcaggctcttaccttgtgctaggttctgtgctgagctctttatattccacattatgctttaatcgttaactaccctgcaagataggtgagagtattctcaccttaaaagtcaaaaaatgagactgagaggggtgaagtaggccggacgcggtggctcacgcctctaatcccagcactttgggaggctgaggccggcggatcacctgaggtcgggagttcgagaccagcctgaccaacatggagaaaccccgtctctactaaaaatacagaattagccggccgtggtggcacatgcctgtaatcccagccactcggaaggctgaggcaggagaatcgcttgaactcgggaggcggaggt

SEQ ID NO: 42701 - DNA, 1016 bp, Homo sapiens
ccctccagaccttttctgtgcccagaaatatcccagcaggtgtcttgcatttgagaatgtgcattgaggaagaaagatgcctgaatatggagagggaagaagtaaaataagatccccactgcaaataaatcttttatctgtagttttacacagctctggcatccagtaaagagatctggagaatctgggactgtgctttcacagcattatttcattttgtctccccagaaacttgagtctcctaattaagattttctttcctttcttaggcatttcagctgctcctatttctttctttttggactcttctagaaaaacagagaaatcaaacaggaagctgctgctggggagttctgtgttggataggatagtgtggccaggctcactgttctactacctcaaaccccaaggtttcagcatgactcagggggtgcaaactccaaaaggtctaacttggaatgtgacttaggaactctggccagtctcccttgctcagatctgaaactgggaaattttcaaaacccaaaaccttgcataatcagaaagaataaatccctataaggaagagaaacacaatggaaaattccactggagatatctgaaattgcctgactcttgtgtcagcaactgggaggtcagatggccacaaagagtacacagttggacaagatctatccttctaggaagtggattcctggagggtacttctggtcattaaaagttgcttgaaaactgtagaaactaagacccagtgttgtgtttgtgcgtgtatgtgcagtggcgcaatcatagctcactgtcacctattattcctgggctcaagcgatccttttgcctcagcctctggaatagttaggactacaggtgcactgccaccaccacacccagttaactttttaaatttccttgtagaaacagagtctctgtgttcccagactggtgttgaactcctggcctcggcctcctgaagtgctgggattaccggcatgagccactgttcccagtcctggtcttct

SEQ ID NO: 42702 - DNA, 609 bp, Homo sapiens
cgcctcaaaaaaaaaaaattttttttttgtagagataggatccttgatctgtcgtccaggctggtttcaaactcctgggcccaggtgagattctctcatctcagccttctaaagtgctgggattacaggtgtgacccacaactcctggcctattgttttaaaaaaaaaattgttagattggccactagagggagctcatgcttccttcttcccacctcatgacctttggacgtgctctaccctctgcctggaatgtgtttcatcccctctttgcccaaccttatttcattcatttgtacctgggtagtttgggatcaaccccaatggacaacactaacttcctgagcgaatgttaattctgtcaaatatacttcaactggacattttggtgggcatgtcacaaggaggagaagctgacctctaagagctggcctgaggagaaatttaagggtttttctgcttctaccctcagaacccccaaccctctccatgcaatatgggctttgtggtacccacagctggtttggaaagtgggaaacacgtacctctctctgcattctggaaagcaaaatgatgttgggtggaggtgccgcttcccatagtttaagc

SEQ ID NO: 42703 - DNA, 673 bp, Homo sapiens
aaagtgctgggattacaggtgtgagccaccacttttaatacatgatttcaaccaaataaaacttttaccctaacgttttcatctaccagaagatttcacggagtttttcatattcactattaacaaaacaccaaacatcctaggtatgcaggacactgtgacacaagttacctggaaaagtgcctccaggctgaggtttgcttgtcctgtagcattaagggccttgatggcagatgttctgtaaggacaaaggtcgaaggtcacttggcatttcaacaagcactgaagcccatcagctgtcatttttgggaggcagaatgcaagctccagtctcattatctccctttctccaaaacagattctggccccaagcctgtttcctgctgaggcccagcccaccacagtggaattcatccagcagctgggacggttggcaccatctgctccagaaagctgggatgatgaaaatgtgtggctgcagaactgaacagtggccaaacttgtggggtagtaaagccaaggcaacgtatatagctacctgcactttggaactgtgctgacttataattatagaatgtttacaacttgaagggacaataaaaacccttgactggtttatttattgtttaaataagggaaataatttccttctaaaaatatcttgcctagaaga

SEQ ID NO: 42704 - DNA, 531 bp, Homo sapiens
tggatctacctttttgttcaatcatatttctacatggcattccatactttgttaaacctaagcataaaaatggacaatgtcccctgtatctttgggtcttcattctgaagactcctatgtcatgtacatgttaaataaatttgtatgccttttctccaattaatctgccttttgtgagttgacttttcagtgaaccatcagagggcaaagaagaaattttcccttggcctttgcagaggtaataggagtgatgaaatatttgtttgcttatgttgcctataccatcccccaactactatcaaattcattttctctaacctgtgacagcaaagcaaaagaacatccataaaaaatactgaaggcactggtgacttattttacccaggcgacaaagtcagggagtgcaaatgcatctatctcaggaaatggaggaaatgggcagtgactgctaatagacatggagtttctttcttcttccttttttttttttagtctaggtcccagagtttcttttgttatttcatttattta

SEQ ID NO: 42705 - DNA, 1503 bp, Homo sapiens
tttccctctcgaagcctacgatgtgcagctcagatttacccagagaggcaaagaggaagcgctggaggtttctaggcaagcaggcaccgccctgtttttatcacacggaaaatatgtctcctcccgctagtctgtgtcgggggcccccgcaagccccgcgttactccgcgcgggcttggggcactcacacggaggactcgtaggccaggttgaccagaaggcagtccgccaggctgaggttcatgaagtcacacatgccgcggatctcgccggtgaagggctggggcaggaagcgctccagctccaggaccacttttccgattaacacgtgcacccacttggggactctgtccctagaaacaaaaagcacaagggcgtctgacccgctcagaggtcggcggcgtgcgactgcgtgtgcactgcgagcggggctacatccttagggcgtgaggtctcagggccactgctccccagtcagtggaccgcccaggcgcggcgtcactcaatctgcagcctcccgggagtggggggaagggggcggggggaaggcggcgggtaagaaaactccgaatggggagggcgagtgaggctggtcccaaaggggcaagcttggaaggcccgcgaggcccgcaaggaaggcgcgggttgcccctccttggtagctatgcagcccgggcgacaactcgcgcgccacgctgacccggaatggctcaaggactggcgtgccacgggtgacaccgaacttgaaagccgaacctgccgcgctggattctccccaacccggacgctgctcagggcggcagccaaaaccagttctccaagggtggcggggagtaaagcgtccccgtttaaagcactctgagcagcgcgcgtttgactccgacccgcagggccggtgtccccgcagaccccgtccagggccccagctcacccgatgacttgcgccatcgcggcgcgcaccaagtccaagtcgtagtgccgcagcacgggcagccagcgcagctcggggaccgagtccaggctcacgttgaagcgcggcgctgctgggggcgaggcggctgacagcccggccccggccagcagcagcagcagcagggacggaagccccgggcgcgcctcccggtccgcggtccgcatggctcgggctccagcggccgcaacttggagacctgcagccgctgtcggagcccgggtaagccgtggaggaggaggagctggggctgggctgcgatcgctggaggtggggcccgcgcacgacccgcccgcccctgtcaccggcaagccggagcggcgacacctcccgtccccgccgcgcatccactagcccgccccgactctccatcgggcctggaggtccctgaccgcggggccgctaagggttggggctgccggcagccggcttctcaccaactgccggttccagcgcacctgcttgggccgaaggagtgtaggctgcggccgggaggggctgtaagattttcagtagcgaaaaggtgtcaggaa

SEQ ID NO: 42706 - DNA, 1709 bp, Homo sapiens
ttaacaacagtcagcagcaggagttatctaacggaattatatagactctcaacttaccactttctttgcgaatggctatacaatgctttaagcatctcaaagccttgcctatgttacttaacttcttgtacttgtttcctactctttatttccactaccttgatccttggagaggctttctctactggtgacctaagccactgagattgccatgtgttaaaaagcactcataaaatacatatatgtgaaaatttaggggaggagggaagtgagaagggcaatgaaaaaataagtaattgtgttagccactgaacaaatcacaatctggtagaagcacaaacatgtaattgcagcaaatgcctagcagagatacctgtttaatgcccgtctgataaatgagtgtctgaaggaagcacctgtcagattaatatatcaaaaaccactttcgttttgtcggtacttggttcaaacacccctaatgttcacaacttacatgaggtcagtacacaaagcccatcacaatgagggcctaatttttcaacctaatcttttcccgaagcaaattctgacatccgagtcatgccagtctccggtaagtttgaatcctggcttaactaaatatactaagctcccgagtctgtccgttgtgcttgagaaaccccccccccccctttcctggcacagtccagggtacacagcctgctctcagaaacggacgtcaatcgaaagcattctaacatacgattcatcaaaggttaccgactaattcaagtttgggatttctgaaaagaggctgagaaatccgcgtggaagttggtggttgggtgcggcccatttctctctccacttccgtgcggacgaagaaaaatatcttaaaacaaaatgaggttttaaaggtgtttcagcggcagcagggcaggtagaaaatccaaaggggcaacagattttcaagaggtggggaacgaaccctaaggcatgtcccgtccccaaccccttctctcctctggagggacccctgaacctaacagaagaataggcggcgagcctggatcccagccccactccatgctttcccgcaccggcgtctcaaccatccactatccggcctctagcgtctgccgcgccgcactcccacctcctcgatgtaggccggcgggtctcgcttgattagattctgtaactgcggcaggttgctgggaagcttgttgttgtttctgttggacattttggctgcagacagacttcgcggcgagcagttttaaaaaaactcagacggccggcaccccgcaatccctgccagctgcagcttggactcgtgtttccgggtatgaccggaaatagcgcatgggactctaggcaggcgacaccttagcggttcctaaagcgagctatgctacggaagcctcagagtgtcaaaattactctcgttgccaaaatactctgtggtgtattggagagccagccaccgccgacccgcccctcgcccttgggcatatgctactacttaatattgccttgcgtttctgaaaggatctgaaatgtaaattttttcacgtgtgttagcatgtatcgtcattccgacacccatatgaagcacataaatgaggattaatcgtttatttttaatcccgcagtctaaaattagaaactgacgcctgtaatcccagcactttgggaggccaaggcgggcctgaggtcgggagttcgag

SEQ ID NO: 42707 - DNA, 1625 bp, Homo sapiens
tataggccaatgtttcagtttaggtgatctatcaaaatgatacacttgactgagtcatgattattgctatcatttaccgagtgcctaaaaataatcaccacaaacctttgaaggaggtatcatctctattttatacataaggaaactaaggttcagaaagattaagaacaaagtcatacagcttttagggagcaggggcagggttttagcccagatctctctgagtccaaaggcgttgctcttaactaccacaccgtaagtccgtgggagaaaaagagactttcacaatatttaataaatgcctatcacaagacaaacagataactaattcatgtatgctatgctgatcacagtttcttaagcaactcctaaaccatctattatttattatctgaccttaaggaatggaactggtgttggtgttgaatagaaagcactcctttgtaaccaatcaccactttcatcctcatcctctctcctccccactgccttgcttttcaatagtgttttaaatttttgaaaaccccttaaaatacattatcttaattcttaaattcatatatttacttggtacttattgtaccatatgccatacattgtgtagcagtcagaaaaggtataactacaaagttctattttacagatgatgaggaaactgaggtctagaaagattaagtaatttgtccaaggtaacaaagatagttagtaaatagattagggacaaattctctgattattggttggatccttaattggttagccacagatatacttagcaaaaaacagtatcagggagaagaaaataatttaggagatagagttctcattattacccagttcaatgaacatttattgaacacttactaggaattcatacacctagactacaaagacttgtgtttgacttggcagatcgaagttatgaactttggataactggtcatgtcactgagaagcttttatgactgaccaaatattactcttcaatgcaggcagaacattcacctttatctggctaatcaagattcttttacagtgaatcacttctcttactttacaacctaactcagaaccccttaccttgcactccaatcagaaccagcaagatgatgcccaagaggaaaagaacaccacttttcttcatagtgatagaatggagttccaagtcactcctgtattggattttgagcctgagaaattctttagagaacacattttggggatcatatttatttaggatattcatttctctcctaaactctgattggctagtatctttagctgagctaactaaattgaccacaaacttgattgtgctgggggaaaccctagtctcagatccaagggaatttctgcatgtttttatttccatttcacataaatgggtggtttatagtaagggatgtgaaactagcaacactgatagcctttggcacattcacagttgctcacctgtgtgaagaataggttatataatgaatatactaatgttatacaacaaaggttggagatgtggtttccagatgggaaatattaaagtccagataaataatatacttttcaaattcccttactatttatggcatattcttctgtataatagatggctacattgatattttctt

SEQ ID NO: 42708 - DNA, 1009 bp, Homo sapiens
gactgggaaagaggcccttcggataagagaaaggaggtgttggggtcagttgggagtcactgaggccagatcttatttgttacccaaaaaggggctaattttctgagatagcaagcggaatgggagggcttctctcgcctgaccctacttcgtggtgaaactgttctgccatggtagggtagggccccgcccctctgagcaggctggggccgctgcgcccagctcaggcctgtccagacactagtttcctgggcttcgtttaggaacttgtcatgcaaagtctgagagcaaccacattctctcaggaagcaggcagcgggaaggagaaaatcccattgatcgttgcatttatggctagacaaggcttttaggagaaacagaaacctgatgagaggatgttgcaggcgtttctcacagccctgggaatggagccaaagatgatctagagttgaaatcaacagttaccaattcctttttggacaagaattttaacttcctgtgccttgaaaaattccagttctgtgtccgtaggggatccaaatgctaatgtaaccccaaagaactttacaaagcggaattcttagttttcacaagtgtggcccagcctccctcttgaatctttttggttgtggaatcgaggtgttctgtttaattatccagtgtgactgactctgtggcagggacggtaagagccttccctttttacttgtgagaggagaagtttctctcataaagaaacctccaggcctgtttgaatttctcacagtgtggatttcccctcctctcggcagctgttgttagtattaaactgactagaaaggggtttatttcttgaaagtcttagaagccccaagagaatattctgatttttctttttccctctcctctccccacgcagggagtcattccttccttcctaaatacaacatggtgagttacatgcaggcaaatcctagctgtgggaggttttatatcctgtctgcatctaagtcactaagagaaaggacca

SEQ ID NO: 42709 - DNA, 808 bp, Homo sapiens
ggtatgccaaatttgagaacctgcaagtactttagcaagggtggacggtagagtgaataatggagtggtgagaaattggtctagaaatgtggcaggaacaagacgatgaagtgccttgtgaatctctatgtggggaggagacactgcagaattttaactaagggaataacatgagatttatatatacacacacacacacacccctgtgtatacatctgccccttgtcaccagtctttaatcttattttacttgaacatttccttgtgtctacgtagtttatatatttgtaaaatgttctcatatttctagcctcttcattctcagttctgtgtatttgagttgtttccaataatgtctcagtaatacaacagtgatcttactattttaaaaaagattttactctcttggggtatttcccatctttgaaactgtagggacaaaggttaaaaaacgtttctgtatcttctgtaacattttgacagattgcttgccagaaagattgggctatcagtatgtagatgtatctgtttcacaatcctcttgtcattttatttacttttgttcatttagcatgtgaaaattggcactagagactagtgttaattccattttctttacaaattgatattttactttgtattggtttaacatctgcatttcctacctttttaagaccacttgtcaagtagagtcagagttttgaccttgtaaatatctatcaattctttacatattttgattaggaagctctaatgcatttttagtgaaaatatttgctttttccattttgttaaattaatttccttc

SEQ ID NO: 42710 - DNA, 803 bp, Homo sapiens
attttacaaattaagtatcctttgatgttccttaccttgaatgccacttagagtcagaaagataaggcagcaaatcagaatggcagtttgattcatggtgctgagactggaggttcctctgctgtaggctcagaatatgtctaagcaattgaggaatgtctcagaaaacgtggggctagtgtgccatatttatctgcaaagccattttccctccctaattctgattggataagggcattacagttgacttagcaaaacctgctggctgttcctggggaagtcccatgttgcagactcgaaggtattatttattgtagcctccaagttacggaatttccctctgctcctctttttttggtaatagtgaattaggtttcactttccaaaacatgaactgtttcttgaaaaaaagaacttcattgcatatagaaaaaaacaaaggttgcaatccattctaactataatgctttttctcaacacttaaacttttacagttactttcagaggttatttttcaaaatatccccagtaatagaaatttttcatcctttataggtaaacctaattttttggtaacagcaagttgtgcctgattattagaacagtgatttacctggacagtcctccttgatcaaatactataaagtaataggactggcctgctttgacagggtcaaagatctggaactggcaagttttaaataattcaataaatgctttgatcattcataacaccattagattaagtaaatagcctccaacataactattttgagggaaaacattgctcatttgggtatctg

SEQ ID NO: 42711 - DNA, 1009 bp, Homo sapiens
tcacccctttcccaagatcagattgcctaggaaattgaattagtatcagaacagtacctggtgagcagagtcaaacgaaggacccttctcttcttgttttaaatgagggttctgctcagggtagaaacctgacaaatgtgatcaacatggaaaatcatttagaaaaaaaaaatcaaacttttagagacagtagcaagcccactattacttatttcacccaaagccaagactgcatgtgtcatttgaataaaaatctaaatgataactctttttatatatttctctcaatttttgcaacgtttatggtataatcacgttcctagaattcactgatctgagtataattttgaaagaaaatgaaagttaaggaagtatcccgctttagtttccgtttcagtcgctattgatttatctttaagcctgtgattatggcatcaggccaaaaaagacaacaatgaaaaaaggaacagtctgccctgacaaactaatgagcacagacgaaggcaaaaatgctttcccggaaactgttatgcttagaagaaattttctaaaaagtgagcaggaggacatcagtgatttctgtggactgggaatcccctcagctggtgcagaatatgccttggaaagtatgggagagcagggcaaagcttccccttcacagttttcactctgagctctcaaaagattccccgagctcacagtgtttggtaatactggttacatacttttcaattacccatgtgtctcatccttcatagccagcctaagcagagggcaaactgagtgctggcaaagtgggtggtagaccctaacaatcatcatggcattggaggaggcagaggctcagaatagcttctgtttggatacattttaggctatgcagtgtttctgaactcgcgcacttgagaggacttttacaaatatggcagatttcatcatttggaggaagagacaaaattggaggacattataataaagtaaatgtgtttgggggaagtatggtgcattt

SEQ ID NO: 42712 - DNA, 732 bp, Homo sapiens
tcttaaacatgtccaccatttctgtgctaaagctgtagtaacttctaatctgtgagattaaataaaactttatcatgtcttttaggataaaagtggaagaaaagacatttgaaacattagaaaaggaacttataggttgagaaataaaaattactgcataccttgaacaactgtagcacacaatatcacagccaaggctatagccatgcccttcacactcatgtttgttttttgctgttgctgctggtgctgctgctgctacttcagctttgctgctcttcttggaaggagtagaaatgctgaacatgaaaggaaattgataattggcatatatagagcattttatacaccagcaatccttttatggcacaggaatttccctctttgagtcatgcacctttcctgcttccaagagtttctgttttgttctcttctaaatgttactgtcccttcctatttgcagtagtgttgaaagtgataagaatgtgaaagcactgtgaaaacccagatggtaaccagccttcttaaggtagcttttcctagaaatccatttaattgtcggactactttgggcagcggaattctgattgtcattcattcaggaagactgtgtttctgtttttggtcctttcacccacccttcatccttcacatatctatacaaaataatattctgaaaagcttttttttattatctcacttttgcttttcagtccaaactcttataataga

SEQ ID NO: 42713 - DNA, 519 bp, Homo sapiens
ttcttcaggtgcttactgtcatgtttccaagtaaataacatgcttcaacatgttatttcttggtttttaaatctttagacatcatgtattgacttcctactacagagaatgagtatgtaaccctcatctaccgtgtattagttaagaattttttatgtgttcagctgtaaataacagaaaacctgactgagctttcatttaataagtcttagaggcaggctgttcagagtcagcgcagtggctcatccatgtcatgtcactcatgctctttctttctgttccaccatccttaccatgttttgtttgttgattcatgtttgcacttgtgactgttgcagctctaggcatcaatccatgtccaagacaaaaagaaagtaaaggggatgacagccaaatctacttgttcagtaaggaaagtaaaagttttcccagaaacccttactaaactcctgattacaggtcattgacttgaacagtttcttggtcacccatagctaccagagaagcttgggaaggggg

SEQ ID NO: 42714 - DNA, 2083 bp, Homo sapiens
ataatccaaatgcttatcatttggaagataagtgcacatttaataaaggaacactgtaacttgcaaaactttcctaaaccacatcttttaaggcagtaaaaacttgatacagatgtttttgattcgagataaggaaataaatttcctttccctattagacaagtaactgttctttcccaaactccaggaaccacaatattcttggactccagctcccaacactggttacacatacaacccgcagtatctacctgcacttgccagactgttaccaaaattgaacggagtcgccgaggtagtagaaacaccgaaattcccaatattaaagttcactgcaggattagcagttaatccgaaacccccaaaattaaacccactggcggtggagttggcagtctcaagcccaccaaatcctgataggcgtgtaggcaaagaaacaaaattttaaaaagggggagagggaaaaagaaaagaaagcaagataaggattagaagaatcagcaggaggtttcacagaagtgaacaaacctggttttgctccaaacagtttaagaaagcagagtgggggtggggtggggcagatggaagaagcatgacggataaaccccacagcgaggaccacagggggccgggggtggaactaagggagtcaatgggcagtgccggtggatccccagccctatcctcgccgagtccggcagcgggaaccacgcaagcgttcccgcccatccaggaggctgaggtgcagaggggagggaggttctcgggcaaggggagagggaagcaacctccaatttctctgagtaggactccccggcagcgggaagcgaaccgctcaagccagggccctgtggaaactcacgcgcggcaagcgagcttctagtgggaccccgagtacccccgtggcctcctcgggtgccgcctcggcccactctgccgccgcccgcccttttccaatgcctctaaagtctccgcgtcggcgggagattccaggatccccaggtcggagagtctcggacagagggggcggaccagacccttccccttcttcccgggtgaaggtctagggggatcactcacccgcgggggccgcggtggctgcagcggtaccggaggtgcccgagggagccccaaaattgaaggccatgtcgcgaaagcaggagaccaagtaggttactcctgcgacgcgcagcgcgctccccttctcagtccggccgggaaaccgccagtcagatcaccgagttccgcctcctttctgacctagcctaagaggccggaaggcgccaagggcgtaggaggtgggtggttgtgagggaacgcccccagccagctcacttccggtgggcttcacatgctgtggggtgtcactgttaaggtaaaatgctgggacgctcgcgagggtgtgccgcctgagagtcctttaaaaactgccgtagggaggttctttgggaaaggtgtgcagaggctgaagttgttactgtagggatacgcggtagacagctagaatttgtatgtggtagggttgaagttgctgcctcatcaactagcgggcctgggaggtcgggcagcagggctggggttgagaacccccccaacacccacgaggaggtggtatttgaacccagtgctgaaggatgagtagacggagcagaagcagtaaagaggatgcacgttggaagaaatgaaagcgaatggaattgtagcaaacacgttgcgtttactatgtgccaggcactcttctagacattttacataatttaatcagctatcttatgaggtgggttgctgctatctccaatttataaaagaggaaacaggtaccaaagggtcaggctgtttacagagtaaatactcctaaccacagctctaaggggagcactgaaaaagaggggaagagtgggccccctctgttgtacttgtaatataatttaatcctcagaataaataaatagagaagattctgtaactgtattttgcaggtgagatgagagaattgaggtttggagttgttaagcagcttgcccaaagtcaccttgcaggtaggttctggagtctggttttggactcatgtttctccactcca

SEQ ID NO: 42715 - DNA, 3689 bp, Homo sapiens
gcttggcatcctccacctagatttcagatgatgtatgagaaagcctaagtgccccagcagaagcctgctccaagggcagagccctcaagagaaactctactagggcagtgaggaggggaaatgcggagctgaaggctccacaaagagtccccactgaggcactgcctagtggagctgtgggaagaaggccaccgtccttgagacaccagaatggtagagccaccatcagcttgcaatctcagcataaaaaagctactgaggcggagctgcctaaggccttgggagcccaccccttgcaccagtgtgctctggatgtgagacacggagtcaaagaagatgattttggagctttatgatttaataactgccctgttgggtttcagacttgcttggggcctgtagcccctttcttatggccaatttctcccttctcaaatgggaatgtttgcccaatgctgatacacccattgtatcttgaaaggaaataacttgtttgattttacaggcttataggtagaaggaattcatttctagatgagacctgggacttaggacttttgagttaatgctggaatgagttaagactttgggggactattgagaagggatgattatattttaacatgtgagaaggacatgaaatttggaggccaggggtggaatgatatagtttggatgtcccctccaaatctcatgttgaactgtaatcttcagtgttggaggtagggccaggtgggagctgtttgggtcataggggaggatccctcaaggtttggtgctgtcctcacaacagtgggtgacttctcacgagatcttgttgttgtaaaagtgtggcacctcctcaccccttgctcctgctttcaccatgtaacgtgcctgctcctgctttgccttctgccatgagtaaaagctccttgaggcttccccagaagccgagcagagccagtgtgccatgtgtgtacagcctgcagaaccatgagccaattaaacctcttttctttataaattacccagtctcaggtatttcttcatagcaatgcaaaaatagcctaatccaactaatagtaagagcaaacacttaagtatcactaattatgtgctaggcactagtctaagcactttatacatgactcattgactcaatctttgtaaaaaccatgtggaggaggtcctatttttatccccattttatagataaggaaatggaagcacagagaactagtaagttgcagaggcgggaatcaaaatgggtcatctgactccagagtcagagcatgagcacccaaggcaggaactaggatttttatctctgaattcccaccactgagaatagtactgattcatagcacatgaatcagtcagcaataatttattgagcaatcgattacaacagaattgtcaggcatttttatcattcagcagttttgaaaaagaaagatcttgttgtctgcttcctctattaatttgttttctaacctggtaaggagagactttattggaaagattattgtatgggagagggaggaggtattgtaatagggaaaaggggaacattgcaacagagaaaatgctctgattcaagcgtctccctctactaatcgtttaaaaatgattaaagggatcctgattccccagtgtttggaattggtggtcaccagcaaagactctaacagcctctgctacttgcttattgcttatacgcaggataggtggagaaaaggagcgggtaagaaacagaaagatctgtctcagacaaaagtaaattctggaactgctttaaaactagttatgtggggaatggaaatggagggaggccctaaaagtcacttaagaatatcaagcagtagccaggcatggtggtgctcacgcctgtaatcccaacactgtgggaggctgaggcgggagaatcacctgagcccaggagttcaagaccagcctgggcaatatagcaagacctcatctctacaaaaaaaattatctgggtgtggtggtgaacacttgcaatcccagctactagggaggttgaggcaggaggatcacttgagcccaggagttggaggtggcagtgagctatgactgctctactgcactccagcctgggcaacaaagccagaccttgtctcttaaaaaaataaaataaaataaaataagaatatcaaggggcaaccttaaaagggtcagggtaaggagtaacccttcatggtttaataatcacagtctgccaactcaggaggaaaccgctgcacttcaaaacacaacacgctgagacttggcccagtctacaaagccattctctgctgaggtttcacacacacatacaaaacatcagcagcgtttcagacaatgaaatcagaaagtgtgctcccacacagccctggagccttgctcctgggaagaggcaaggactcaggccatattggggtcactctgtatttctttcaagacaggaggtggtcaagacttacctgtaggtgtatggccccacttcttccacccgaggggtctcccctctgaggatctcctctggattggtgacattgaagaaatagaactgagtatacacaggcagagggggcttctcccaggagtcaaatgcctcagtaccattccttaacacaattttctaggaaaaaaccaaaaggagatttacaaaaatgtaaggcaatagttggctttaaacccaagaagcagaggaagggacgccccctattctgacctcctagatcactattttaatcatttcacaggcattcaactgcagtctcctgagaacagggccatatcttacaccaatagagcccacagttctaataagtcagagaaggccttcgataaatatttgtaaaggggccgggcccagtggcccaacactctgggaggccaaggcgggcagatcacttgaggtcaagagttcgtgcttggtcaacatggtgaaaccccgtctctactaaaaatacaaaaatcagccaggtgtggtggtgcgtgcctgtaatcctggctagtcgggaggctgaggcagtagacttgcttgaacctgggaggtggaggttgcagtgagccaagatcgtgccactgcactccagcctgggttacagagcaagactctgtctcaaaataaattaactagttaattaattaataattgtaaaggaagggtactaaagacagcacttgggcagaagcatgaagcatagtgtttccaaaacctagggcacagattgagtgcctaaagggcctgctggctttgttatttttgaagattccatggatggtgtatcttctgtagaagttaagcaattctgaaaagcaccatacactcccagtttgcccagatgagagaataacaaggggaagggcccaagaaggccagttttggtcctttttcaagtcaaaccacatccatccctaccgcctccaccaccaggggctttaaatgtattttcttattggatccccaaaaaccctaaaatggaactgcctatccccgtttcaaaaaccaggaggcctagcctcactgaggttagctgacaatggagactgcactctgcacacaatccctcctgcactttccacccctgttctgtgttacaggatgaataatgccccccatactctaaattcctaagctgaagtcctaacccccaatacctcacaatgtgcctgtatttggagtcggggtctttaaagag

SEQ ID NO: 42716 - DNA, 1395 bp, Homo sapiens
gttacactaaatgaaaaagcaacataaggccttaaatcagttttacagtgtgactctggatattaagagtggcactgtggagtcacaatataactgttgcttattagttttaaccaagacgaacataatgaatttttccacgcacaatactgtggcactaccactaaaacaaaatactggaaaattatcaagttctatggtgaattcacagtgtcaacagctaaattaataattggactaaaaaacatacttttcagttaatcacccaatatgtacctactgagagctttctatgtgcccggactatgccctgcaaacaggcataggccctgtctgtaagaagaaatttagctaaggacacaaaaccaacatgcatgtaacagggagtgaaaaattatgtgcaagactcagtaattcagcctaacaaacagcttatgcctgaaattatttagatccttccagtagcatggatctgtgataaaattcccccatctaaacatctcacaggctgctccaagacaacatgaccaaaatggactcatgattttctcccctagttgatcactaagtcctgctgatttcacctcctcctcttccccatttctaccccaaggcacatttcatcattggcttggactgtgacaatactgtatgtaggctcctaactggtctccctctctccagcctttttcctttcaaatgcttcatccatctcaggcttcagagaagcctgtcaaaagtgcctaagggaacagatactccacccctgctcaaaggataaagtccacagtccttgacctgttgtgatctgatgcaactgcgtcacctgtcgctgtcttttcctggtaggcactttatgcaccagtaacacgcaaccatctactgttacctagcacccaccacacaagttctcagccagtgccttggcctgagtcactcaccgcccttcacccagaagtctctgcagggcccttatcacctggttcacttctacttgggcttcagggctcaattcagaagtgccatctctcagaaggcccctctgaactatgtgttttctctctgctttcatgaaacttcacaagttttataaggaaaatgtgttcattagtctttagtgtcagattgggtctgatactaagaactgtatctttttcatggatccccagcacataacatggtttctggcacagaagggacacaataaataattaatgaagaaacagatgataccgcagcgtagagcacaacgctgtgccaggcattcatcttctgctgtttacccagttcttcttggtaaaatcttcaatgtggcaaaatgccgcatattctaaataatatgtaagaaaggtgatctgaataaataaaaagtctgaatttcagtactgcagaatc

SEQ ID NO: 42717 - DNA, 1568 bp, Homo sapiens
aacagatggcccctctgctgtggcctgacagaatgaaatcttggatttatttaacaataaagcaaagtagtttccacaggcaggaatcttcccctcctcaccaaataatatttcctttaatgtaaacttgcagattaatagtaattataagtagtaatctcctcagtcagaattaccatcttaaggaatgaagacatggtctaaaataatcactatacaaatataaacaccttttttaaaaatgcatattcccaaaattgcagattacgatcccacagcaacctgcctccagtaatggattttatgataagcactttaacctgagttctgttcctaatgagtctgattcagcaagtctgggatggggtctggtattttctaaatctttgtaagtgatttagatgcatctcctagagtctaggggctatgctgacaactgttagcctactatattgtcttaatcattaataaggaatgcactcatagtcaacatgaattagtaagacactaaaataaacttaatatgattttgatatcacaagatcgtgtttctaaaagccaggaaagaatttggataattttgcttaggagttagagaatcttgcaaggaaattaacgacactgcctccgtttacagtgctatagtttcttcctgtgctgagccaatcacattgctccgttataaacttggaaaagagaaactaggagatgaagcatgtctatgagaggtcaacagctggaaagtcacactgaggcggggctgagcaagcccggatgagtacagagccaggctgagtaaacagaggaagcctgttggtggagaaagcagaggaaaaagtgggaggcagagtgtgcctgcttcctgctgactttccactttcggttgtcctctcaggaggccttactgtgccgtggttcttgccctttgatttctatgagcttccccttccagatttacagaaacaaaaaaaagaatcctctcttgccagagctagtttgagtaggcctcaactccttaagagagccaagaagcgggatacattgtggtctgtaaggacaatgtagcatgagaggtgagggatggccatagaatttattgtccaaagcagaaatcttttggaggaaagggggtgttagtgattacaccagcacaacaggtacacagaaaccatgtaggactattccaggcaaatgggatgtatggtcatccttgagatgggaaaagtgggttcaggatcagaaggctagctggcacgctctctccttccctctccatttgactttagataagtcacttctattccaagagcctcaatttccttgaccgtaagataacagatttaagatatctttacaggtttttttctgatcaagaaaaatctcagactaagataagtcttctttgaatagaggcaactcaggagatgaggtagatatgcaagaaggagccttttaaaatgatatatagctgaatgcctttacatacacatcaataaagatgttttgctgatttgactttaaaaaacaagatcccatagtcaccaatcaaagcaatctggttatcagtg

SEQ ID NO: 42718 - DNA, 3317 bp, Homo sapiens
gtgatcgttagtccttattatccctatttacagatggggaaaacatgaatcaagtaagattaaacagcccacggtcaccgagctgggacatagtggaagctaggtttcatgcccaggagtgtaacatcctcaatctttcccactgtcccatgctacctaccaccctacaggtaatccaggaaaaagcagaatagcgatgtgtgacttacctctaatgacaacagtatttccacacctgcccactgaaactagccctgtcctttagtttcatacaatacaccgtgcagtcctccttagctgggattgagcagctctgaaagtccacttccctgtactattacttatcagaacagagtccattcctcatggagaaaaacacttggaaatatcaacacaaactcaggccccagccaagttgccttacagccaccccctcacccagagaaatggagacacacagagaatctaagggctggctatatgggaaccacggggaagatcactcatcctatagggctccttgaaacagcctttcaaggccatataagaaaactcacatatttactataattggattgctttactctagtcacccaaagcaagagtttacatcctcaaacacagctcaccatggatttggacatggacaggagtggagaaaggattcagtttcttttttccttgaacatgattgctcaaaggaaactgaccctcgagacgctcagacagtgggccttgtcttcccttggcaatgtgaactttaaaaattacattatgctttgccatggtgctttttgaaaaactgcctttaactgccagatttcaggtactcacttaattacttttggaaactcagttaaaggaagatatccattgccacctggaataaaatagctttactgactggagagtgcagtgattcaaagtagactaggcctgggcttttttatctggccgcagcaagtgcagaccagtgggagaaatgaagcgtgcagttatggatgctaacaagaaaggctgctgctccagtgattatttttcttttttaaggaaaaaatgatcccagtaattctcttttgttcctcttttgacacagcttggtggatgtgggggaaagggcagatgaaatgaccagtgaaatcaaaagatgaagtcttcttaaaggactggctctccagcccaatcatctagaggaagagacaagttcagattcttgtagggtatctaaatgcatctgtgcctgaaaattatggccgtttgagaaaaacaagaattcatggtgagacaaagcaacacagactgttggtacaagatacaaagccactaagtcagcgttcagcaaagactgatggatgaattgtcacccagcctaaaggactggcccagctaccaactgcccctgcccagcccaagagggcaagaacacaatagaccgcacacccacgtctcatccccaggcgcacaccacttcaaaggctacagcaagcagacaacataacctgcctcttctgcggtgtctttcattcagttctgtttcttcatgaagtgggaaggaaacaagtttgggcccacctgagattggggtgtagacggaaggagtggggagagatgcaaacgacagaacacaaccgaaggcctttttaaaagtcaggatccatagccttacttatcactgtaaagggaacagagtcggctccatccttcctcatccttctttaaccctcgcctaccaagccctggaagacagggacgcaagaagagctctagcgcggagggtctgcctgagtgctggtctttcccatacaagatgtagcagcagggatgggagggtgagctggacgactccacaacacacacacagcccgccccgcctcaccttctcgatactctggtctacagccttctggaagacccgggccaccagcagcgtgacgctggtcaccagcaggagcagggacaacgtccccgccgtgtagaagcagcatcggcccattctgtgcgccgctcacgggccgggccgggccgcacccgccagggatccaactgcaaggagggaggagccgccgcagaggcgtcgaagacccgggacccttcggcgccacgcccacgccctcccggcgcacggttcgtgcgcgcagctctgggctccgcggcctggcgagcgcggccccgggtgcaccgggcggatggggccgcggagggacgggcccggactcggtttcggtttccttcgccgggcagccgtggcgcccgcctagcgcagctcgggagagtgcagggagcgcgcagggacgtgacgttcgcgggccgggctcgccgcaaccccgcgaggcaaccgccggcgactgcgcggggaggcgggcgggggcggaggccgcagtcatgtgccctgcggcggcggcagtgattcggcccgcgccctccccggccggtccccggtggccctgagtggctgcggcgcctgagccaggcccggcctggccgctcccagcgccctgcaccgcaggcccagcgctcgccccaccgaaattgccgaacctggttcacacactcatttactcattccgcagataggtctgagggcctcccatgggccacgcgctggggattcaaggtggctgggacattcccctgctctagaggcgctcgcaagttagcggggacaccgttaccgcaattacaacacaatgtagcaagtgcttctaccaggtgcctgctgagatcatgccagcaagcatgttctgcctggatgacctagggccccacattgaactggggcctgggggatgcataagtttgtcacgtaaggggcatgtgcaagaatggaagatgtgcaaaaaagggaggaggaggcatttcacggagaaggaaacggtgagcaaaggcattgggggtgaaagagcaaaacctgtaggaagcaagaaggaagttccttttgactgtaggctcaggtgttcagggggtggagtcggaggtgttgaggccccaagaggtcagactttgaagggctcttggtatcctgttaaagatgtggaagttgggaaggagcttaaagcaggcatcgctggtgttcttgcctgctttgctcactgtggtgtcccagacacccaggaccaagacctgcacacagccaggactcaagaagtgttcgttaaatgagtgtttcttctacgccagccctttactagtttctttgcacagttctactcatttaatacccttggcagtcctatgaataggaggttgtgtttgtcccagtcctccagaaacagtcccagatgggggtactatgcaagagagttttgagggaaaacagg

SEQ ID NO: 42719 - DNA, 1609 bp, Homo sapiens
cctttttgttcccctaataatgcagacttattgaaacacggaactaggaggagatatcctattcacctttttctcttccctttcctgaaaacacaagcgtagtgttgtctaactaatagaatgtgtggttggagggcgaggagtcaggagatcaaagaggagaaaaatatagtgggcaaaaagggtgaatatgtcagcaatattatctgctacttgtacatagtacttgtacaagcactatgctagacagtgggcttgcattacttcatttactccttacaatgccctatgatgtagacattctattttaaggataaggaaactgaggcacacagagattgactaagtagtccaatgttactggccagtaggaagcaaaggtattactaaatccaagtcagtcagatgctttagccaggctcttaaccccttagccactgcttgggacttctggcctcatgcttattaagagtaaaaggaaagcagtgaaaattgcaaaaaataaaaataaaaataagcaatggcactggaatactcatggtgacctgggcatccaggaggggcacaggttggaattagtgtgtgtgggagacaatgcctctgcctgaacctgatgttgaactagaatggagagccaggaaggagttgccagtccggtggccaaaaatatactttgcaatatatctaatgtatattctgacgtgaaatgtattctagtctgttctcacttgaggtactttgatggtactttctagaagcaaatgaagcttgggttgggtttaaactcactgtggcaaagccagcatattgtgaaatatcaaggctgtctgatttcctgcatgttgtgaaatcagggctaaataaacaacacgagaggtcacagttattctttaatgatgtgttccatggggagaagctgtataaacgagaaagccaggtttactcagcatctctttctgaggggagaaaggggggatggagagtgaagaggggactgtctgagggtagaggcagactttgtcagcctggagtggtggggagaagatatttggccagagataggggtgcagtagtggaatggggaatggggggcttagatattagactatggaaagggtaaaaataagccccgcccctcaccactaacctggtccccgcatgacttctaaccactgcactcaccacatatcctgagagtctgaaatgattacctagaagcctcctatactcatcaaacctcagagaagactgctattcagttaactttacaacagttgtaagcatttccagttctttcataaataaatactgtttctttttagtgtcaatgaaaaacgtttcagaatattaatgagtagtgtttgcttcaattgcactgcaagctatcttaagcagaactgtttcctccattttgaatcaaaccagaggagatagagatgcaaatcacagttctttaaaaagttaaacagaattatcatatgacctagcaactctcttcctaggtatataacccccaaaattgaagacaggtactcaaacaaatacttgtaaaccagtgttcatagcagcattgttcacaatagtcaaaaggtggaaccgacccaaatgt

SEQ ID NO: 42720 - DNA, 887 bp, Homo sapiens
gcacagatagggattcccagttaagggctcaagagagatcaacctgttaagagaagagaaggtgtttttcattctcatattaccaacttaagaccatatgctgctgtttcacaaaggagactcacaaattcattgactagttctagatcgattccccatttcagaaatcctctgcattgtaacgctaatatttactgggagcttaactacatgctaggcatgttctaagcagtttatatgtgataatcaatttaatcctctcacaatctgatgaggtaagtgctattattatcatcattttagcagatgggacaccaaggcacagagaagttagataactttcccaaggttgcatagctagtaaacagtagagccaggattcgttcctggcagactggtgccaatgttatgctcttacctgtcttttataactgtggcaccagagcaaagtataacaactggtttgaattttttacatatcaaaagtggcttggagagattaaagaacattttttgtgtttttttttagttgtccccacccaacagaaacctgtcaaactggttattcaggtttaagtcactttatagttctcacaagaatgttaaaggaaaataatgaaaacaaacagatgttaaatgattcactccagtataagctcaattatctaggttcctttgcttttgtagcaatcaagatgtctttggactttgaccaagtctgaaactttttcatattgtatttatttcaaataatgagatgatcaaaggtgatctgtgaaaaacacaggatagaaactgcagcaccctgatagaacccacatctgggttgttgatgaaaagagtcaaactctgtagaatatttgaagagatttattctgagccaaata

SEQ ID NO: 42721 - DNA, 1495 bp, Homo sapiens
ttcacagctggaataatagtacttgcataataataattcttgagggattcttaaatgctggcactgtgttaatttctttatattcatcgaatatccccaataaccctacaggtagatactattattttccccattttcaggccaggtaattaatgaagcttaaaaatgtaagtaccctgcccccaggagtgcataattattaagtagcagaaccaatgcttatatttaaatcagaaacactcagaagtagcataagaatttagtaaaaacgaaacacaccctcgtgcaatccgtattatgtggccacgtgcctaccagggtcagctggatggtacttgtctgctagaagtgagtcgaggcagaagaatcaacacaggagctggaagggcctctggaaatcagctggggactagagacaggtgtgcagccctcggtttacagaggctgtgagaccaagagagttccaagacctccaggaaaacatctccctgctaaaaggctttcccaacctttagaaatctattcattttccccactttccatcctctttctcttgctatctctttatcgctcctcctgccttcttcctttctttccttcagtaaacgttttttgaaacgatgatgagcaaaaaacgcctgatccagtctatggcgcgtttcggtgggaagatgaacacgccttcccagcagagtaaaacgtgattacaccaaggaccggtaccctctcccttccctcggccaggtccacgtccccaggcgtcggagaaggggttggaccgcgcagcggggcgtcagagttgccaggcgcccggggcaaataccggcagcggtggttgtgcggtgtcctagcaacggggcggcagcagggcacacacaccgcccaagcccggacggtggccgcgaagctagggccaccatggcggaccgcaggcggcggctccggccggggacgttggccccggtgcgcgagggcgtgaactgcaggtccaggtaaacactcagcgcccgggccgagggcgcatcccacgcgggccgcgcgggggcgcctggagacccgcgcttgctggggcgggggcgaggggagaggtccagcctgccttccctcctcaatgcttcctgtacgtacaacataatacgctgagataaccaacgcttggcgctgctctttgcaaaggatttttcctgctgtcatcctcacaacccccgcctcccacgcccccagggatgtagactaatatccccatttctgatgggaaagtgatggccgcagagtccgctgcggaggctggtgccctcctgctagccacccacccttttccggcctagccaaccaactgttcgccagatgccccggggcgcctggagccctgtatccgatgttaggcatctgctgcccctggagcctttggtatccagatggcggctgtggccaagtggagcccagggttgggggagcgcctggggtgctagggaggtctgctaacattttgtac

SEQ ID NO: 42722 - DNA, 9918 bp, Homo sapiens
aaaagtcagtagaaatatacatgaatggttattattgcaagagcaaaatgctgcaattaattattatgaatgctgttaatattatgtccaaagaattcttaaatttttgctggagtcttattgaccacaaaccatcattcttgaccacatgcttgcctaatgattaacaagtttcctcagcaccaagtttctgtaaagatggaagaacaaggtaacagaaaggagaaataacatgccatgttccaaagggaagtattgtgggcccctaaagtactatttacttttctacagtgtgtcactgcaaatatatatacacaagtcaagttatgtgagtcaacaacagatttaagttcctaagttggaggggagagcccttccctgaaaatgaaaaacaatattttatctctaattgtcttctgccttttacacataatctttgatattatacttcaatatttgggacatattaattttgtcctttacagttgaacacatttgccaacctattttggcacacattatgtttctatcctttactccattgcatacggtttatgaaaactatgcatttcatcatgaatatcagcacttttatttttccattctcctttcatctttctaaaaggtaaaatgcaaaatggtattagacaggcaaattatgtccatcacacctgaggcctgaaccactgcttgtcctgattctgggctgaataaaattgctcaattccctgtatttagaaatagttatgcaaacactactttataaaccatggaagttattgccaaaattgagcttttgactggcaaatggagggtcactatacaaaagttgaaaatatatttccacataatatattttctcttctgactagaagacctcttttgacatttcttccagggtggatctgctggtgatgaattctttcagcttttgtatgtctgaagacaacttgttctgcctcatttaaaaagattcagtagtcgcctgttatctgttacctgtaggggttatgttccaagatcctccagtggatgctgaaactttggatagtgctaactcctatatatactgcgttttttgatatgataacaggcggttactcagtgactaagggtgggtagtgtgtacagtgtggatactctggacaaagagatgatcatatccctggaggaatggaacaaggatggcttgagatttcatcatgctactgagaatggctcacgatttaatacttatgagttgtttatttctagaattttccatttaatacttcagaccgtggttgaccacaggtaaatgaaaatgcagagagcaaaaacatggataagggggaattttgtattttgtgggaaaagaattctagttcaaagttaattcacagttttaaaaatttcactaaaggtcttgccttcctgtcttcttggttgtactgtttctaggagaaatcttatatcatcctcatcttctttttggggggatgtgctttttccttggatgcttttaatattttctctttgtcactggttttgagcattttgattatcataaaccttggtgtatctttcttcatgtttcatgtacttgtggcttgttgagccttttggatttgtgggcttatagttttcattaattttggaaaattttggactatatttcttcaaactttttttttgttgtttttcaatcccttcccagaactctaattaactgtaattaggccgcttgaagttgttttacagctcaccactgctctggtcagctttttaaattctcttttctttttgtgtttctatggctatgtcgttaaattctctatttttttttctgcaatgtctaatcttctgttaatcccatctagtatttttttagaatctcctatgttataatttttatctctaaaagtttaacttaggtctttttaatttatatcttccatgtctcaacttcaccttttgcgcataaaaaacatagttataacaattgctgtgatggcattgtttactgattctaacatctgcatcagttctgtgtcagtttccactaggtgatttgtctcctcattatgggtcatactttcctgaatctctgtgtggctggtaatctttgatggatgctaggcagtgctaactttatcttactgggtgttgactatttgtattcctataaatattcttgaactttgttctgggatgcaaccaagttacttggaagtttgatccttttgagttttgcttttaagatttgttggggttgggtgtggtggcttatgcctgtaatcccagcatttggggaggccaaggcagaagtatcacttgaagccagaagttcaagatcagttcgggcaacatagtgagaccccagtctctacaaaaaaaaatttagaaaagaaattagctggatgtggtggcatgtacctgtagtcccagctacttgggaggctgaggcaggaggattgcttaagcctaggagttcaaggctatagtgagctatgattgtgccactgtactccagtctgggtaacagagtgagactttgtctctattaaaaaaaatttgttgggaaagaccaaagtaatgtggggtaattattccctgctattgaggcaagacccttctgtgtgttctgcctagtgtcctgtggatctttaggttttccaggaggaagaaggcagtgttcctggccctgtgtaagtgctggacactgccctcttttccttttggttctttccctgaccatgggtagtttcctcccacacatgcacaaagggtaccctctgaaatctcctggagttctctctctgtgcagctttttcttttctgatactctgtgctgcaaactttctctgccttgatctgtctggactctcggtcctgtcatctcaattcagagagtccattgggctcctcctgggctctccctgaaggcagtgagctagggcagtcgtgaggcttatcttgtttgtcactcaaggatcactatccttggttacccaatgtcttgtgtcttgcacagtattaattcatgtattttttcttgttttttgattgttgaaggtggcagggtaaatctggtccccattctgaagtccctgtctttgttttctgggcatccctgtctttattttctgactccacataccctcaggcctgctaaactgtggtctttggtgtatgagctttcctgccaccttagccttgctcatagtattctcgctgcctggagtgcccctcctctccatgtccataggttctatcttcctttagacacaggaagtatgctgatttttccatggagctcttctaggtcgcttggttgacattaatttgttcttacttctaatctctcacagcaatctgtgcctctattttatatatctttctttgccgtctatattaattcatcaatttgtgtatgcatttattcaaaaacagtagtaggtttttgagcaccgaccactatgtgtccaaaagtgctgggaacaagtgaagcaaaaatggaggactgtttcctgcacttatggagattacagcctagtggggtcaacaggtaaatgattaactatagcgaaatgatgtcatggtttgtgcaggacataggaagaggtaatcaattccatcaagcacggggtgagggcatgtttacaaaggcatcacagaaggaattatgtttatcttgagtctggaaagatcaccagttacccaacaacataacatattccagaattcaagttcttcagtgtggcagtaatgtagattccattcctctccttctcccctttctaccccaatctctttccttccctttttcatttcagtggttcacatctgagggcaatttgccccccttcctccacctcagggatatttggcaatatctaaagatgacatttttggttgtcaccacttgggggatgctattagaatctagtgggtagaagccaggaatgctgctaaacattctatgatgcatgggacagacagacagacagacagacagacacacacacacacacacacacacacacacacccctcccctacatacaaatagttctccagtaccaaatgtcaatagtgccaaagttaagagacctgactttcattcaacaaatacttattaagcacccattatgtcctaagtatttttctagatgctagggagatgtagctgggaataatttccgaagcttatattttagagaacaagaagagagacagacaaacgatcagaaaatatatagcatagaaatggtgatgagggtcattaagaaaagtgaagcagagaaagaaggcaaagactgttgggagggggttacttttttttgtttgtttgtttttttgtttatttggggagacagcgtctcactctgtcgcccaggctggagtgcagtggcgtgatcccagctcactgcaacctccacctcccgggttcaagcgattctcctgcctcagcctcccgagtagctgggactacaggcatgcgccaccatgcccagctaattttgtatatttagtagagacagggtttcaccaggctgatctcgaattcccaacctcaggtgatccgcccaccttggccttccaaagtgctgtgcccggcccagggttaccattttttaaattggatggccagggaagatgccactgaaaagatgacatgaaataggtaaaagagcaagccatgtgtgtgtcttggggaaaaacattacagtagagggaacagtgtgtgtagaggcactgaggcagaagcatgacaagggtgctctggaaatagcaaggcggtctgtatgctcggaacagagagatcacaatgctgaatccagctctggaagagatttccctcccgtctcctctgtcccatcctctctttcttggagcgtatctggctcgactctagaatgccccacacattctgccacatagtttaaatgtgcatgagaggagacagagacagaatctttgtggtttcatgtttctgacacccaagagttagactcccttttgtggtgagacagtgtgggtattgcattcacagtatcagtctatgaaccaacaacaggttctcctaacgtccttgatgtgctactgaggaatcggggaaagaagggaatgagatatgttcatcgtcctctttctctcttccagttataaaggcaagagcttggctgggcgcagtggctcaggcctgtaatcttagcactttgggaggccgaggcgggcggatcacgaggtcaggagatcaagaccatcctggctaacatggtgaaaccccgtctctactaaaaaatacaaaaaaattagccgggcatggtggtgggcgcctgtagtcccagctacttgggaggctgaggcaggagaatggtgtgaacctgcgaggcggagcttgcagtgagccgagatcgtgccactcactgcaccccagcctgggcgacagagcgagactccgtctcaaaaaaaaagaaagaaaaagaaaaaaaaaaggcaaaagcttggtgttagcagtttgataaaaaaaaaaatattgtagcatgtgcaaggctgagcaccgtgctgggctcacactatttaataacttactattttggttgactgagtattgttcaaggtctttaccctagggggaaatatgtgatttttacgtgattcctagctgctttacatacattctctcctttaatcttcacaacagccctgtggggatgtatactattgttatctccattttacagatgaagaatttatgtaacttgatcatggactccacctactaagttggggaaagctggatttgaaccctggtctgtcaaaatccaaaggccatgttattaaccactgcattatttttaaatcatgaactttaatgtttactttgtaaaatcaaagcatgctgaaacttcacaaaatactttggcaaggaccaacctaaattccaaagtaatgatcctgctctcctaagctaagctttagatttttgaaatgacaaacaaacaaaaaatcaatggcactgggaattatgttactttccacagaatccttataagccaaagtgggtgaagatgaggtatggagcatggtatttgaaccccaagttgtggaaaaagcaaagagtagacgagcctctggttgaccctgaggtctcacataaggctcaagaggagaattttaaaaaggagctgcaggaacaggtatgtatttatactgagatttgatcatctgagcttcagatgatcacagtgcatctgccaccctcctactgaaccagactctgcggcgtaatacaaaggctcctgaaagccctccaccttgcatattgaattcagcaaggagaaagctaagtaatgttaaggagaatgtgtaataagcaagacttggaatctcctggctttgtggtagacatgacatctctaaagattggacagctactcatgctattccaccattcttggaacaatttattccaaggataattgttcaaagggtggtgtgacttggtacgaccacctcagtgcccagaatagatgtgctgtcatgagttatctttgggtaacaaaatgtgaagcttgtttcctatcagctatgggtgaatgtcaaaaaattcaaaatttcaaccaggaaatttcttttaggcaattcatttgagttgcaggatctgtctgagaggaaagggacaaaggttaagcactgtttgatattgcaaagcaacaaacactcacaacaagggtgtgctctaattttactacagataaaccctgcctgctcattgcttgtgtaaaagtagctagtggaaagaagatactcattatggccctggaaatttggaaatagtgatgcaacacttgcatagtactctaatgaggatatttgcaaacctcttctctttttcaacagaccccaaacttctcctagataacagacgtgaaaacactttgagaaagtaaaatacaatacaaattagacttattattcttcagtaatcactcatcaattgtcttcttcagattggaaagctaagacaggaaggatggtcattttaatcttttccagtactgaatataaattcttattttcaggtgtgaggtatgatacaaatttatgagcaccccatgtttatataagtctcaaaattatgtaaataatgtttggcagaatttcttagtatggtttttggaaagcctaggtttatgtgaatttaatatataacataaagctattccagttgcacttttattataaaaggtaacatcattttttctcaaattaaatatttaaaaagaaaaatagctacaaacttttgctttaaggtatctagagttctctttttaaaagcatattcttaattactaattcttaaagacttcaaaagttttacaaaacatatttcattttgatgacaaatgctataaagatgtttgccaaaatggttacagtgagctaataaagtagcattatttaaatataattgatataactcgtatagtaaaagattgtttatcaggcagtttagacacagggaggatgcataacaatggaattgttctacaataatttttataaatcacacctttttaatacctgaggaatgatttacattatcgactataggtggcaccaccaggctgtggcaccccagtttacaagacgcaggcactgtggggtactggtaagagacagtaactatgacaacatgactgtctttctgggaactcgtgagttttgactattcttgatagatttggtttggaaggtgaaatggttttaaagtactgaattgaaattatgtaaacttatgcatccaatttttaaattaaaataaatgtaaagaaaaactaaaaagatgcataaatattgtagatgttgggactgatcaaatcatatttgattgtcctgtcctttgaagttaagatctatgatttgtggacatactgttaatcttaactaggttagattccagacatcataggtcaataattgtctaattgctaaaatgtgttgcccatccttaatatggggataaggaaaaggctaggggaaggagagaaagctggacatctttaaaagccttcatattcatcaactcatgaacattacacacatattcaaaaacaagaaggatatgggttaaaatgagatactttataaggaactaaatgcttttaatgagaacaaatatgaaatcaagcttctgatggctgacccctttcttcaaatgtgggtactcttttaggaggagttacttgcagaccttcacggaacagttgcctttaaggatttcattctaagcaggggctacaggacgccacgtgtgagtaaagggtcctttcagaaggccctgctgaggggcttcatggctcacagttgttgacgggaagaggttatgaccctgacaaacccaaatagttctcttacaggcacataccaagacaggcccctggaagaaagggcatgcttctccccagacggggactcagagataggatatggcattttgccctttttattctgcctatttggtttctgctactatcagagatactatttccctgtgatctttgactcatcttccttggatttggcctcaataggaggtctatgtacagggcatgggccttgcaaattccaactgttactcaacaccctgaattctctaggatgttttcaagtctcctttgcgtcctggtctaaggacaaagagctgtggcttgggttaggacaaaatagcgttgggatttgcaatttcatcattgcactattagctctgcctcaagtagaaacaggctaaggcaaaagttcacttcctggggggcctggccagtgtcttctgtcttttttccctttcttcatttctgcctcctggtttcccctcactaacttgtaaagctggccccagcatctccacacaatgtggtccccctttggacaatcacttgtaacagggttggggtgggaggttggcagaagggaacatggagcgggagggcctgctgcctcgagcagtgtgcccagatcagccctgtcactgcagcaggagactagataggcatctggggctgaagtcatagctgataatgtcaagcatttgtccactgtcctctgtgtgcacgtaccttggggtctttaggggacagtgcaactgagatggtcagaagtttctggaaatgggagatttgatttctgtttttccaagagtgatagaactaacaatagctgatacagctagcaaataaatgtaggacaaagttcagaatcagactggtttcaaagttaaatcaggcaagtctagagcatgagatggagatttgagactgggaaactccattatagaactggtttggaggaactcctttagctttgaacatcaatactaggtctgctagatatatttaatatacaaataactgcctaatctgtatataaggtttgcataactatatttatatataatatataaaatataaaatatgcatctatagctttaatattacataattatgtgtttacgagtccatattagatatgtaaaaatgtacttctgtggtatatgtgtgtgtatatataaatccttatttgccattgatattattgtggctcatttttgtatcttaacatttttagtggcaaaacacccttctttttttcattttgatgtgttccctattgatttaatccatactgttcatgaacatttagttcagttttgggcaaaaggaagcatgcctgacacactggctattgcaggatctggccagcagcccgcaatgcaacggggctctctgttcccaggcggattggcaggttgagaaataatagacacacacaagatagtgaaagctgggtccaggggtgtcaccgccttctggtcccacggtgccaacaatgcactggatataccagcatttattattaagtttagtgagggcgg

SEQ ID NO: 42723 - DNA, 511 bp, Homo sapiens
tagcttgccttcctactgtagaggctggaaaactaatggctgcatttcccaaactctcttaatgtttcaactcattaaagtgcccacatgtttggaagtccaagggagcaccaaggggagagctgatcctctgcaagccagtctggctttcaggtgctgagcagcagaggctacgggaagtggtagtctggagggaatccacttctttccccaggcacattgttcctggctttgttccattcaaacctaattcacatcagggactttagttttatttcctggacaaataaatatttaacagaagcagtggccagatcaggtttgatgagggaaatccaagttgctaaacccccgtgtagcctgtgattctgctactatgcctacttcgctcattgggcaacactggagtgcctgcagaaaggagagagttggcatgcaggagccaggtcaacctcttctcttgactattgagcacttcctctccagtgggggcctttgggtggcattcaca

SEQ ID NO: 42724 - DNA, 2962 bp, Homo sapiens
tcagtagtgctattttgagtgtttatgtattttcaacttgcataaatattattgtactgtaagtcattgtttcttgcctttctagtcaccattatgtatttaagatttaattacattatgtctagatcttgttcattgttctaactaccgcatagtatttcataggcatctatcgcattttatttagttattaccctatgatgaacagccaggggctttgaacttgccgttggcccaagtaacactgtatgtcccttatagtcttgtgcacatttttccctgggcctacatgttgaggagtgggattgcacagccattggctatgtgcatacttagcttcacaacactcttccagagtgtttgtacctgttggctctcccaacagcagcaccacacaacttctttctaatatttgtctctctgatggatgtaaaatggcatatcattgttttaatttgcatttttctgactatcaatgagtttaagcattttttgtgtctaattttattcagccaaaaattattgtgcctattatgttccagtcattgttctgggcactgaggaaagagcgtccctcgtccatttttatattggatcttgcgtctttttcttgccaatttgtacgagttcattgtagagctaggtattaatctcttatcagttttagacaacacaaatatcttcccccagtttggctctatctggtaactgtttatggcacccttcattgaccagatagcatcattttaatgaagtcaaaatgtttttggcctcctatgttaggcaatgtcacattgccagtttcctggattttgttctattcatagttttaccatttacatttaggactttatttcatctggagttcagcatttatgtggtacaaagtagtaatccagctttatttttctgtagatagtgagctagttgtctaacacagatctcccttttctaaagttttaatgacttagcatgactgatgtcagccttgagtctattctggaactaagatgagtcagaggtttgcaaacagtttcagttagaaaatgtctctgtgaaacctgaaactgggcagctccaatgtgactgctttgcagagaggttgtacttgtggttaatgttatgtggctccccaggagccagaggtctgacagcaatggacaggtgctgagggtgataagtgcattcccctaatggagagaggggttgcagagttattacagatcaagaacaagtctgagagtcaccacaaacactgaaacacaaccataagggttctctagtataacacatccaaatttgcacactcacttctaaaatctatgctttgaaatttgaacatagtttaagaatcatcagacttcagtgtagctagggtttcagagcaggtcctggggatcagaacaccgggttcaaatcctagctcagtcactcattaactgtatgaccttgaccagattacttccctccaagcattccatttataaggatgagataatctttataaagcacttagcctggtgcctgcatattttagttattcaataaacaaaaacaataaaaagaaggcctattagatgatagccttgacattccagggaatagaaagatgtccaagctgtgaccagcaagggatttatgatctaaactagggatgagacaaacctcaaagatactgataccataagagaaaacctggtgtgatcgaaaggatcccattaggaataacaaatcccaagggttctacgctctctgtgccagcaacaaaaggacaagaccaaatctctttcttattataccccactgtggagaggcaacaggactatgcagagacacctcttctactggccatgtcttctcccagtggtcattatctactttctctgcttttcttaaaactccagccagattttctttctcccactcagctgataacctcattgactacttcctttgtggcacaaaatgtctcttattttcattcttttctttttttcatgcccttctaatctctttccttcattgaaggccaattcttccactggcattcctgacccatctccctcttgtgccttatgaaagtccaatgaaaaaatatttcctctgcttctcatgtcttcaagctcagtctccactggctctttcctgctcccaatcgtgcttaaatctctcttggtttataggaactgccctgagtcctggtctatttcttttctttttctttttggggggggggggttggtggaaggtggggggggggggtctccctgtgttgcccaggttggtctcgaactcctgtcctcaagagatcctcccacctcggcctcccaaagtgctgggtatcctgttctattcttaagcaacccttcaatttctctccaacctattgcctccacgtttctcaagagagagataactcaatgctggacttcttatcctttcacaacatttatatcttagcattctgaaatccaacttccacccccacaaacactccagagctactgatggcctcttatgtgccaattgcaaccattttcccttcagttctctatcaacttcagttctgcaaagcaatgcctccattccctctcctggccaccttcttgaactgcttttcttatctgattttggttctccttcttctctggctcttccttcccacagtctttagtctctctgactttgcaaacagagttgcttttcattgttctgtcctcatccctctaagccaggattgagcaatcttttcttgcataagtttaaaggaaaaaatatataataaaataaactttaaaatatccatctatatctattcatactttattaaatagaataatatcaattagaaaacgggttctacattatggcccataaaatataatctcaagacagaattgcaatataaatagcaacatggaggcaacttcccaatctttcttcttgcaattgtgtcaagggc

SEQ ID NO: 42725 - DNA, 5657 bp, Homo sapiens
atgcagaatttccaacatctccagccttgatcctcttaaactaaagaaaccgagttccaacttcctgctcgtgcctccaatttaacacgtcccagcagaactcatcatcttcctcctttgtccgcacaaccgttcttgccttttttgctccctgacaacactatcttcctaggcactcacagttttctatatggaggcaaacatgattgttttgcaagtgtatagcgataagcatgggtatcatcagtgcggcaagaatgtttttaggatatgtggctatgaacctttaatataaacatatgactatgattggagcattttttaaaagagcagcaacacagaaattaatgagccagcacttaagtttggaaaagccaaaaggaaggccaaataatgttctttaaaaatgttgcattagcttcttgggattcccaaagaaaaaagtaaattaaaaaaaatgttgcatgatcaatatgatacaatgtaaaaataattctgatgggttgagaaaataatttttggtattattttaaataaatgaatggacatttatgacagcaataaatattaagagccttttaggtattataagtgaatagtggggcttacatctgaaggattttacagattctctgggatttttatcccttagacaggagtccccagaccttggtctgaggcctgttaggaagcaggctgcacagtaaggaggtgagtggttggcaagtgaacattacagcctgagctgcacctcctatcagatcagtagcggcattagactctcataggagcacaaaccctatgtgaaccgcacatgcaagggatcttatatttttatcagattttttgagacagtctccctctgtcacccaggctggagtgcagtggcatgatcatggctcactgcagccttcacctcccaggcttaagtgatcctcagcctcctgagtagctgggactataggcgccactgccttgcccagctcatttttgtatttttccatagagacagggttttgctatgctgcccaggctgaaagaatcttattttatacagtgacattcattctcttaaaaatatagctttacggttactttttattatacataaaatgaatttcaaggaacggtaatatccacatgggctaaaaatgcatatggaatctacgtaagaaaaatgccaataatgctctagggtgaaattacctggggcttttaattcattcattcaacctgtacttctaagcgctcactccggagaggttacaggtgctaagaattcagcagagaacaaaggacaaccatccccgctgtcatttacactctgaagggaggaaagagaaattaaaccacagacacacagattatagagtgtattagaaatgacgccctaagtgctaatgagaacaatggagcaggggaaggatatagggagtaggattgtaattaaaactgggattgtcaaggaagggctgggcaggggagggggtagtggggatgcagatgacacttgtgccaagacctaaaggggatgagagagagaggatgtctgcaggaaggatgactctaggcaaggaagccagtgtggttgaaggtggcaagatggagatgagtgcacagtggtcatggggaacagatcctgtagggtcttaaaggttcttccgtgtgatctggagcaactggagggtcttgagcagagaactggggtgttttaacaggatcacgctgactggtggtttgaaagtggcctgtgggagcttgctgtgttttgttttgcagcaatgggaaggatgtggttgccacttcctgagatggggaaggtggggagagtagtaggtttggggagttaggtggggagttcaggtctggatgagttgggtttgagatgtctattagacatccacgaggagatgcccagtaggcagtcttcgccctcacctctcctctacctcctctcttatgattacagaagttgtggcctgcatcaaggcgtgcatcagccttccagtaaccccactggcagaaccttgcaccccgttaagggctactgtccattcggagcaaggggcacattagataatttgccctaccagagagagcaattatagcaattactccaaggcaggtgtttggtatctgtggcctttagcagttgaatgtcggagtccaagggaaaggtgtgagctgcagacatagacgtggggatcatcagcttgaagctgttgtgcaaagtcatcagatcagcagaggaaaggatttacaaagaaatatatataacaccgcacagggttgttgtcttgtgaggattaaattaaatacacacttaaaacatccggaatacagacagtgcttaataaagagctgctgtttttattaacaaacttatctgtaggagctcgtccatggacaacatccagttcatacagatgcgtgcgcatttcgcagcagccatacacgcccaaagaggacgagactggatgtgattgagctgactggcatctttagatggatggtcctcagtccagtccttccattttacaggcgaggaggcggaagcttggggaggctaagcgcgctgagctggcggcggagcggagcttccactagggctcccagtttccccgcaccgcgcccgccgtcctccgggccacccatcccacccgaacgcgccaccgctctagcccgcgctccagcccgcgcgtcaccgacgcccgcggcctctcccacctctaagttccaggaagctctcggcctctagctgaccgcgttgctgctgagcttccctggggagaaggcgccgaggtgcccggtgcgggccgaggcagggctgggcctcgcgggcagcaggcggaagaaggaagggcggtggggcaggtcccggctgcgcggggcagttgtgcgcacttgggttcttcacgcgggacacacgtggaacgccgacccctgcgcccctggccgctggcaactggcaaggccgggaacagaaagtgtagggacagaagagcgctggagtcttccccgggagggagcccggggctgcagcccaggggcggggagcggggcggggctgggaaagttgagtactggtcgctcagggccgggctccgccggagtgcccggcgcagaaaccgtaaaaggctggagcgggcggggtaggtgtggctctgtgtgcgtgacctgagccccggtcccagtccctgtagtctcctgcggccgcggcctctcagccatgggcgccgtctggtccgccctgctggttggagggggtctggccggagcacttttcgtttggctgctgcggggcggccctggcgacaccgggaaggacggggatgcggagcaggagaaagacgcccctcttgggggagctgcgattccgggaggccatcagagtggcagcagcggactgagccctggaccttccgggcaggagctggtcaccaaaccaggtattcttccccccgtgactccagggcacatctgccagagctttgaggttcatcgaggaagggagcaaagagacaaacccacctggagctttcctaggggcccattcctgcggacgggctctcctaaggggactgggccatccccacgcccctcggtttcccaggctggttggtacgcgcaggcaggtttcttgtctggtcctccaagggccgcgcccttgccgagtccctcagcgcccgcgcctgaggacttggtcctgcccctccggcggggatgagctcctccacttggcggcgcttggtgcagtgcgggcggctgcagtggcggcgccccttcccggcctttggaaaggggggcttaggtttaggggatcctacaagcctcttcgatctctgcccaagcagggacattttctaagtcccaatccgggtagtctgacatcctcccatcgcacagcccatgaagagctgggtttgggaacacccgaactgcgggcgcctcctgctatctggatgcttctttaggaaggcaaagttcaggttggactctggccatgaaggctgtggctgaggccctggggatgtgccttggtcacccctttcagcactgtcggcagtcccctccacgctgccccagaatagggccggatagtcatccctaggaagggactacttaaataggggacccaaccctgatgagtagaattgacatctgggtttaaatttctgtattttagggaccgtttgctaagcagagagcgaacactggcagaaaagcttaccgtccagtgccctcccttggcaagctgcccatgcctggacagaagcctaatggtgaaaatgacatctgtgaactttatttttagcccagtggtgttcatgtgcagccatatgaaaatctgcccgtgtgcctttactgtgattggtctgggatgcctagacagttcacttatcttttttctgaagaccaatctcatgctttaggttgaaaagttgggaatccagaataatatttgttcattctcacttccaactcccaccatcaccgaggcgggcaaatcacaaggtcaggagttcgagaccagcctggccaatatggtgaaaccctgtctctactaaaagtacaaaaattagctgggcgtggtagtaggcgccggtagtcccagctacttgggaggctaaagcaggagaatcgcttgaacccgggagacagaggttgcagtgaaccgaaatcgtaccactgcactcactccagcctgggtgacagagcgagactccatctcaaaaaaaaaaaaaaaaaagggataaaatgaaacaagactgttgtccccataccaccaccacccccacaccacataaaaccacagctgtgctgattgtatgtatgatttggagatttcaatcttgtagggagctatttggactaccaatggcatggccaagaaggaaactgcatttttagaggacttggattttgtatttttaagaacgttttttaaaaaatgcttacaatggaaggggatacaaaacaccgttttgttggggaggttcctaacgcatatgggattggcaaggagaaaccagccccttcccccagttctccctccactcctgcccagggaagcactactgttctccgtatctccccaaggtgacagctcctgctgatctgcccgcaggtctgcgagagccaatccctgccctgcatgcctcccctgggagaacaagtgtactcttctggtttgtaacgtagccacgcagccctttgccccacagcctggacaacattctttgatgataggagccaagcaacttaacttggctgcatgccagtatggcctggactgtggagactggggaccatgggggggttacacgtctgcctctacagcttaccacttcatttacacttgtgctggcacactgatactcctggatgtcccttttgttgtcagatatacatgtgtattcttagagcacagtgttgggagcatactggttaattaagtagtacttgattttaatagagggggactttgtgaattgcagattgattagtagtaaagctttcagtaactaaatctattttctcagcctgacttttttcttaaatgaactacctgactctattacatttttcctttgatttcttagagcatcttcaagaaagcaatggacatttgatttctaagaccaaagaccttggta

SEQ ID NO: 42726 - DNA, 1995 bp, Homo sapiens
attagaaagtacttaaaagaactatgtttgacagtttttggctcatagcacttttatgttaaattcatgtatactgtttacagacttcataatgaattttatattgtaccagtaagctctgcagaaggcattcaccattactgcatggaatgcccaaacatgcccatgaggaaaattaaaggtaaaacaatttaagtaaaagtctctctagaattctattactggctattttatcactacctggtaaaattaaaattaatctttcagtaaagccaactgatctaagagagaaatattacactttatattttaaaaattcacttaaaattggatgtgcttacagttctaacattgtccttgagagcagaagcgtgaggatcttctggtgagagcatgcatgccctactccatttgttgtctgcataggttagggctgctgctagctgctgtaatagacaccatccatttaagaaggctgcagcaccagaggccgatttcttgctcatgtaactgtcagcagtgagtcttcctggcaggagggcagctcccctccttgcagagattcagttacccagactcccttctgccctgtggctctgccatcccctataataaccctcatgtcctctgcatccagcccatggaggggaaaataaagttaggaagaacacccatgcatgttaacactttgacctgaaagtgccacatattgctctgtccacattctgttaatgagaaccctcaggccacacccatatacaaggggaggcaggattgggaaatagagactcttgctgggcagctgtttctcagtgacaattccaggttatacaacaggaacataagatttattttggacagctagccatctgccacgttgtccctgatgttttgacacaactgatacatttttgtatttgttcttctctcattttatttagttcacatataaacctccctaatttattaaaatttaattaaagcagactgaatagatataatctagaagttaccaacttgctaaagagtaacaaaatcattttctttactattattaatatgcaaaaaagggaaacttttgtaaaagttttgactgggggccctgatgttaggttatctgattaccctcactgatattgacagaacagtgagttcacagtcacaaaatgagcccctgttagtatgctgaaatttgtcctctgtccttggtattacaccacgtctttcactttcatgtgaaagtagttcttcccccagattttttttgaagctaaattagattgaataaaacatttaaattaaattaaaatttaagtagaataaaataaataaaatagattctattgtcttgggaccagtaacaataaaaaaccacaattattccaatatattagaataagcacaaattatatcttataattaatcaccttataaggtaattataataccttattatgtatgaatactttataggtattaattgttataatgtatgaatactagctagtagatgtttgaagttttactgtgagggattcaagaatagtttatttcaaaatagagtttacaagacagggtatcttttattaaattttcacataaaaagaaaaagtacacagggcactaattacgagtaacaccacaattaattgggcctcattcctctgtaaagaataggcaagcaacgagtcattttagtaacattttttcctggtcttttactttctgtatcctcttttcttgatttctgatcattgaagacattgctgaaaatgttgataaaacagttagaataacaaaatctacttaggctttaattctactatgtgctacttaaaagatcagcttgatagtatagaatagacatgttctgagctcaagacattcttaaaaattgtgatgtagcatatttttgaaaaggttggtgttatggaagagagctaagggtaaatctttagtgtttcaggtgttttatttacttatttattttgtaga

SEQ ID NO: 42727 - DNA, 1141 bp, Homo sapiens
tagatcactgtctaaaatgtattcctagactctattaatctaataaagaagtactttccaggagactgaggtgggaggatcacttgaggccaggagttcgagaccagcctgggcagcatagtgagaccccatctctacaaaaataaaaataaaattagcctggcatggtggtgcatgcctgtagttttggctagtcaggaggctgaggtgggaggatcgcttgagcctgggagtttgaagctgtaatgagtcatgttcgtgccactgcactccagccttggcaacagagtgagacactctcttaaaaaaacaaaaaagtacttcttgtgctccttttggggcatatacaggaaaagaaatgaaaaagtcccataaaaattcaagctctgtaacacaggttacttcctaagaaaaatgaatgaacaatatcaattgataaaatctcttcacttttgttattatcaggaaagactaaatcagtacacacttagtaaatacagtaaggggaagaaacacaaactttactgttacacaattatgtttgcctggcaaggaatgggtacatgaacatgatccgaggggcaatatgatcaggcgaagagccaaacaccttaggttcttgtctagtttctgttacataacttccctgtgtttccatttttttcatctgtaattggaaagagtattctagacgatctctcatgttcctttcaattctaatactttattccacaagaacagtattaataaagctgaaacaatttattctccacctgtcttttgagctataaatttaacaagaacatttccaatttgaattaatcatatgattaaaataaatgttttctactcctagcctggcataaaccatttctatccttgagcaaagaaaataatttgtatatatgctttaaaagcttaaattaagattttctcttttgtctgctttcacttaaaaaaaaaaaacttctggataatcatttcataacatcaaacttgacatgagaccaaattaaaaaaagaaagaaaaagaaacgagccaagtcttatctttccatctgtctattaagtataagaagttcctccagccccctgcaggaacatttgttttgtagttgtcagtactgactcagctgctata

SEQ ID NO: 42728 - DNA, 2007 bp, Homo sapiens
ctttagcaatgccaagtcatatgaaaatgaaaaataaagcagaataatttgtgtttttagattttatattcaattcattataacaaaaacattttataacaatacaattttttatgatcccaagtgaaatccttgttattaacttgtttgattttccttgctcagctacaccatgtaattaatgtcaccttaggccagagtgtacttagctatatttacatggcagtcatctctcagtgctccctgaccaaaccaaagggagttactgttaagacagtctagttaaccatcaactaggtgccaactctatttagggtcactgtggtgtattataaatctcagtgatttattaaaactaatgaagctgatatgccctccttatttccgttagctctttactatttaagactgtcaaaattcttgctcagccactatttacattagagcaaaataagagaatgattctaatatcatgtttgtatctatatgaccccaaaacattcatgtaaaaagcttgcagtcattcatctggatctcgtgcttctacaatgccaaagatttaaatgcttataaaaacttagaaattctttttatacattttagatggacatttcagtatttgtgaaaaaatttcccaatatgtccaaatcagcatgatactgtatattggaccaaatgcaaattagcaaacaatgggtgaggcttctgaaaggataatttttccaaacaacagtataatggaaagctatagcagttaccaatcatgtaagaaaccacaggtgagttgagctttatttagtactttgcggcttttcaaaaagtttgtcaatagacaatgagtacttaatctttccaaaatgatttgtgattattcatgaatatgcattattatattggactgtgacacaacagctctcttatttcctctctcattgtcagattgtcagctctcacttctgccagagtgcctacctccactagacccaagtgaaaaagcaccctcccacctcatggtgcactaaaatcagcccctcctgctgttgtctgcagggtgcggtcatgaccttttggtataggcttggtctgcccagactggggtggacattcctgctataaatcatcaggggaaaagcttgtcctgagaaaagacactagaacataaaaagcaggcttcagagaggcagagaaaagcgtgtgttcctctctgaccttttgtttgttgagtgtaccctttaagcagtctaaggttgcttaaggttgctcagaggcggcactggttgaaataacattgccacaaggatttaggttaagggttatgcaaggaggtttacaaaaggaggcagtgttattcaaacgcaaccccccaataaattatgaaatcaatttagtgagcttcaaataagcatctgaagagaacagaaaatagctggcatcacatgtaataggagtaaatattgttttatgaatcttgcttcagttgcatgtgtgttggatcataagatgaactatatttcttactttggaagacactgctgtaaaggacccacatctataactgagattatacagtttcatgttactctctatggcttagactttagtaaagtcctgtctaaattccatccttatcttagctttgataaatgttgaggtatcttatttccatgcgcgagccaagtagaaacagccccctcctgtggccggctggagtgatagcggtaattaaaatggggtgcccaaagaagggcaaatgtctggaagaattcgtgctgcaatatatggagctttcctccatgtactgttaccctatagaattggtttcattttataaagggagtatggcagcttccttatactctatttcttctaacctactgctccaaatagctaaggtgtgagaaactgactacaagtgacagaactgtatgtaaattgtttctgcttggctgtctaagggtctcttataggtaggatgactaaatatagactttatcttccaaatgggga

SEQ ID NO: 42729 - DNA, 626 bp, Homo sapiens
gcagggagagcacagcaactggggggttttatatttaactcagtgctgccccgtcagaggggagaatcaagccatgctgagcttagagggagcatttggaccagccctagccagaggggaatggtccatttcagtggtcagaactcgagtttctcagcaagcctcaccaccacatgctgaaatgcgctggggtcctaggtaaacttgaaaggcagcctaggacacaaggactgcaattcttaggcaattcctagtgctaggctgggcttagagccagtaaactagggtggcatgtgacctaaggagacccaagctggtgtggctaagagagtgcttgcaccatccctttcccaaccccagacggtgtagcttgcaacaacaaaagtgcctccttccttctgtttgacgaggggagagcaaagcgtaaaaaggactttgtcttgcatgttaggtaccagttcagccacagtagggtagggcagtgggcagagtcatgaggcccccattccaagccctacctcccagacaataattcaagatacaccctgggccaaaagggaacccattgccttgaagggaagaacacagtcctggaatcgttcattacctgctgactaaagagtcct

SEQ ID NO: 42730 - DNA, 1235 bp, Homo sapiens
aaaaaaaaaaaaatcaaaccaaacaaaacaaaaaaattagccaggcatggtggcacatgcctgtagtcccagctacttagggggctgaggcaggagaatcatttgaacccgggagggagaggttgcagtgagctgagatggcaccactgcactccagcctgggtgacagaacataactccatctcaaaaaataataaaagtaaacataataaaaataaagagctcttgggccctgaataaccagcagtgataccctgagagtatgctttgggccttgggctctgagatgtgctggcttccggggtgacctagcacattcccagctatggtggctacagtgaaagactccttctgtttgagaaaagcagagggaaaagtaaagaagactttgtcttacaccctaggtaccagctcagccacagtcgggtagagcaacaagcaggctcttggagtctctaagtccaggactatgcattgggacctgggcagggcagcatttctggacctgccctgtgtcagaagggaacctagtgccctaaagggtgagttccaggcctggcaacattcaccacaagctgatcaaagagcccttggctttaagtgaacatcagtggtggcctggcagaaaccccatggactagtggtggtggtagccacagggagaagctcctctgcctttggaaaggggaggaaagaatgggacagactttgtattgtggtttgagtcagcttagccgcagtagaaaagaacataaggtaaactcctaaggtatttgactccaatccctggctcctggacagcatgtccagacatgcacagggcctaggggatcttatcaccctgaagggaaggaccttggacaagactcagggcagtgctgacttcaggtctgacccatcacattcccagtggtggcagccacaggagtgcttgcataaccacacccccagttccacgtggctcagcacagagagagagagagagactccatatgtttgagagaaaggtaagggaaaagaacaagagtgtctgcctggtaatccagagaattcttccagatcttatccaagaccaccaaggcagtatccctatgagtctgcaaaaaccatagcattattgggcttggggttttgaatacctggaaagccttcccgagaagaacaggcacaaataagctcaactgtgaagactaccacaaataactaacttcaatgcccagacaccaaagtacatc

SEQ ID NO: 42731 - DNA, 1743 bp, Homo sapiens
ggaaaaggatggagactttccagaactcattgtgttgctgattgatgctgataatgagggaaagctctgacccccacatgtggtttaaagacagggctcaagctgaaagggcccttgcgccggcatttaacaccattccgtcttggatgcgaggctgtcctctctaccaccaagtcttccccatctcctccccctgttcgcggcagcgcggtagacacagagtcagcagtcacgttggggcaggttactcggtgattctcttccccacaaatcaaatcagtttgcgcaggcccctgtgttcttcaaggtccaggtttcagcgccaccgtccccaggggtcttgcaatcccctaaaacaacagcagctcattccagtaaagaaacaatttattgggcatcttccatgtgcagaacaaacacgaggcaccggaagattccagaaatgaacacgagtcgctccgggtcctcagaagaaccccactcccaccccaccatcctcgtctcccgggccgcgccccgcttgtacctgcaaccaacacctaatcctaagacaccggccacatctccgcggggcgccggcgggcgcagcggccccacctacgtcgacctggcggctgggacggggcggctccccactcttcgcccctaggccccgcggaggctgcggggcggctcctcctcctcggctgcggcgccggaagctgcccgcgcccgtcactcctcgcggctgtggcgctcggggcgctgcccagtccgcgcgagccgcgtgggtgacggttaggacgctctgcgaggcttcgtagttgggggaggggaggaggggggtgctcggcagctgcccggcggggacccctcccgcgcctgcgactccgcccgccggacgccgtcgctggggcatccgagcgtcgaagtccccaccaccgcccgggcgccctaaggagtgggggtgtacccagcccggagtcaaatcctggagccctgccccagaaactaccctgggttcggacctgcacccggcgccctctgccgcttctcccacagcctcctaactggtctccggccctactcttgcccccacccgagcgcctcgggccactctcgtagctgtccccaccgtggtcttcccagataactcactgacccgcaccagtctgagctcttacctgccaaagagtcaagcccaatctggagttgcccgccgggcctcctactctgacacccccacccggccccacctcacccccccctcccattcccactcctggcattcccatttgaccatttcaagttaacagaattcacattttgcagctctgttttctctgtccccgaatgttcaagttcaaacgtgttctcggcatagctgacccttctgcctctggagacttgttccctccgctgtgctacagttaccctctgtcattatctctaatatagaatttatcagattttgctgcccaaattatcgatcaaatggaacgcatccagaaaggccagtgtctgatagatgcagcctgaggcatttaattctgctagcaatcacattgtgcagacacctacagcaaataactttttatgtataagttgattagaaatattagtaagtcttacattaaataatgtagctacaaattttaataaaaatagattaaatgccattaaagattgtttatcatatctttgtagttaatccatttattggcttatagagatctaggattagctatagaatcgagcattttt

SEQ ID NO: 42732 - DNA, 1995 bp, Homo sapiens
aataactttttaacactaacatgcgtttccttgaataacttgtacctctgccaaattccacacaagaagcttcttttcttcaggggctgcttccccacaatgtgaatattctttgactcactatgttgtccatttccaatttccttgttttttgcttgagttcactgaagactgacaaacagtagcttcacgtgacagccattagtctgctttaaacctcagcttgatcttgaatggatagaataatgaatagattttgtgtcatataattcatgttgtcagttatatgaaattggcagttaaagagaaactaaatatgcttccagtcctctcttttctaaattcatatttgaatataataatgtgaaaggcattgttccttcttttagttaaagcatttttgtagcagtctgaactgtgaataatagagaaacatatgctctattaaaaaatagaaggtgaggaagataagtgttttactctttgtattaagaattaacaagtggttttaaaaattgagcttgtatgtgtgtgtgagcacagggaggggtatttcatcataatgagggaggccttggcaacttagtgttcgttttaactccattgattgccgaacacattcatgcctgctctagctccagggaggctgtggaacaggaaataagagattcaaaaagcagcacagaagaaaatcatctcctctccttccatctcccaagcagagaaaaatatgctttcttttttgtcaaaattgcttggtttgtcctattatgctgtcatttcagagagattaaaagtatactttttcatacattgcaagtgggaatgtaaaatggtgcagccactttggagaaacagatggccatttcttaaaatattaaacatagagttaccatatcacccaacagttctactctgaagtatatacccagcagaaataaaaacatatatctgtacagagactcatactcaaatgttcatagcctcattgttcacaatttttcataaatagaaaaaatccaaatgcccatcaactgaataaacaaaatgtggtatagccatataatggaatactatttggcaataagaaggaactgagttacaacatgtatgaactttgaaaatattatgctcagtgaaagacaccagacacaaaggaacatatttaactccacatatatgagatacccagaaaaggcaattctaaagggacagaaagtagatgaaagattgcctaaggctatggataggaatagagagtgactataaatgggtacaaggtttctttttgaaataatggaaatgttctgaaactaggtgttctgaaagtagatagttgccaactctgtaaatatagtaaaaatcaatgaatcataaagaaaaacactacttctattctggtaacaaaaattagaagaacaaaaaaagacagaaattatagtaaaccacaaagtaaattattacccaccatgttaaccatttagtattgatttttttttttttgagatggagtttagatcttttgcacaggctggagtgaagtggcacaatcttggctcacagcaacctctgcccctgggttcacgccattctcctgcctcagcctcctgagtagctgggattacaggcacctgccaccatgcctggctaatttttgtatttttagtaaagatggggcttcgccatgttggccagactggtcttgaactcctgacctcagatgatccacctgcctcagcctcccaaagtgctgggattacagatgtgagccactgcactcagccagtattgatttaattaactgaaatttaatatagtagaggaaaataaccaaaatgaagctctaaagcatgtcacagagtcctaattattcaaagaatcataaagatgtgatttacaccattcaataaactgcaaaaaatttgtgcagaatcaaagaaagcaggcacaacaacgtatattcttaattatttcatttatataaatttttaaaac

SEQ ID NO: 42733 - DNA, 2875 bp, Homo sapiens
ttcatgtgaaaggaaggattttgagctctttttggctaaagttgataagaaggattggaaagtagcttagttcctaattgaggttctctccctgtctctaaatataaatagaaaaactcatggaacatttgtgagagaagagttatatgtttagttgcttagaacattttattttagaaataaatatttagggatacagccattcatggtgttttcatgaacttatcccttatgaatgcatatgatatgttcattcacctctttgtagaagctttgatcgttttgcacaaaacaggaagtagtagtagtggcagtatggatttgggagggtgaagttagctttggccaggtgatctctgcatatcagactattaaaggcagcgcctttacagaatgttggctgggctgtgactcatgctttgctttgcactccctaaagaggctttatgtatcgcctctttgtcctttcccaagtcatttgaaaataaatagaagagagaataatgtgatcaggggctctaattgtatttattgcttatgtagggttgtagtagatacagggatgtttccttattctttatgtcttgcacatctgaaatgtgtcataataaatgatattttaaaaaactaaacagaacaactagttttgggaatttgtcctacatagtcatatgactcatctgcatagatcctaatatgatcatagcttggccatttccattttttctgtttttctccttcttaaacacaagtggaatttttattttatttatttatttattttttgcgtttttcaatcttggataggactagttgcttcccaccttttctgaggtacagaaaaaaataagtgcgtgctgccatttgcttaaagatcagcagtttccatctctgcaggtcagaaaggaagtgaatacaatgtattggatcaataagcacagatatttgcaatactaactataccaatttcaaaaacacagtaagttgtatatttaattgaaagttcagaaaggacaaacagtagatgacagctaatacagtttgaaaagaatgtttaaaatgtgcagacaaaagattatttgcctataaacaagattgataatttataatcatgtgatggattgaatctctttcataaatatttgaataagatgggatcaaggcagtaaagttgatcatgaagctttaccttgtcaatcctcatgagtgttgacaatacctgttgggaataaaccctgtagcctggctgaccaactgatatctatatcccaatccactggcacatcaataatttttgtaaagtaaaaagaaaaagagggagagggaactgtttgtttgatggtggatggagaaagtgtcccaggaaagaaagctacatgctggtgtcttagtggcagccaggaccaccctgtgtggacatgtagtttgtactctgcatgactcctgggggcatcattcacatagattcctaaaggaatgacgctctctatggttgtacaatctcagccctagtggtaatcatttatttggcaatctggaaatgtttccagaagtatcccttgtgaaggacaaaggtctactgtgtatcttgcatatttcattattaaccctgtgacttgtgctgagtaactacttaatatctattcagtgctaaaataagagaaaggcaactttaaaaaaaaaacctttttgagacataattcacatattataaagttcacctgcctatagtatacaatgatttttagtatattcatggagtagtgcaactatcaccacgatcaattttgaaacatgtcatcaccaccccacccccagaaaaataaacctcatgcccattaacagtcattctctgttcctctcttgccccagctcctggcaaccacttatctactttctgtccctacagatttgctgattctggacatttcatataaatagaaccatatactgtgtggcttttggtggcaagtttcttgcacttaacgtagtgttttcaaggtttatccatgttgaagtagcatatatcagtactttatttcttttttattgccaagttatattccactgtatggctataccacattttatttatccattctttagttggtggacatctgagttgcttctacttttttggctattatgaatagtgctgttgtgaatattcatgtacattttgtttgtgtggacataagcttttaattctcttaggcatatatctaggagtgaaattgctggagagaaaggcaattttaatttagaaatctctacattatttgcttttatatttaaagtcatcttattaatggtatatatctggcttggctggtaattctgggtcctgtatcaaacctccgccttacaatccccatccatgttgtgagccggtaggtgaaccacagaaaattgaaatgtactactgggttagtctctttgaacagggtcatacttacattgaattcactctgatttattattttgctactgcacttggaacacagacagtattcactaagaattggaactatagactagaaacagaggttccctgttttcattagtcaactctcaaaggatggaagcagccaatttcagactattctagggctcttgctctcttagttgcttgccatccttctttcttttggcctttttgcatttcattagtgtcacttacagagctaagagaacacagataattcatccaaagtatttttatagtctttaggtgaaaagaacttttaatatgtgtgtcatcttggtttctatgtcccttgtaaattatgttgtttaccctgaaactatgaagaagctgcagttgacttccttcaacctaatcttagcttctagtattgtgctattggagttatta

SEQ ID NO: 42734 - DNA, 2853 bp, Homo sapiens
cacctgtaatcccagctactcaggagactgaggcaggagaatcgtttgaaaccggaaggcagaggttgcagtgagctgagattatgccactgcactccagcttgggcaacaagagtgaaactccatctcaaaataaataaataaagtgaaaagattaactttctatgataggctgtcgttttggcatcctttttacggtccttgttcctaattttgaaatgagtgggtggaccttatttttctcattctccctgctcacggccccctccctaattcaattaatatctgctggtgtgtgccccagattgattttttttttttttgccctctgtggactagttatttctcaacagaaaaatgattgccaaatttctgaaattcttttctaaacttctgaaccttttcaggtgttatttatgctcatcattcagttgtttgtacattcttcactcacatagcaaatctttaggaagtaaaagaattgcactagggttttaccctggtatgtagctgtgtggagcacttcagaggcagaattaacattgtgcgctactagttttattcctgtttgtcaaacaagatcacttaacacctctgcattgggtaaccatgctttcccatgaagcgagaggactgctgagcttgagcaatggcggggacctctcccagatggtaagtgttttagggcacaaggtcattatattaaaagtagcaagagaatgaacgggaatcaggcggaacatactgatactgacacatgtgtggcacaagaaattgctaaggtaggtgcctgatcgtaagggggtgtcccctccaaatattggcacttgaaagcagccacaaaacctggtattttagttatttatcctgagggtgagtagtgggagggacctttcgtggtaccctctgtgtggtgcttgctgtggtccttgtgttgtagcctttgatgtccaatgtgcaagatacagaatttggcaaatagaggtcgtttgtcaaggttggttctaaaggggctgcctaagtttgtcatctatgcaacataattcaaaggcctgttctgttaaaaaacaaacaaacaaacaaactcttaactacctcagaaccacgagtgaatgcagaacatttattcagaacagctttcttctatttaggcaccaaggctactaaaaagaaaatgatggccccaccatctgggagcttacaaaattaagcagatggttaaaatgcagtgtaacaagaggtgtggtgatagatcacactgggttaggagcctgctggaggcacgcagtacactgaggacttccgcaaagagagaagcctgtagacgcaggagattgtaagcgtggacactgtaaaagctgctattggtgccatgcccaggtccccttaactggattggtatccccagctgtaagctgttgtattggctgctgaggctcacagctgcactctcttgtggaaaattgtgttctgctgaaaggagcaaaaaaaatgaggttacataccttccccccagggatggcctagaaccaatgactgatcaataagaaagtacaaaaatctggccttcttgcatcaaagcagacaactctgtgtgcccttcctgctccagagatctgatgcaatcaggctgagaacagacttcagctggaaccacattttcacttctgtgcctttctgcttccttcattgccctataggattctcccaagaacatccctcagtacatcgcttgtaatgaatccctgtctctgactctgctcctaggaaacccctgatagcagagaagcagaagttgagctattctggtgttcagggctcatttttcctgatgtggggagagggaatagacgaagtggttgggaacattggtgaaggtctgatgtgaggcatgtgagcaatgtggagaatgggagcagtgtctgatatcaacttaggtgagagactaccatatgtgtatggcaccagtctgtattgtggtatcattttcttcagcactcagcagcctggggtataaaaacacagacatagatgacacaaggttgtagttctggcaggcggatgccataggaagtcaaggaaccaggcacgacaagaaaggacttgaagataggaaggaatgactagtttgagagaaaatggaggtgtcagtggaccaaagctgttcatacaatggaagaatatgtgtgatgaccaaaatacaggtaacaagtgtcaagattaggaggctaggctagtgtgttgagagtttggaacaggagaacttaagatttgaaggtttaagcatttctgcctaatgacatgtctaggatatgccacagcacaggtgtgtgagtgaattggagggtgtgcttctggggtgaggagggcagggcactgcagtgttagggagctggatgggccatcctcttggacactgccagcactgagccacagtagtggtccaaggaattcacactgcacatgcagctgttacctgccccaagtcccagagatgccatcacttcctgtgtcaggccttcgtggagcaggtgtccctaatgaaggcagtgggcaaagacaaatgacttggaggtatggaatttcccaaggagacccttttgtggtggtatagaaaccaaaccacttgttaacaggttaaatatttcccatctttctgttttcatgctgacataggtgttcttggactcattgaccctcctggtaaatctcccagtcaggagagttccacccttattggatctcattccatcatcctcctatgtatttcgacttgctgtccttgtctcctaatcatctcaatgacccaggcattgaagaatgaagagtgccatgatattgtaagagaagcag

SEQ ID NO: 42735 - DNA, 2940 bp, Homo sapiens
atcacttgaacctgggagatggaggttgcagtgagccgagattgcgccactgcactctagcgtgggcaacagagcaagactccgtctcaaaaataaatacataaataaaataataaaaagataaaataaaataaaaatcaggaaagaggtcgtgcatggctggagcagagcacccaaagtgtatcgagcccctggtcaatgtgaggacttcggcttttcctttgagtatgatgggaaacccctggatggttttagcagggaagcaatgcaatttgaagtcatcagctctctccttctgtgtcaattatagtttgttctcttgcctctagtcatacaaagttgtatttccctggattgtgagacagaaaaatctaattctatatgatcagagataggctgttgctttgggcaggtttttatttcatgtttatagattaagagtttgcactttcagttcccagggagttcacacagatggggtgactgctttgtcttaattgcaattgtcatgatgtatgcgtactttcctagaactggactgaggctcagatggatagatagttcaaggaagatagattaacagagagagggagggagaaagaaagagagagagaatagattaaatggatggatggatggttagattaacagacggacaaaataaatggatgatgataggaggaggagagagctcgtcctctttgaggcagtgtataaggaggactggttgactttttctttctttgtgaatcacaaacagagtttagaagtggtatgttttcattaacgctaccttaattaatatccccttaatcatcaagtatattccattttgacaaaatagaaactgaattccttcttatctcccaaaggcaatggaaaggctagagagagctggcactgtgctattacaagcagatgagaggcatatttgctgaataacgagagtagctaacagtactgaactttgcccttttggtgtgggactctttctttcctgaatgttcaataatgtctggctcttttcctttgtgttctggttttatgcaaacacaaattacactcttgttgacttcactgtaacccatgaaattaaagaaggggaaattggagtcctatagaaggcagtttcaccagtcctgcctcttggatttgtgcgatggaaactgagaacagctgtatttttctaaccaattttatgagaaaagaagtgtccccagcagtaatcagcacaggcacatgataggaacagacagagatgctgctttaaaatcatatattctagagctgaaagccatctaagagagcatccaattctccctcattgtataaatgaagaaagtaactaaaactcggaggtacctgttcacacttcttgagtatatactaattatgggaagcaacgtggcatcacagaaataccacaggccttgtggaagtctgtgtgggaatcatagctctgccacttcctagctgctgtggctattgggcaaattatattatctctttgagccttctctcatctgtccctgcttcatgggctggttataagaatcacatgatataaaatataaagccctggcacaaagtagatagttaataaatagtagttatgattagctcgcttttgttgctagtgacaatacagagtaaaaaccatctcagcaaatacttagaataggattttaaaatgtcaaccaatggcaaacttgtttgaagtaaatttcaatatactgaaattccaatataattcagggaaacaaacatttttatataaaatattgtgctatacactagagttagttcaaaaataagaacaagatctgggttctgcttttaaggaaatgagagtagacatgcacgctaggctgcctttcagtgagggccgtgggacgggccactggggaggaggggacatgggtctctgggtgcacagaagaggttcttcctggacaaggagctcagggaagtcttcacagagaaagtaacattcgagaggtttttagaagggtctagaaaaacagattgagggacattcttattgaagggggccccataattacaaatacaaagtatatttagatttaaccaactcctctgtttaaatgagcatagaatatgtgaagggcaaagcttaaaataaaaatgatagctaccacttacggaattcactcatgtattcactcttttgctcgttgtgcaactctgtgaggtagattattatctccattttgccaaagaggagacaggcatgggcaggttaaatgtgttgcctaaaggcctcacagctggtaagcagtaccaaacttgaattcaggtcatctgacttcagagtccatgctccagttcggacattagacagtgagcttgactttttctgctagccgctccagatctataccctcctcttctccctgctgctcggggacccaggatgctgagctgtgtgggctctgtcagcatgctcccttggccctggtttcccgtcataataatggagggaaatgggagatggggcctcaggtttgccagggctgtatccctttgttagaggacacagctcctgttggccagccgctcttgcagctacaggtctccctgtgttgaaaaactcttctgtctccttgtcccaggacagctaatgctagcctcagaacacttcaccatctcatgttggttcctttaaccctgtccctgtctcagtgaagatcggaatttgggggttataggataatctgttcagctttagtggatactaccaaatagtttcccaaagtggttataccattttttttcctactagcagtgtaggaaagtttcagttgcttcccccttttgccaactcttggtattttctgtccttttcattttagccattctagtgggtacacagtagtatctcatttgtgatttcagttttcatttctctgagaactatgg

SEQ ID NO: 42736 - DNA, 2039 bp, Homo sapiens
aataatgccacagcaattgtgaatttagacttttgtctcctaaacacaaggtggcagcaaaagactaggctcttggctgccatttgccaaaaccagtaggataagatggtattatttaatttacactatgttataaagtaaaagatctaggtggcttaagatcactacctgctcttagtggtttctatgaggcccaggtttaatgtccctagaattatgcttttatcgctataatcggaattcccctactctcaatatatccactgaagtcaccactcaacaacacctctgcctacaatttctccaaggctttttctatcacttctactgcttcttggaaaaatacccttcaagttttcacctgtgatgagcaggggtcttgctggcagaatggcagctatgtgctttacaagataaaaacaacttctgtcttccaggatcggggaggatttgcagtatgggggcttggtagtgctctctcagggaaaaaatttcaaataaaacacccatgtgttgccagtctattcaaatatgttccaattataaacaatagtaggaaatctcgatgatctgtgggttgggtttctgtgttccttggttggagctgatcactcctggccaggtggggctggaaaaggatggtgagaaagtgggagacagaccatgaagtgagatgggaaaccccattgcagaaacggagtgaggggcctgtcctcagaatctaaagaaggttgttctgaagatccctagggaagaggccaggggcctagttgagacacaggtgaggtgaccctcaggagaatattttcaacctgaggtccgagggagtgggcctgaggcctaaatagaaagatcctctttcttcagggaccttggggatttccaggcagaagttgacctaagagaggcagtgggagtagaatggaagggctaaaaagatagggccaaaggtcaagttaaaggattgacatgtagactagaaggaaattgacacaagtaccaggaagaagttgtttaatggttctgatagatgccacatgacttaagcaactggaaactgaccttgcaacccctacaatggcattgggctcataccctgagattccaaagcagaggggatctccagaggagaggaaggagggcaggttataaacagagcctttttttttcagagaggatcctcttccttcttttatttccttcctgctaagtggtaagagcagaaaatcattaaggaaagcagcagaagaaactggcagatctggaatgtgggccattttctcaccacaatgtgggcttcttcacttccgcaggattctacctgctttaggggtcacaccctctgcagggtgcttggggatcgagggacaaggagggaaaatgttttaacctttaaactggtggcctttttggtggttactatctaaattacctccaaaatgattgggggtgggaaggggaaagaaaacctaacctggacctaagggacttgtggtagggatcggatactgcaatgagcgtggaatcatacatttctctttcaacttgatgaggtgctcccacggagggacagttagcagaaaatttggtaaaggccttatcacagaccagagatatgaccaactggggtgagctttaaggaggaactagggtagaaaatggttaatgttttgctgaaatacagggaagaaacaaggtggattggatcataaccaacttctttcacaatgtcataaaagtacccaaactgtggagtgcacccacatctacatgagcaagtcttgtgaattgctttgatgcttgcaccgtgccatctcaggcctgccatggtgctaagtcaccctccacagatgcagggcttccagcttccacctgagagcaggagcagtaggttaactttgtgtcaaagactcatccttcctttcctttgacttcaaaggtcccttggtggaactttctactgtcgggtctttcatgattccctatcagaggttttacatgtatgctttcgactctgaaagggagacaatgccagctaa

SEQ ID NO: 42737 - DNA, 1725 bp, Homo sapiens
catttcatgcacttatttaccatgatgtaacctctgcagttggatgtctcctcatgtttttgcccattttcaaattagattgtttttttcttaatgcaaagatttttaaagccttttagtaacattcttagaggcttttaaaaatcattcttccaagtacagaatatattttaattcagctctcagtagcagggtgttaactctaaacccatcattgcctcagcatggatgcaggatccaatcctctgttattcagcacgggcattttccccacatgtcacattcaaaaaacactgctacatcctcatctctttcccagccattacctgaactttacccctgagctagaatctccagagaagcttgaactttagcttctagagttgctcctgacctcatactttgctattgcaccactaagctgaaaccaagagttgaaaccaagctttgggaattatacctctttttctggatccacatgccctgtgatataaaaataaatgtcggccaggtgcggtggctcatgcctgtaatcccagcgttttgggaggccaaggcaggtggatcacctgaggtcaagattcaagaccagcctggccaagatggtgaaaccccatctctactaaaaatacaaaaattagctgggcgtggtggcaggtgcctgtaatcccagctactcgggaggctgaggcaggagaattgcttgaacctggcaggcagaggttgccatgagctgagatcgtgcactgcactccagcctgggcaacagaatgagactccatctcaaaagaaaaaaataaaaaataaatgtcagtgtgttcctttgtacttgttcccctgtgcgccagccagtttgtaatttgtctcctaacccaaaaggcaaagagtaaatgggaaagagtaggaacttgaaaatgtgactccctaaagacagtgggtcccctttgaacatcattaatttgcaggcataggaaggaaataaaagaatgtggaagagaacgtctacaggaggaagtcttgggtacactgtacaccacatgggacatagccttccctaacgtactgagagtctctggcaggttatttttaactgccacattgtcaagtaaatgtttgcactttgataagtgtcctgtccactggcttgttctaaactctggtctgggagcttaccagaagagcctaggagtggtatgcaagagagagagcctggatgagtgaaatataataattgtttagctgccagccctgatgtctatgacagatcaaacaatccacttgcattgtgtttcactgcttgcatcacctggtcatgagttttcagtggaatttgtggaatggattgttctcacggagtcacccaatatccctgaacaatggtagcatacattcttagttttatataagagctaataaggaatgttccagccacccgatcggaggcagagagctgttgctgatgcttgcctactttctttctttctttcacactctccctttctccttctcctgtctgaaggaagaaagaagggggcaggcagggaaggaaaaaagatccattatgtagaggtcactagaagagtgacaccacaggttggagggaagataaatatgaaatatggaaaataaggggtactctgtggtttttcccttcataaaatttgcttttatttatttattggttcttcctcagtgaataaccttctagaaaaaggcatcaggctg

SEQ ID NO: 42738 - DNA, 984 bp, Homo sapiens
tatggttcacggtcacttgatgaatggcccatcatcataaaataagcagggagtttggctgggagccatgccacaaccattttattggaatgactttgttgtcactgcatccccacactcatctctctcctacagcacagttttgagtgattgaagttagtttgggcaagaattccagacagggaaaagcaaataagtgtgtcaggaggtcaaaagagaagaataagccacaggcggaggaagaaatgcggagctgataattgaaagataatggatgtaggggtgggttacagcaacacagtgggagggggatccagacccagcgctttctcaggcatctgagcgagacccagggttacaactcatcttacaagatctatgaagcatggatttcaaaatatttgggccacccagtatggaatttgggcaaatggcactattgaataaagccattgacaaattactttcctttcatttccttcactggcaggatcttctgtttatgcctcctgagatgcaaaactggaaggagtaaatttgctgacaagtatccatgtgcagggacagttgatggaatttttatcatgcaaaaatagtcttggatgatgggttgagagattgccaggaatctctggaatctaaccctcagctgagcatatagaggtttcattttaaggtggtatcaaggtgaagaacttataaaactaagctgtattgattttttttctttgcaaatgtttgaattttgtaataggcattcattcccagcgaaatcttaactaaataggaggctggaaatctgtgacgtagtggaccaaggttaggttttaaaggtaggactttttaatcagacagctgactctagaggtttatacaagatcataactttaatccctccatgcccctgttgtcttatctgtaaaataaatataataatcatcatcccaaaggttataagaattaaagcaaattataaaggaagta

SEQ ID NO: 42739 - DNA, 1398 bp, Homo sapiens
agacccatccagggtcctgcagataaaagggccagagttgggattagagcacaggattcctgactcctaacccagtttactttcttctactacaatataccccatttacgaccccaaataggaatgttcaacagtataaatgtaatgatttaggatgagatgagaggtagatgggaagaacaggaggaatcacctctgtaccctgtggcactcattgcaacccatggaaatgtttctgttttaaagtccagcatttagttctggtgccaaaacaatgctgagtaatttcgtagaacctgagaaccagagaaggatcctgggaggaactttttgtttatttgactttatttcattggcctcactttatgttcttttcaaaaccaagaatgcccactgggttgtgagtaatgacaatttccagacaatagaaaataatgcccaaacggctttgtttgagagattcttgacgtcttttgttatccacctacctttttatctctacattttgctcattgcttccatacaattatcgcacttatagagagcatatttttcctcaaaccgccaacttcacaaaacagcaaatgatttgtaggttatgttgcattaactgtgagtgactgaagtgcccctcaatcacatacccctgcctttatcttcatctaggaatgaaagtagccaggaaaggcaaagaaatcattcaagaatttaaacataaaaagttggctaaattctgctgtggtagacttctaccggatgagtttaatgttaattaaaactccaagtggagttgtttgtaaatgaatcattccctgttcagtttgatgtagcaaggtcagcttcctgctccaccggcagtgcgtgccagctctttttctcatgtgtaagctgtgaatgctgttaagcctgtaaaccactataataggttcagagattttaggatccctgaaagagaaggatcagaacacagcagtgttgagtgtcaggtttcttgggcacttgaaggattaggcaggacaagtgaagtgttactttagggacaaatgtctgggcgattctcaggcagcaggctggagaatgtgggctctgaggttagtcttgaattctaatcccagctctattgttttactgactgtgcaacatggagcaagtcattgccttcttctgagccttggtattctcatttctataaaaatacaattataataaccttattgtgttgttgtgacaatttgatgcgataaagttactggaacacacgaagccctcaacatctggttgcaatcatgatgataattaatgtatctatgcaataaatagtgggcactgctatgtgctccatgctgttctgggcgtcggggatacagcagtaaacaagacagacacaaatccctgcct

SEQ ID NO: 42740 - DNA, 726 bp, Homo sapiens
gtatttttgaatgtactctcatcacagtgtatatcaccgtgctgttcttcaaagtcagtttccccagtatttgttcaataaatgtttaccgatcactcattacgtgcaggcactatgttaggtgctaaatagtacagtgacataaaaggctgtaaacaattaaaaaatcaacgcctcttatgtcagaaaagtaacactgtgtcatcaaagcaaagtcgacttctcctataggtgtgggtatatttaggatttgagaagggaaaaagcgtgcttagcttccgggctccaatgtgcggatatacaccctctccttagcttgttagcttagggatttcccacccagttgcacacggtgtgttatctgaagtcatttaacctgttgacagtcgcattcttggaataagtaagttccatgcaggtgaacttggacaaacaatgccagtaacctttttagctgctgaagtaattggtccaaaagtttaaaataataagcttcattttccactgaatcttgttgacagagagtatcagcagggcttggagttagaagagtctaaatccctgatgaatagttcaaaaaaattactgttaaactttttgtaaacaaggtttttttagtcataataatgtttttaagataaattgtgtggataattggtacaaacttacgatgtatgcatttagttagcctcagtacaatcaaatgtgttgttaccagtgcatcaa

SEQ ID NO: 42741 - DNA, 2428 bp, Homo sapiens
atcgcttgaacctgggaggcggaggttacggtgagccaagatcccgccattgcactccagcttgggcaacaagagcgaaactctgtctcaaaaaacaaaacaaaaaaaaccctcaaaacaataaaaaaacaaagaagcttatgtttgattcatctaagaaaacattttgaatgaagaggtgattccccattgaccttgaacttcctttgggaaggaaatgcaccggactactttggatgcccagcagacttgagtctctgcagcagcctctggaaatgaaactctgggctgcattagtggctgcttcctccctcctaacaaaaatggtgatgaaattaagttcaccaagacccttgggcccacactcccccgaattcaccgtcccatgtttctgagggttaacagaatagtttctttttataaactagtgagatgacattattagaatggaatgggatggttggctgacacacttgctacctcagtgtcagatttctgtgaccttatatttctagattgaattgcaagactgtaactcacccaggatttgcaagtcaatgatcttaaaagaaatactttgtaatgaacttttttaagtcctctgaaaggatacaaaattaactctattagctattaataaaaagggttgtgcaaatcagtgccttttccagctcatggttacagtttataaaagaaaataatttcttggaatattttcactaccacctcctcacttccttcacactgttttgccacctctccaccccctcacctgcctgactctatttcctgaaaaagcatctacattcttaaagcagtttgagattaaccacctgatgtctctttctgactcttttaaagcagtttaaagaagcaatttattaaaagctttaaaagcaaatggaacagaactccctatttttaaggcaataaagttgacaggaagggttgaaacttttctagaacataaaaagcatatttttttcttataaattgacaatctgcaagccagattgtgtagcacgaaggtgccaattctcagatatgaaattgcaaacagcatgaggaagacattatatcatctggattccagtctcagttctgctgtggtctggccatcataccacggtgctactcaatctctctaagactaaatttcttcttaaaatggaggagaacagttccatactgagttgctataaggatgaaataagatagtatatataaaatgtttcatcatagtaaaatattaatctttatttcataaggagcttctattgtacagtctcatgaaaagttacctgaccacattctctgatgattgctctatttaatggcactgatttgactcatttttgtaaatgagaacacataggttttaaagcttctgattataacctttctgctaagaggaaatgtggctttaaaggacagtaccaactaggcccaagttcagaatgggattttgtaaaaaaggccatattctctggcgaacgtaagttgaaagagttctaactttgaaccatgttgaagctcattggtggaaggttgagctccaggagaggaagctcggattgcaggaaggggctctctacgcaagtgtatttgcaccatctggtgtttttttgttccaaggactggtcaggttatataggcacatgtgacccaggctgagcaatttgaaaacataatgttctttagacagcacaatatgctgcctctgggaaagttatgacatcaaaagataactatcaagtgggcaggcagtgggaggtgaggacaaacagaaaaggtgcagtgacctttttataggcaattgcaaaactggtcttgaagctcaaggaactcacctctgtgcataaaagtgtggcttcctctacctctcctggacacagaagacaaatgagaaatatttctgtgccatggtaagttccaagaactgactttcaagacacaaaaaaaggcccgatgctgtgctctgtggttaactcctgtatgaaggggcaggaaggcagtgtgtccccaccacgtgccacaggaggaaagcacaggagctgaagtggcagccagcatggcaggcagtaccactctatggttctgtgttaggagcgtctcgtgtctgaaatgttacctctcacctccacatgtctcctgaagagctgtgaccaccctcccatgccccgctctgctctcccttcattacttcactcatcctggtcatctgctctttgaagttcttaatttgggcaaagggctggcagatgcctgggacatgagtacaaatcccaaactgcacttccgtttgcacccaggatgagacttccctagaggggagatcagtataactgagaactgtggtaacttacccttctaaacattttttccacttgagcaagtggttgagaggagaggaaggaggcagctgcag

SEQ ID NO: 42742 - DNA, 3694 bp, Homo sapiens
taggtactctttgcagtcaccttgttatttggaggtttggatttgtttctactactcccacctcctacccctcagggagcagtgctgtgcagcggttaggagcactggctttaaatctgatagaatttggtttacaaccctgcccgttctgtgagatcttggccagtgacttcacctctcacttttttatctgggaagtaaagacaaccatccacacttcatatggaggttgtagccataaagacaacctgtgtatagaaaaaaaactcagccttgggtttggcacactgttatcaatcatctcattcataagttcaaccatagttattgagcaggtgctggcaccagttctcagcatatatgtgctgaatggaggcatttctatttttcactaagtagttttccatactgttagctgttttatgagtaaaagaacagatccaaccgaggagggtttggggcttacgtttctcaccagtgaaagttaaactaaaattagaccgaaatccaatttgtcagggggggaaataaagcaatgggaaaaggtgacttgctaataacgatggatataaaactttagtacggggtggatgggtgagaggtcactggcaaggctcctctcctgacctccagaggggtcattttggagaaactgctgcctgctttatgaaggtcaaagcacccagaaatgaaaggacttagcctcaggtcacaggtctagtaaaccacagaatgaggaagagaagtcaggttttctagcaccagccaagcctgctctctcagggcatacataaaaatagaaaactccaaaagccagagctcctttttgccttaatcttatattttctttcttactggtggtaggaaatggataatttgggatgttcatgttttgttagatgattctcccttctctctctcacacatctttccagttttcctagttttccagttttcttcctatgacagttttttttttttcccctcaaagtgtggtctttagacaacttgcatcaaaacggctgtggtgtctatttaactcgcaaatcctttgtacctcttcctacataagactgtcttgagggaagcctgccttttaacagatgccaacacccactgaaacttgcagcctctagccctaagggagtggacatgctcttctctggctgggtgaggtcaaccccatgaatctttcctgcctcattggcccatgtaagagacaaaaggatgagatcagtgtccatttgagcaactccgtggttattcttcaaagtctctagcatcgtgcctttccttggccttgatatataggtaaagttcaaaattcaaattttctacttcaaataaagtttggggatggtttttatttctgtgaactccttcagaaacattttagaacacaacccaaatgctcagaaatgttaaaacacacacacacacacacacacacacacgcacaccagtacttctcagcctgccacctttccaagggcagagcaacctgcagcagtttctaaaaatagacctttctgctacaggtcactaagcaggaatggcctccatgtcactctgtttacagtttcacatctgacaccttcataacaactgtgctgacttgatgaggcatgaggaccaacatcagtctgtgggaactcctgagaaaatgcaacctggggctgtggctggtgtgcaatcggtggcatccccacaaaatccagccgtgtttggattcaaggccctttcaacctttgtttgccattcctcgtcacctttccatcactgtctcaaagtcaggggcagaggtcaaaaactccgagtcactccatgaggtagcaatgaatataaacatgagctcatgttcaggaatttaagactcaccgtgttttctttcgttttgtttaatctgtcttgcatttctcctctttgcaaacttgtgggtttacaatgcatcatctagctgcaaatttaattttaggctctttcaagaaaatgctcagaaaaggcgaacttatctttgctatattcaggacagccctgcaacagtgagggctgtgtaataattcatgcacattcccgtcccagtccctaagtgtgcagactacgtgggtggtattagaattaaaatttcttgggattaacattctaaaattaagaaatggggtcaaagaatgggggcacttgacactaaatgtacatgaggtgattggactggattactgagcattcacagtcataggattcctagtaagttctgaagaagtggaccaattgttatcagtttaggatcctacttacaggaatcatttttgatttgcaaacttagcctgctatctttaaataaataattttagtaagctctcaaaatgttagctttgggtgggtgtctaagcattttcattctttgatttatttctcacaacaccagtaatagggattattactactctattttacagacgaggagatagacttgcaagagggcagtcttatcaaggggatacatgtgttaagtgtgaatttaaactccagtctatctgatacaaaagcccaagcttttacatcagtaaaaactagttcagttgagctggttttcagtgattgctgaaatccctgaaccaatatgggttcttcagcctctgggagaagaggagttgggcttggccaatgcttttatttgctttgctttaaagaaagcacacactgggcccttttgttttcccagcagtgttgattcacgttcactaaataaattagccttcccgtgttgtctcactcatttgacattagcaagtttacatgccaataaaaatagaaatgggagaaacaatactgcaagaagagagaagtggcagaggcgttagagtgcaccaagacatgaacacaagctcatcattttctacactcctttcaaaacaaaacaaagcaaaaccccacagcttgattccaatcacagtttgttctgtgattttatgtggttgaaatgcctgattaatactgaaatgttgtaacattcattattttgtaagagaatagttgagacttccaataagattttatcatttctcttccaaatagtggaagcctgataaatgatgttaggattctgtactagtcttactagtacttattcatagatctagaagtctctgtgtccattgtgagatgggctgtacgtgggtcaaatacagcttctgaagaagttgagatttgtctttgtgctctgctattaacagcatcctaatgaagcactcaagctactcccatcttctctctgcttcctccatactgcgccccccagcccaatctccctaaaatctttccttcctgagaattgttcctccatatctgcctctttcctggatcctcatccaaacttgcctttgcatttcttactccctcagagccttgctaggagatgatttgctaatctttgacatggctaagaatagtaaatgtcctttgagaacaatacaatcttgcactaacatacaacgggaataataaagttactattcatattttaaagggcaattttgcaggttgtcaacatcttaccctaaaggagtgagttcccaatggtgtaatctcagtgacaaactgtataccgtgataggtgacaggaccttcaggtcatgggcagaaagtgatcttaataaaggctgaccttggccactgcagcctgcatgttctgggg

SEQ ID NO: 42743 - DNA, 1857 bp, Homo sapiens
actactgctggtagaaaataatgccactgtgaattcagaattctgtgtgtgtggggaggggggcatgctccctttctctcttctttctgtgcctaaaaataacctgcaaatcttgttcaaattcttttgcaaggaaatttataaattgtctgtgtattctataattattttcccatcatgatggctctaaggaaaatacatttacatacccataaactcagacactcttggagtcccattttctttctgtgtgtgctgttccttttctctttctctctctctttgtgtctatggttactgttaagctgacccctacagtctggggcaaataccaaacttgaatcaagcactacttatccatacagctgcgaaggattgcggtttcagggcctcagatgatagatttaagtaaagtctgtaactggatggagtttaggaaacctgttatgatttcatctacaaaggcgggctgcatcgcaccccactgtgctgaattttaagatgcgatgtggtgttgttgttttgtctttttttatgagcagcatctttattataaatgatctatttttatgtctgtggtgatttttataatactgaatttcattgttgagaacaatgactgtagaaagatctttctttattgttcctgtctcttctcccagtgtctggaagaaactgttgcttgcaaaaaacatagctaattaaaaattgaacttaattagctacaaagaagcccgactcgccagggctgggaggaagggcagataaagctgccgacgctgtgttcttctttaccttcgctttaatggtcttcacagcacgtcgtgtttatgagtcagaggaccctagagcgacacttgttggggacgggcaggacaccacagcacgacaggcagctcctgcaagtggcggcgggaatgcacgccggagtcggcgtgccagcgcggtggaaaccggttctcaggttctggccgagtggacttccccttacatcagcgggccagctcctgtcaggcaggcggccggcgattggccgggaggaggcagtcattcaaactgccttttgtgtttggctaatcagggcagcccaggttcccagcggaggtgcgtctgtggtgtcagacacctgtgtctcagctctgtcttcctcgggctggctcctgcggatccttcctgggccagaaccgtgcctctaggccacctcccccaagccaccaagcccccgcggtgggccagccttggcccagtgtcacgcaggacagaaatgaccaacagataactgaggacaatggacctgcctgggcatagacttccttaaggtaagtccattttaaaccaacgatttctcgatgacattatttctccgtcgatgttggcagaaatgccagcattgggaaggtaaactaaagagaggtagggaagttgttcaagttaggcctttgtgatgaaatcaccaaggttttgggctgtcagatatgctgacaaaataatataaaagaataaagaaacatgtacatggggaggagagagcttgacaaatgactctagtcctctcaggcaacgggcactttttcctatttgatgagaagctcaaatgataacagagtaaagtaacttttagttaaggccaacaaatatatatgctaacttgtataataagaccaagtcagcctgaacatcttggctccctccaatcatgcaacctcaggatttacagcctaattttaattataacttatttttaaagctatctttaactttcttatttgggatatgaaggcagcttttcttttttaggtttgttcgacatgggtgaatcaatgaattgcacttcaacagcaaaattggattgtattg

SEQ ID NO: 42744 - DNA, 1261 bp, Homo sapiens
cttctgcactggaagcctggctttaaagcaaaaactctggtgttggaatgtaaatgagccccaccctgggaagctatggctgctcagaaacacttggttttttccaagtaccaaagctccctagtaagcagtagagctaccagtagactctgcccactaaaacatgtgttccacattgcccatcagccctccaggggcgggggtcccagcaatcagcctctgaagggaatctccaagttcttcccttatctttactctcacagcagtggaggcacagtctcagtgacctgatacttatgcatttatttctcagttgtttattaatcgtggatcattagttcttccatctgaggtaggtcatatatcattatcctagtgtggaagagagagagaaaaagaatgaaatggaagaatttgtccaacactaccaagaagttagtgagaaattagaacctcaaataccatgcggttctccttccctttttgtctttctgtcaaaacggaaatcagggatccttaaacctttccctgagcagttctctctgggcactaaaatgcttcaggccaaaaatatgctggttctcttaactggatcactctgtgactgaaagagagagcattaaaacaatgaaatgaattgggtgtgtgctcacctgaacaactcaaaaccccagcgggttgctggtaaagttttcctgaagcctaaattgaggacagcaccctctctcctctggctttttcctagaaagacctgatcatttagtttataacaaatttcaaccctggccccttgaccagggaggccagttgcgggtgagccgtctgaaggtggctggcctgcattgcctccgaaggtatttcaggaatgttaatggtatgcctgagtggaggccgcagagctccgagctcaggcctgagaactgttcttgtggccatctgttgtggcccaggaagtctcatagcaacagcttctcaagaatggtgcttttttttttttttttaattaaaattaactcacacaaaaccaaaaaactgctccactgctcaagaagaatcaggacagcattcagattttttctacacagtgatgagtttttaaggaagaaaagcccccgcatcctacattcctgttctttaaatgagcaatttgtacttggtgttgaggtcttaattttttttttttctcccccggggtagaagtctttctttggaaaagaatggaggtgaaaacaagtttccaaggctgtggagaaaatagtca

SEQ ID NO: 42745 - DNA, 649 bp, Homo sapiens
ctgattatgcttgggacagagaagcataccattagactattgaaatcactggaaagaaagcagaaaactgtggtactttcagctttcacatgatcaaggtgttttcctaggatacaataggccactgaagctacacttgatattacattaataattcaataaagcacattaattaactaccagtccatggcttcagcagctaatagcacctaaagaaaatgtacttcaactttcttatcaagaaatggtcttgataagagaccgggtgactgtaactttggtcattgctctggaatgttcctgatggtgctgccagttttcattgcccataggtgcaatatggaaatttttataaatgctctcatttgatgcttttacagattaacaacatttttatattgtattgtaactgaaaacaaacgagtatttttcttatctcacctgtagaaaagggagtggtgagaattcaggagttaatattgtaaaaatacctgagataagaaatacatgtttaagtattactggttttgattgccactgaatcctcatgaagcaaccacaaaaatcaaacagaatcagggactaggaaaagtggaaagtctgtatttttatactactctaaaatctattaggttggtgcaaaagtaat

SEQ ID NO: 42746 - DNA, 2298 bp, Homo sapiens
tacatagttcacatttatttcaatgattaatattagaagttctttggtcgttatttagaagtttggtgatgtttttgtggccagaaatacatcataggaatttaactcttgtttctatcaattagcctatggtagaattggtttaactagaaatcattttgcttaaagttgtagtttttaagaacctaccaatgacattaactgaggacttactgtaattgtccaagaattatagcctttgaattcattcctggatgagagaaaagatatttctatgatatatactcctatttaagaaatcaggggttttccaaagaaagaaaatatcagtgcttctctgtatgagcccactgtatcaagaaaagatggacccacagaggttgaaccaaaactcttgcagatgcaataggcacaggctctctgtttcccgttgtttttctaggtctaatgaaaatgtgaagactgagggcttggcctcaccctggtaatatgatcaagaacggaactgtggtagtaaaaatgagaatgttagaagaatcattatattcagggaaaagaaaggcctcaaaagggaagattactctgaataattcatgctccttttctcttttttcctgtgtgaaattcagtgtttcctttataattttttgagaagaaggctatgctcaggatctttagaagctggtggtaacttcacaatcactggctccatcaggcaacgagagacttgctgaaggagaaacaaactgtgaaggtaaagaattctacccagaatggcaactctgtgtgctttaagaatgaatccaagttttggaagttgtgggaatgtgttcagtcgaaacttttcaattgcttgcactggggaaaccaccctcatcactaggcctggggattatgaaccaaaaccaaggactccagtctctgagtcagggcgagtgccttgggagggaggatgaagggaactgggctcagtgcctctcctaaaatacctttcccctcctagaggtcaggtctggcagggtttaatgactcaattcgtgtgctgagtggcatcttggtagctccggggaagtagtcaacaccacccaacacaaactgggattggaggttaggtggggtgactatgagctggacacctaagaggttatcttcttggagaggtcaaagaaagcttttgccaaacctgttagatgagtcaacagatagagacttccatctctgctttcgttcatcctaattttttaatagcaccaaatgtgtagaaaatccagaaatgaattatctgatgttgtatatttataacagatgttagatggttggttgattagtgttagctatttccaatgcatgggttgcctctgacataagtattgaattaaatcaaaaatatgtttatatatacctactatgtacccaaaaaaattaaaactaaaagtaaaaatataaaatattttgagtaagcagcatagcaagaccctgtttcaacaaaaaaaaaatcagccagatgtggtggtgcacatctgtagttctagctactcaggaggcgaggcaggaggatcgcttgcgcctaggagttcaaggctgtagtaagctatgatcacactgctgcattatgcctgagtgaaagagtgagacctcatgtctttacaaaaagttttcttttttagtcaaaatattctttcaaaaggatctagttaaaggttaattttctggcatacaaagctagcagaccaaatgggttcaaaactttaaatagcataattcatccaggaagaccattcctttttattttttcctgtgcctttatctgcaaagctctaaaatggccttcaggaataaggcaaggtagctaatatttttcaagcaaattcaagagcaagatagaaatgaaatgatcccatcttatcttttccttcctccgatacctctgcagtctgaccctagggaatgagtgctatgcggatcagatcaagagaggtgatttgtttactacttctgaagaccctaaaacttttgctaaccctaaaagtgacctaacctcttgggaagggaggggcattcagtctcgaatgacacagaccaaccaagaactcctacggaccagtaagcccttaaccgtgtagataccgaagtgagctttggggagagagagaatcgctatcccccagacatggtaaggcagtccccttgaggcagtcacaagtcaactgctcaatctttggctagtgtccctcagtagactagctctagttataaggggatgttctaaataaccccaatggaacaatccacagccac

SEQ ID NO: 42747 - DNA, 1621 bp, Homo sapiens
gcttttgttactgttgtatcgttttattgtggcaaacagacacacacatactcacatacattaaatttgtcatcttaaccagttttaagtgtataggtcaataatgttaagtgtatagttcaataagtttaagtatatcaaagttattgtgcaatggagcttgataacttttttatcctgcaaaactgaaactctatacacactaaaaactccatttccctcttccacagcctctggttgcgccttggttttaaaggcttccaggtggtcgagcacggtggcttttgcctgtaatcctagcactttggtaggccgaggtgggcagatcacttgagcccaggagtttgagaccagcctgggcaacacagtgagaccacgtctcaaaaatatatatattaacaaaataaaggcttccaggtgattcagatgtgcctccaaccttgacttggagggaaggattcccacctcaaaggggttctaaggattttacagttcttaccagggtttccacagctgccaataccatctacaaataggtaggatgggttttttgtgtacacagtagtactaggacttctgatgaacttgagtacagttagcctctgcttcaggcctccaactgtggaaccacctccacttggctgcagctttacctatgaagtactcattcatgccatgtggcctggctgggatccatggggtttttttaatctcctatctctctgccatttatagcttgtgtttgatttcttgacccacccttaataccagttgagggtggggcacctgggaaggtgtaccaggaagctgtggcattccaagagttctttggacttggactgtcagaagaaccagtcatctggaagagagcccagatccatatggacttcctgcaccagcagtggtgaaattcaaggctttgcctggagtcctggactgttctatggatttggctgctttttgtcacatctacaataattaaaatggtgttttgtgatgtttgtggctgtttaagcttacctattttattaacttgattcctggcactttcatctgtctctcatgatcccaatagaatagaaacattgccctgttctggtattttccatgagctacctgttgtgttcatctgtggaaaacagttgttttgagaaacagattcaagttgatggagctaggacctggcttgcatcctttttttgtagcataaaattcaaaacctctctctcctgtttactggtatatgtctaatctttctctctgccatcaggcgtgacatcctgaccccacgccataccttcattccctgataagcgctgccctggtaagttccactgcatcagtgctgacctacctgacctggcatactacagaaatctttaagtgcattaggacgttccagctgaacacttttatcacaaaagcaaacaagactgggtcacccttaggacccctatggattactgggaaaaaaagaaaattttatgaggaaaatctggggttaaagtgttgttgacttacggtggtacctctaaaatcctttaaaaaagagtaattttctgcattgtcggtctagggtttaagaaaagtccagtgataccccagtgtcaaagctgcagaa

SEQ ID NO: 42748 - DNA, 2576 bp, Homo sapiens
gaaagatgaaacttaaactagcaccatcccttcctttagaatattaactggacgcctatatcataaatgcaaaacaaatgcaaatggatatattttctaaaattccaaagtttgcaaagctgaatccaaaatctctcgaaattacagtcatgacgaccgaaagaatcacgtctcttgtctaatcagagacgatgcttatggaaacaaaaacaggcccggaaggaaggcttcagcggcattcaccaccacctgcatctctgctgtgacttacactgagaagagggcatgctgagaaaaaggatggttattttccttgtaatgcgagctttttttttttttttttagctgtgaactttttaccttgcttcattcatgcttcatttgatcaattactaactgtatagcctctgaaaagcgagcgcgggcttcttaaagttgatattttgcttttggattcctctgcattttacaacggggggaggttaattaaggcacctttctgattgaatgggcagagggactgagggtgtgtgcttcggtccggtccccttaataccgtaaggacccaaggaccgcggaggggcgagtggagcgcgacgcttccaccccagaatccgttttcaaaccttagggagccttctttgccattgaaatgcaaatccggtcctgagctcccgggccaatccgggaggcttcctgtgggattacctggtggcgagcgagcgccgagccagcgccgagccagcgcggcccctcgggtgcggcgggcgcggggtggactgagcgggcccgggcgggacgagaggtgggcgagcgccccgcaccctcggcgcgccgcgcgggatcagcgtcctccagccgcgctgccccggcccaccgtgcagctgtagccgcggcgcggtggcgcggtggcgcagggcgctgctgggccgcccattgttgagcgcgttgggccccgccggcgatgccgcgcgccgcctcctcggagcggcggcgaagtttgaacttggcgtcggcctggagccccgagcagcccgggggcggcggccgcgaggcgagcggcgatggtgagtgaggagggcggctgggcacggagagggaggcgggggccggccggctgctttctggagcgcgtctatttcgggctctgcggcgactctggaaagccctgtctggaggatggctcccaggggctttcacggccagcaccccggctgatgggggcaggtggcgtgctccgagggtctcctgacactcctaggccttggctttttatcagagaggcagtagctgccactccaagaggaaaataattgttgattattgacagcatgaaaacttttcggaagaaatgatctgtgaaatattttaattttgataaattgcttcccaccagggcccctgctgagttgagaactccttgcctttcttaattttactggatttgtttctgtaggaaaggctcctgaagtgcgttgaggggcacgcctacccccaacccccacttgctccagatcttaagacagttacttaaatagtgtgttccttgtgctgcagcaacacttaaatcatgaaaatgaaattctacctgacgctcgctttactccgaattgccagaggaataaaacttttgctggtgggggaggggagtggttacaaaatttcaacacctggagcactctctgggggtgggatgtatttctcttcctctaggatgtattttggcattacctttttcccctctccctttaaatagtagtgttgttgtggcgcactgtgtgcacgggagcttctgcactgggagcaaatgggtgccctgcatgcgggtcatctccatggagagattgctgtgatatcggggggtgcaacaggaagtcctagcacagaggctgccagagagagttctgtgcattttctgtttttaattagttgttttaaagcctagttaaatgtccgtttccagttaaaagcaccctggtcggatatatggctagatctttcccccaaaaaatttcaccagaagttggtttacattttaaatttattttgatggttacctttttttttctgattataaaaatattacacaatcgttgcagaaaaggtgtaatatacagagaaagaaataaactcttataacaacatctatgttttgtttgctaagacctagtttttcacagaatcctagtcatttgaaaacttttcagctatggacttttttttttctccattgctaacaatcctggtttaggaactaaagctaggaattgacaaggaaataaacttacttaaaaaaatgttataaccaacaataacttattcacattgcccatgagttggaacagaatttattgtggcaatttctcttgaatcaacttcccacatctgctcccagcaaatggtttctgtttgtacagcctattttgtaaatacatctctctaccattaaggcgaggtgcccaaacacatacccctttccagtgcttgtggcttggctcatatggttaatatgtttattggcttctgcatcagaacttcctcaccatacatttgataaaaccctggagaaggttacc

SEQ ID NO: 42749 - DNA, 1517 bp, Homo sapiens
tgattttaaagtaaatgaactgattcatgggaattaaaagttttgcctgaaaggtgggcagggtgtgtgtgaagagtgtgcctgagttttctccacttttaacctagtgttatttttagaatcctgtcttatgtgttaaatctggttacatttttaaaacatcaacattctactgtctcttcaatgtttattcttgctttcccttttcatgcagaacccatacagacctttgaccaaaatcaattattcttgtaagttctgttcgaggatgtttccctggagtccagcagtgctgaggttttgctggtgacttccagaaggtcaggatttcatgggttgccgcttcttctgactttctgtttgacagaagtatcctgtaattctaaccactgtgtgacctcaattgccttgacaccttcctccccttctgtagtatcacttgaacaggagctgtttcctcctgcaggatcactgagaggggttcactttctagggaaggtcatgtcagaaagaagattgggaggtagagcctggtggctgggcagtcttcaccttgcctgaatgagcaatgcctccatttcacagccttcagcttgtgggatttcttcatgcatgtcagaaactagttttcttatgctgttgtaacacccaaagaaggaataggggcatgaacaatggtcattcatttattcagcaatcatttactgtgtgggaggcatcccaggaactggcgatgggttccctgccctcaggaactcgtcttataagaggcaaaataaaacatgttaataagctagtgccattctgaaggtgtagagtacaggggttaagaaattaagtttgttgtaaagttaaacatacaccaacctatgacccaacatttccacgcctaggtatttacccaagataggtgaaaacaaatgtccaccaatgacttgtacagaatgttcatagcaaccttatttataatgaccaatacctggaaacaaccctacatccatcaacaggaaaatgggtaaagaaacagtggcacatccatacaatgaatacgactcagcgatcaatgggaatgaactcttgatacaaaaacctggatgagtctcaagagcacgttaactgaaagcagccagatacaaaataataataagcaattctattcatgaagtgctagaataggcaaaactaatctatgacagaagtcagtggttgccagtgggtagggactgactagaaagagataagaagggattttctggaatgatggaaatgttttatgttttgtttttcgtgatggtttcataggtatacacaattatccacacccatcgaactgaacacctaagacctgtgcattttattgtatgcaaagcattacctgaattagaagaaaaacttaggttctagagttacacaagagtatacatcccacatctgcctctaggcatatattaccctggacaagatattaaataaatacctctgagctgcaagacattggacaataatagaacatcttc

SEQ ID NO: 42750 - DNA, 702 bp, Homo sapiens
tgctttgctgtgcaaaagctccacttcagtcttttagtctgactcacaatagacgcacatggttgaagttaggagaattgcaggactgtcacttgaagtccctctcagcctcttcaccatcgcccccagcctctttccctctaacattaagccctttgtgtcggttcccatggttacctcctcactactggcagctggaatgtgatagtgagaggaggctgcctcccctactgagccaggtctggctggggcggaggccattgatccgcagctggatttgtgaaatggggtcacagtccagtaccttctctttgtcgtgggttctatacctttcccaggcttgacatatcagggttgcagtgggaggggacatggtgggtgatggactgctcacaggacatgtcctgtcataggctggcctggcctggcgtccctgacctgccaaactcctccctgaggtcacccttccatgtgtgaatgcccattgagggggaaggggctgctctgcttggtcaaataaaaatgatgactcacttctctacctgctttctgctcagattctgttcccaataccatctgttcttaagttagtcaacattaacaagggtgggctccagtctggaaagaatttgcatcaaaggcatgttttcacatccagcttggaagaccaggcaggctctgggaactgggggatagcatagg

SEQ ID NO: 42751 - DNA, 6347 bp, Homo sapiens
gagtgatgtggaaaaattaaaggcatacatggtttgatatgtggttgatacctaccaaagtatacaaagcccagtaatcctaaaaggaatctaatggggtaggtagtggagagggtgaggcctttagccatagctctttctactttttaatttaatttttcttttcttctttacaataaggatgattattgcctcaaatgataagaagattaactgaattactgtttttaaagcacaaataatctggtacataccatgtgcccagtaaatgtaagtttcagttctacgggtaaaaatttaataattattgccaggcactgttctgattgctttatacatattaattcattcaagcctcacatctaccctttgatgaaggtgctattagtattcttattttataggggaaaaaacaggcataagaggttaagtgacctgctcaaacaccttcctaggtgacagagccagaacaggaccccaggcagctggctccggaatccacatcgtccatatacattacacagcctgctgcttgttggagttgtcttaagatctaggctctgagtgcttgtagctaggggcacaccgcttccatgaagatatcatctgttcactataaagcccttgtgagagcccttggttttcttatgcacttgtcctgggctactagctgtgtcaaagggctcagtgggtagagggactgatgtcagcagtaaactgaagcagattaatatttattaggcaggttaaaagatttggcaggtcatttggctttttctcctatccaccctttcctcatctttctgcaaggttgacatagaggtcattggctaagatctggagataattaagcttacggtttcagaaagagtcagaaatatgctgaatgttactggggtatattgtacacctggatttgtttggcaagtttcagggggaaatcaagtgaaaaaaagcagcagccagagcaggaggtgcaaatggacagaggtttgagacatacaaagtgcatctctgcagagctgaagggttatgtgtggccctcctgtaataaaacaagctgtagaccagggtaggtaagcagaaagacaggaggaggctttaagtacaaatgaatggcatgcctatgactaaaacactagataggatacaggcctgagggcatgcagagggagcttcctagatggtaaataatgacttaaaaaggaaaaaagatgagtaatgagaggacaggacccagaaggttaagacttaaatgtgtaagttacaaaaggtcagtaacaggaacaagggggccttttaaagaaagggtaattcattgagatgtctgtgaaacggctgatcaatggtcagttatcagaaaatgaagagcacctatgtttggctaagaacagaaatctgtgcctgagggcatcacttcttaaaatcttcttcagacactgaaaaagcttctaatctaaggccttttcagcctcctggagactcaagagaaaaagtgctgagaaacctacaactatggcattagagacctgcaaacccaggagaagggggatgacaggatagagatgcaatagtaaggctaacttcatggatgaaggacacagagtagaaggaaaacttgaaaaccaagaacgtggctttaaataagacaaattgccacatgaatgagtgtacacacccaacataaatcaaaaggaatttctccaaaggattctgaggacaaacttagccctgtataaatgcatcctgtctacttaatcacaaaaagcattctgattgcctccaaacataaggcaacaaaattgcactgagccataccagctgtttgtcgaaggggctctgccacagtctcccaactcccaacttttcttgtctgtcccaagaaagcctgccgctaatgagatggatcaaaagttagggctagattctattttcaagaagaaatcaactcagagcctgatctagaaagtaactagaagaaaagaagatcccacatttcccaaaatagatattatgaacagtttaatgcccttatggatttaaggacatagaactttgttttggatgcattacaattatttcctttacaggttcctatgattcattcagcaaatatgcattgtgtgcctaccaggagacactcactgtgctaggccttgggtgtgtagaagtttcaaaaaacaaggctgaagaaaagccagaggtggaccctgacctggctgagcttatgtcttaacaacgaagcagacaatgcacaagtgaacaatttcatgtggttataagtgcagtaaagggaaagatcaggtgccaggaaagagtatttgcattagataaggcagtctccgaggaggtgatgttccagctgggagcagaaactaaggagtggtcagccaagaaatgaattgggaagaatattccaggcttagagaacagcatgtgcaaaaagcaaagagcttggcaagtttggggaacctaaggaaggccagtgaggtcagaatgcagtaaggggaaaggttgaaggaggggcaggagccacgtcaccagagaccttgcaggccaagtaggggaacctggattttatccaaaatgcatagggaagctacaggatttcatcagggaatgacatcatccatttacattttttgaaaggctgctgggtagacactggattggaggggacagaagtggaagggggaggccagtgaggaagcattccctcctggatgaaacataacaaaaaaggaggaaatggctgattctaacagacaaaaccaagcacttccctaaggttgtaacagaccatgccaaggagacacgattcctccatctcaccctcccctttaaggataaaatagaaaaatgcaaactcaatagaaaccaggaagcaaagggacctggagagaccatgcctaatggctcagttccgtgtcttttactccagtttccccagccttccctaatttgtacagtgttcaagagagccctaaggaactgaaagatctggaaccctttcttttgtattggctgaaactcagttcagaaagcagttaatgggtactattaaaataccaaataggttgggcatggtaactcatgcctgtaatcccaacactttgggaggccaaggtgggtggatcacttgagcccaggagtttaagaccagctcaggcaatgtagtgagactccgtctctacaaacaacaacaacaacaacaacaacaacaaaacattaaaaatcagcctgacatggtggtgcatgcctgtgatcccagatacttgggaggctgaggtgggaggatcacttgagcctgggaggtcgaggctgcagtgagccaagattgtgccactgcactccagcctgggtgacagagcaagaccctgtctcaaaaacgaaacaaaacaaaaagcaaataagaaagcagtcagtatatattctggagttatgaatattgggtggcaggcagagcaaatatgaatgtcctcatcatgggaagtagaagaaatatgtgggtggctggcctggctttcttgtttaactatctggaagaagaaagatcatactacagtatatttttttagcctctgctaaactttctcaggtcagctttgattcctagctcttcactcatagtggtaatattgagatatagatactggagaacagcaagaaacataaacataaaacagctccaagaaatgtcttgttagttttgccaacaagttaacttgtgagttaaaaggatataggagggaagaaaggctgcagatctgttgaacatttagcagtacagtcgacccttgaacaacacagggggattggggatgctaaccccctagagtcaaaaatccatttacaactcttgactaccctaaaacctaactaccaatagcctactgttgactggaagccttacagttgattaacatattttgtatgtcatatgcattacgtactgtattctttcaacaaagtatgctagagaaaagaatggtttttgttttgttttgttttgttttttgtttgtttttgagacggagtctccgtctgttgccaggctggagtgcagagctcagctcactgcaacctctacctcccgggttcaagtgattctcctaccttagcctcccgagtggctgggattacaggcatgtaccaccacgcccagctaatttttgtatttttagtagagatggggtttcaccatgttgaccaggctggtctcgatcgcttgacctcatgatccacccacctcggcctccgaaagtgctgggattacaggcgtgagccactgtgcctggccgaaaagaatgttattatgctaagaaaatcataaggaagagaaaatacgtttactattcattaatcaaaagtggatcatcacaaaggtcttcattctcattgtcttcatgttgactaggctgaggaggagtaagaggatgggttggtcttgctgtcttgggtggcagagatggacgaagaggtggaagggaagacaggagaggtggatacagttgtttgaaaaaaatctgcgtataagaggacccacgtagttcaagcttctgttgttcaagggtcatctgtactttattcattcaacaaatatttattgagcaactctctgttccaggcactaagctgagctggtttatctttgttgacctgtggaagagagggaccagcaagcaggcaactagcagccagtgtgaattgcactttgaggtgtacatctatagccagtgtgctgcactgctagcacacaaggggccacctcaccccgacttccacagttcctctgggtagccagcagaggaaatgatgtcgaaattgaaacctgaaggatgagtgtggataagcccggagaggatcctttagggatctagaagtagcccaataggcctggagagtgtatagtttatcccagtatgtttcacttgaactggattcattgatttccaggcttctacaatgtatcgttggttatctttaagtgagacattgtaccttttagtatcttttaagtaaaaatgggcttatttggtaatatgtttagttaatggctctaccatcaccattccctaccaaatctgggttagtaattgtaacgcctacaaaatctgtggcataaattgaacatttttgaaacctgccaaactgaaaggaaggagagtgagtggttgacagtccgaagggaatatgattccatgtgtggtttgagcaaatttacataacttctctgtatctcaggttgtcagtctgtaaaatgggacttaaaccctcattcattctctccttcataaaaaagttgtgggaataatatctggcacatgggaaagcacacttttttttttaagaaagacttggcaaatttgcctgagtcgtgtataaccattggcgcaccagtggggcaccattccccgataagatcaaagcacattgcagactttgtctatggcagtctgttttgaggctaagtagcaacttgaggtgggtaagaaaatgtgcattctagagacagcatgagttcaatgtacaggtaaggtattcaatgtacaggtaaggcagaaggaaggaagggcaaagaaacaattccagggccctggtttctgggatgacaggcttcccaacactcatgccaggactattttccacctcggttcactatgggttttttttctttttttttaatataatgaatttttaaaatgtgtgtttgttgcccagattattccagaaagagttgaagggaggaaaggtgtgcttggtgtgctggtgattctagcactctctccagcctgatttctagtttgtgtggtgcatccagacagctcacccaggtgcccaggctctttctggtatccagagccaacccatccagggcaggagggtgaagattaggaggggcaaaggttagcctggaggttgcaattaacaagaatcaaaatgggtttcaggattctcacacccagttgctaatttcagctggtcctgtagaggtgacacgtagtaggacaacatggttttgggggcagtgctggggtgctggtctctgcttttctagggtagaaaggaatcatacattgaaaatgcttaaatcgatggaatgattttatgttcctcatgcttccatctctttctggtctgcctgctcttcctgccagcccttcactgtgacagtcaccactcctagacctctgtctctaggcatctcccaggaaggagaagtggaaaggaaagagaaaagagctcagtctctggtgcccaagacattgtgcaaaaaaaaaaaaaagatggagtcgaaaactttggtttacacaaaaaattaggaagttattaaatactacaaaggt

SEQ ID NO: 42752 - DNA, 525 bp, Homo sapiens
gcttatttcatcacttacctcctatctgtacggtatggaagaatcttataaaacaaagatttatctccgaagccctctcccaacatatcttctgcatctaaaagaaaagttgttttttgtttttttttcctcgtgtttttgtttttttcagggccttttgatttgcttccccctccccacccccaccgccaaaatcatcctgtcatcttgttcttaatctattagaactgtgatgaaacctgatactctgcccagggcaaataaatagttacctctccaacctcctccaaagtaaaagctccaaagttgagtttgctgtctttgtattgcaggtattggacctactttctaaagcacttattttatctgtactgtaggaattatttcatttgctctttcctgcagaatgtaagctccttaaaggcagagacaatatcttagtcattatttctttaaaatatctctttaaaatttgtttaattttttattttcttaaatggacatttaattgtacatatttatggg

SEQ ID NO: 42753 - DNA, 1332 bp, Homo sapiens
ccagccacttttctaatttatagacataaaagtaattgactcccacagcacagtaacaggcaatgctgcttggcatgccacaaacatctgaaagcttgtgacactcctaggattgtgtccattctttcattatgtggaaactttgttctgttatgtgaaatgggtaaggcaccaagtgagactttgaaatctaatttttaggtggatgtgatatttattgtaataggacttgacctctgtactttaaagaaatcactaaccaaattttcaaagtttccttttaaatgcgtttagctagaaatctatgtatttatccctttcctattttgcattcttctcccactatttttaaaaactcatttacagtagaaaccattcttctttctcccaacagtatcctttgccaagaccatgagaacagtaaggagcatgttgttggtcagggtttcagaatacgcgtgatgtcactgagaatgtttgctcacagtcaataattgtctttgtggatgtgataattttggagatacacttctggtcagaactcaggtgagataatcttgcaatactccaaatgcagatactccagccacccgcaaggttccaggaaaggacaatgtcctgcgagaaaatcaggaggcctccacttcctgggccacttgagaagttcctgggcatgtcactacatgttggttgactcagccatttctcatgctgttttgtttcttgcggtggccacttaaccccaaagaatgaagggaggatccacagtgaaagtgcctgagtttctctatgagaccagatgctgtcgaaaccaaacatcttttcctttgctctatgggaacattttagggtttgttttgcacagctggtttccagactagaagattaacaagtttgggtccacccctaagaatcagtggctgtcttttaaggtgaggagtgtgggcttaactgaggtcctttgagggagctataaaggagaaacaacctgggacatcccagttttcctattcctccactgttaatatctcatctaaaataattcatgagtttaaatggtaaatatatgctttaagctctacctttaaacttgtatgttattcaggcatctcttattaagatactgggtctctggatacccaaggaaatgttggctttttattcttatgtggttccaaatttacttctcttcagtttaattgtccatggtagtgctggcttcattgttaggttggagttattattttccttttagaacaacatgaattttattcaccttactattagaaaaaggaataactacagccagaaataacttcatttcctacaagg

SEQ ID NO: 42754 - DNA, 691 bp, Homo sapiens
gggattacaggtgtgagccagggtgcctggccttcatctatttcctcttttaacttccatttccattcccattttccttgtatcagttagcttttgatgcaataactaaccatcctgaaactttgtagcttaaaacaacagtcacgtattgttactcacaagtctgcaggtcaagtggctggttcttctgatctgggccaggcctggctgatcccagctgggtttgctcatgtgtttgcaattcatcagtgggtcagctgagggcacttagcctaggatggcctcactcacatgtctggtggttggtgctggctgtcagctagggcagtggggtaacagggccacgtgtcactcgttctccagcaggcttgctgaggcttataaataaggtggttgttacgggattctcaagagtaggaagagtaggcaagccctaatgtgctaggacttttcaagtttctgcttgtgtcatatttgctacctgttccattgatcaaagtaagtcacaagctcggcccagattccagagatcgagaaataaagtccatctcatgataggtggagctgcaatcacactgcaagggcaagagagcagggaagggaagaatttgtgctcattttgttaactcccacacttcttttcttccactacataggacaccaaaaattcgttaagctggttaatgatctt

SEQ ID NO: 42755 - DNA, 2426 bp, Homo sapiens
actgtgcctagtttataagtgaaactttatcataggtatgtacataggtatgcataggataaaaacataatgcatatgaggtttagtgccatctgtggtttcaggcatccactgggggtcttggaacacatcccctgcagataaaaggggactacagtatagctgtaataagagaactctgccacttagagtcaagaaaatatgagaatacaccttctagatagccataaaaataaatcaaaataaaaaatatataagaatagcgtaatgggagtgcgggggctgggagagagactaagtcaggtaggtagggatctagaaagctttttggagtgggcacagacacacaatatgtgccatacagacataggaaagtggataggaaaaggggatctggcagaggtagcagcttaagcaaagcccggaggcaagagagctggatgatgtctaagcagaagctgaaggaaaggagctgtggtggaaggggaggctggagaggcaggctcgcacacaccgaggagcgcacccatgccaggctacaggctgcagcttttcaacaggtcaagaaaagccctgacatttccccaagtgccagtctttaaaactttggcaactccatatacaaaggaaatgtattatgaaggcttcttctagtcacagggcactgttactgacccagcaggcagtaaaatcccctttggaacttgaagccagatgacaaaaaggttagaaaggcaaagggcattgtcaccggaagcacggtgtttaaacagacgctgggaaaaactagggtttctgacagtgagccaagaaattccaaaggtcacgtcagcagagccaggaagtggaaagaaagaagtcatcgccatgctaggagccacacaggaggaatcagagtcacactttctactccaaagggattgaaaactgagagtaaaatgaaatggggatggggaaggatgcagagtgagggaaggaaaacaactgccacgccagcctgagggaggccagcctcattccagaaggagttcttgggctcaaaatgctgtggtttgggagctgaagcctgaatttgcctgccctgcactaagcagcatgagcctggtgccaacgggaacggcaaggtacataggaggtagggacggggattggaaaggcaggctccctggacaactctcctaagtccttcagggagggagttgagccggggaccttgggctcgcctactgggcaggggacaagggcagccccctgggtgctcttctcctgttcttaggaagaggattccaggcagctctgctaattcatcccagctccaaagcaggcagtggatgtgtggagcagtggaagggctggagactgtatggcagctgagaccaacccctataatcaatagaagaaaatgaccaggctctcatctgggtctctgttctttacttatctcttcagtttccagtagagctttggaagttttaagtgagacgatctctcaacttaaatgatataaacatcgtagtccactgttatcctttccaaaaatgctgacacagttcccaagatgtacagagtactgtgaactgtgaaagtttgcttcagaggacgtgtcctttcatgtagaagaatactgtgcaggctactcaatacagagcacagtggcaggccccaaaataaataaagaaataaagtgagctattggcgatgtgtgctaaattgaattgacgtgtttatttgcctggagtgtaagcccacccactcccacaaagggctggaggcccctgaattgcagtttgtgcctgttaatactcacagcctttggagattcagtactgagggacgtcatgcagtctggctttttccaaacaaaacctgaaaccttctcctctgggtctacccataaagagcagttacaggaagaactgcttggccagtcctgtggatctgataagactcttgttttcttccttagggttgaaggaggcctgtaccctgcctcttcctggatccacgctcagctctccttttctcagcccaaaggctgtggcacctgggcactgggtccagtagggcaggatggggcagaggagacttagtctggaagggctatgggctttttttaaagtagtgtgactgaaagtgggcatttcctgtcaaaatggaacgtagagctgaatgtgggcttggggaatgcctgggaattcatttgggctcagccctagaagaaaagcataaggacttccttgctcagagttgctgattctgtaaggtctgggatcagtgcaggaaactgcatattgaaaagcatcctggatcacacttctgattaagaatgttgaaacagggccaggtgtagtagctgacgcctataatcccagcactttagggggccgaggtagacggatcacttgaggtcaggagttcgagaccag

SEQ ID NO: 42756 - DNA, 722 bp, Homo sapiens
tttttttcccaggagaaaaatggtatggatggtcatattctataccatgtaaccctatcctaactggctacagcagattgaactgaaacaggatacttaatctaagggtagacagtccatgattgatctatggcatattttctgtgagtctaacggtggcttcctattgttaaatataccgataggcagtcctccagagcagcaagctcagacttctctgatgattaaaaataaaacatacaaggggctgatcaaagaacggatacgcaggcttctgtcttggaatttattcaggtatttgaagaggcctgtgaatctgtttgtttaacaaggccccagatgtgtcttatcatcagggaagtttggtaaacaggtggcttttttataaaggcattgggaaatcccaggtatggaaaagagcagtggttcttgaactttatgaacataccagttacttggatctaccacagagagattatgactaagtagacctggcctgaagcccaggaatcaccgttttattccccagacaattaatatgtacactcaactttgagaatggccaagatgagatggttttttttaaattttttctggagatgggaactccattgttgcccaggctggagtgcaatggcgcgatctcggctcactgcaacctctgcctcccaggtttaagagagtctcctgcctcagcctcccaagtaactgggattacaggt

SEQ ID NO: 42757 - DNA, 1775 bp, Homo sapiens
ctaaacattttctacaatgttctttatggtcagaatcagcaaactctctttttcacagggaatacaatagcaaaactttaaagaaatttacattgacgaagctgtaccacgttgtcatgtcagtataatgtggggggagaagcaaattatttgatttcagcttcaatcagttttattgtaggctccgccacttgctaagagtgtaaccctgggcaaatgatctgtcctttctttgtctttgttccttcatctataaaacaggaatgatatcacagttactatcttacactagctattattattgttgcagtacagtctactgagaaatatgcactcattatgtcatagaaatagatgtgacttattaaagtattctggcatttattggccttggaatgtccactgcaagggttaataaacttcgggctgtcatgttcctctgagtctgactgggccccagcctgcatgcctttccactgttggcaggagtctagacctcagatctttgtactttggggacctttgaacctgaacttgcaataaaaggagggcaatttattcaagaggctttatccagttgccatagaaactgatcctttttccagctttctttccataccctccagtgcagagtcactagtcagtaggtttttaaaagacactagtggatgccctcagaagcatctaaaacacctaaactgcagcctgaggtccttttgtaatctatacagatcctttctctggaacctgtaaaatgttgcaactctatgttaacaaacggaactatgtctgtgtcttaaatggggaaatgtttgtaacccaaatgtctatgcccagctgagtctacttggttcaggcatgaaggcaacagaaacacattccaactatgtaagggcccagaaaatctacaactttgtagtatccctgaaaaacttactctaagacatacttggcaaactgagaaataaaataaacaataatacattgaaaggaagcaagtaatttgatcttggaaacagcttagtagtatagatttctgggaacatttcctaatccgctttgtaagggtgcttcaatcttgtctgaaatctacaataaactaataggattttttcttaaagataagtaagttcctggcttattttcactaagctgagactaataacgcttcaattctaaacaaaatattatttgtatcttatggctttgggtcagattacccatctttccacactgtctctaaaaataatacaaatgacgaagaacaagttgtaccaaaagcactctgttattcccactctctggtcttttgcgagacaaaatgacataactgaaatagcaagtcagtctggctggggaatcaatactgagtctgtaaattatcagctgcatagccttaaacaaatcacttacctgctctttgcctcaaattcttgatttatccttcattctacagcaaagggagacaaaggggctttcccagttttctacagtttggactctagggtaagaggattttcagtaatcaatactatctaaagtgataaactgcttgtatatccaaaaacaatgagatggattcacataactggattcccatcagatagaatgcagagggacttacagcctttctaatagtgggcacagcagttgcaatcctatttgtatttttttttgtagtttcttcagtggaagtgtgtgtgtgtgtgtgtgtgtgtgtgtgtgtgtgtgtgtaatttgatctttacaattctctgaggaatgattatctctgt

SEQ ID NO: 42758 - DNA, 2690 bp, Homo sapiens
ccctgatcacgggcctcgggcacctgcgggtgcctggccacccactctcgagtgcgctgctgctgctgctgcagggtcgaataatgcagggagctgggggtcagcagctccggccggtctccgcggggagcggggccgggcaggagagcaggcggggaagccctgcttgtcgcagcctcgacggtggcgggaggcgagtgagccactgcaggcacaggcgccggctcagctagcgcgccttcttcccgctccctggaagccccgcggtcatcctgggcaggcagagcccgtgccggcttctcctccgcggtggccgagtgcgggagtgcgccgagctctcccggcagtacagccaggttgttctggaggcattcccagcagcagcggccctgcgtcttcgccgccgcgcagctcgctctcgcctgggcccctgccgctgcagctgcgggcaccggcggcctctgtccgggactgcccttcgatccgccgcccttcccgggcgccctacgggagtcgctgcccgggagtccattgcaagctgcgtcggcggctctggctgctgcacctgctggctcctcctccggctccttctcgcgccgccgccgcctgggctgctgctggggcggctccccccggcgcgcgcctcgcggggagcagggcgcagctccccctgcactgggggcggccgcgggcggctcgcggggtcgctgcagcccctcctcccccaaaaggtccctgtatctcctcttgagcaccacgtacttggtgccgtcggggtcctggcgcactgcggcgaccgagttgacgaagcccttgaagagctcgcggcggtgctggtgctggctgggggacgcgtcggggtctcggagaaagctcttgaagtggctcagcaaggcagcgttggtcacgcggcccccagcctggcacagaaagtccagtagtgcctcctggctcagctctcgggccatcgctgccttgtcctccgccccagaggtgtctgagtctcgccctcccggggctctccccagccagaggaaaccctggccgggcgagtgtcacctgcgcccggggcggcactagccgcccccatcagccgcggaggccagcgctgcccgcagcccgtgagcgcgccaggagggccgtgggtcccctccgggtggccccaaggctgagtccccgcggcagtctgcgtgagagagggcggctccgaggccgcccctgcgcgactctagcctctcgcaacgagtcctcacagcgaaagttcccgggatagggccgagtcggtttcacctgcgccctggcggcacctcctccctgcctctgggggaagggtcaggcccgcctcctcgtgtccctccgccccctgaggtctcccccaccccctgccacccatcccagaagagtcaggccggagagccagccggtaggtgaggttggcggcgaaccgagccggcagcgaactgctctgcggccggggaagtggaaggcaggtaggcgaccggccgttcctctaagtctccgccacgcaggaaacaaaagcgatagaaggtccgttcctgtcctccggtgctttgatgagttcaggctgaagccgatgggggaggaggagaagctgcaagttaacaggcaatctgagttatctttctttattaacgctgtagaggagtacttcagatttctcgaggctgtattgaggtccgcaaaactcactttgcatccaaactaaatttttcttaatatagaaatactttctgggccgcttctccggcgccccctccaaggggtccgaatacatccaagtctatactgaaaagagaaatcactctgaaaattactactgggcaatattggtttgggactttttctttcatacttgtctttccttcatacttgtctcacattaaggtgctggaaaaaaaaaatcactttgatagcttcttgcccccggcggctaaaatgaactaggaattatgtctcgccagttaaggtatttgatgtgtagcattagtttgcttttatttactctaaaatttgtgaacagcagagatttgtacagtgttttgtattggcttggtgaagtgcttcctttcagaatgtaaggttcaaaatgcagactagagctgtctttaacagcaccttttccccctaacagctgggatccctcttcctttttctctctccacatgttgacccttctgtctttgatgtgagatcctggatgtccctcactgttccttatcagtcctgttgacatgcctgagatagttttcactgtcattatctctttacctgttttagttccaagccttctctcattcttttctttaacttggccttcccatttctttctgttacacgacatccttgtttaccttcggcctctactgacaggaaatatgtctgtttctcagatcctctcatgtccactgtatttcccattcaaaaacctcgattttctccttccctgtaatttgcctctcttttctcatggactcttctcatcttttcacttttccttttgctcttctatttctgattactcatagttcctatacttctcgccaagaaagagtattgaaagtatgtgtgttggccctacaattgttgacaaagacatgttttagcatggaccaatcttagtgactgccctatagaccacattaactgagcttgattttaaatccccaaaa

SEQ ID NO: 42759 - DNA, 1048 bp, Homo sapiens
gagagaggaaaagaaacctgtcagggagacttagaaggagcagctggaggggaagaggagcaccaaggaaggaggaagaacagctttctatgccaagatgccaagttagataagacgtgaaatatgaccatagcctgttaggccactggggcccaatctggagcagtttcacaacggtggtagggacagagaccaggtcatagagtaagtggggtagagaatgggatgaaaaaagccttgagcatgaaaggaaggagaaaagagaattctagacaaggagaatatcagatcatgtaatgtaagatttgttttgtatagttgttagaagagatatgagcatgtctgtgtgctgagggaaaagagccaggagaggataagttgagacctagaggagagagtaaataattgatgaaacagggcttggggtggggttggagtccagagttcaggtagagggattccctgggacaggagagaggagagccatttttcccattaagaactgagagaggaaaaatagctattgtattcattagcataggctaacctgctataaaaataaaccttaactcgtaatgactcaaaaataaagtttatttctcacttacatcatttttagggcagtttttaaagacaggcaggcagctacttcccatgcagttatttaaggaacaaagctgatggcagctctgccatctttaacacatggttttcatatcatcaaacagcttgccagaaggggaaagatcacggtgatgtgcacgtgaaacatttttatagaccaggcatggaagtggtagacaatactaatgctcaaattccaatggcaaaaaatttcatcacatgatacacctaactgcaagggaggttgagaaatgtagcggagctgcatgtccaggaggaagggaggaatagattctggttaacagcagttcatcttggccatagctgtagatatacattcactttatttgcacatggagagcagaaagctgagaggttttatgcgtgaagacctccattttcctcatggtatagaaaaggatgc

SEQ ID NO: 42760 - DNA, 931 bp, Homo sapiens
cctgggctcaaaggatcctcctgcctctgcctcccaaagtgatgggattacaggcatgagtcactgcacccaacttctttctgaatatttttgatctgtggttggttgaatcaacacatgtggaactcacagatatgaaaggttgatgtgcaaagaaatatttacagataaatgcatatacacaggttagtatacacatacattttcttcctctgacagctgagaaggtctagaagcaaccacatccctgtagcaatgagcacacttagtgcctagatcttgtttctaataccaatctccagtaaaagtaaccagagacccttagagaaatggcaggctctaggactgggacagaggatgtacagaataaacctggagcgttttgcagtgctagaaagtaaggaagtgctcaaaacaagtaaacaagcaaactgccagtgatgggcgtatgtcaaaaggacaacagagccaactgaaagagctcccaggggccaaaggtggaagaatttgagcaacaaaataaataaagtggtattggatcatagcccaaagcagaaaacaaatatccatgagtctatactgatataagtaaatgattgaacaattgttaataaataagtgggaagaacggacaaatctcccatgatgcaggagagtaccaaataatttttatatatgctccactctcaaaaaggtggagcataattcctattcatttaatgtgggctgctcattgtgacttccgtccagagagcactgtatggaaatgaggaaactttgcagtggagaaacctgacacacattagttgagccaggtcatcaaagttaatatccacagtgatgagtcgtgttgatagtatatacccttgatatgatgtgacgacaatggcacattgcctctatgatcttcctaccgcacacccataaactt

SEQ ID NO: 42761 - DNA, 478 bp, Homo sapiens
gtctcaaaaacaaacaaacaaaaaaccatctatttttctttaaccaatgactcttgggatattcccattacagcagcttcgcctatatccaaatacatcaacttaaaaattttgcatagctcatgatgtttgacagtgtaggaacacgaacgcaagtgtcctggcttccaagtccatgttttctctgctgatgagtaggaaggcagtcttgcaacggctagttcgttatcttcctaaagtgtggaatgatgactcatgaagcataatctgccaaaattcatgataccagccaacctacagccacttctgctgattcagatgggactcaataaaacagacagaagtaaggtgaaatataatgctgatgacttttgaaatctcagcctggaaagagagaattagtggtaaagcaaattgaacttgggaaaattaacaaaatgaacataatccaataggtatcggtacatgaggtagcaag

SEQ ID NO: 42762 - DNA, 3160 bp, Homo sapiens
aattcagacggggtgaccaagcccctagcccacctaccagcgaaatccagcatcagttccagggcagccggacccgcgcccggggacgactgacccttagcccaaggctgcgggggcgtcggagtcctgaagcgcaggcgaggcagggccagcgggacagggagactcaaggccccaggggatctgggcgtttgaagactcaggtcagactctgaggcgcccgtctaaagagaccggttgtcttttccctaattcaggaggccaggctgtcccttggggcgtcgtaccgagggcagatcacagcccttccctcctcaccacactccctgtgcttccacccagctggttccccgccctgtccatcgctgtcctcaatcgcttgttgtcgtgggcccccctctccggcccacgtggggccgcagggatccacagctcatctgacacacctcgctgccctgcacgcaccgggacccctccattccgccggcccctcagacacgcagtaacaccccaacatctgctgggaaaaaaatcttccccacggcggaggagttctcagtcccacgcgcccagagtcgcacccactcgagccacccgcctgttgccgtcgccacgccctccagccgcagccccagcgcgcattcctacgggtcgccgggtctgtcgccagcgatcgaatgaagtcggctgatcccccacgtgtggctgctccagtgacacccaggggaggcctcggtccttacccctagagcaaccaatggctgccttaattcttcagcgggggcgttctttttcttcctcccaagcaggcggccgttgggtcggccgaaggcagcagcgactactacggctcttcctctccaatgggatcccctgtctgcccgcgcgccacagtgacagcttccagatgcctgtctttagtctcccttctcaagggaagcggtgggcgaccgaggtgcggcctggagggcccccatgtgggaagggaagacttgcggaagggcaattcttccagtgcggagacgaggaggccagcccagccgcacttcggtcgcccaccgctccgcctggtggtccgcagccccttccaggccggcttctccgggtggggcgtgctagtccggggctaactttccgccacgtgctgtccctgcgacccgtctcccccggtcgcccttccttctcccggcggccgctggagctgcccgcttcgtggagccggtggcaggccccggggctgggagctcgcgcccaggcttttactcagattccagcacctgatggagcagggggtggcggccagcgcacaggctgtcggcatctcatggcagcggagacggtcgtttggggacggaggggcgagccccgcggccggggccagtggagctgggctcggagcccgcccaccatcctcccgcccaccaccgcggccgggcgcgcaggctcacaccccttcctggggaagcgaatggtcccttccaggcgggtggccatgttgctctaataaagcgggaggggcggcggcgtggggggagcagatgccgctggctgccagcgggacgccggcgagcagagcgcagccgcgagggaggcgcgagggaggcgagccggagcccgagcactagcagcagccggagtcggcgtaaagcacccgggcgcagccggagccggtgccgcagctgcgatggccgtggccgtggggagaccgtctgtgagtgctggggcctcgcctgctgctcctcgggcgccgggtggtctctgctctggggcgggtgcggtgaggaccacaggggagccgggcgggtgctcggccccgcggcggcggcgacggctgtgggtgtgtgcacgaatttgggcgcgcgtctggggtcggggttaggagcccaggggctcagttacgtgatgcaacagtggatcgcctcgtcgcgcccctcttctgggaatgcgaaagaaaaaggacccctctcctgttccctttaaaataattctttgaggcgcggcgtgtctcagccgcctccctctgcccgcgcacctcttccctcgtgacagccagaagggcgccgggttcggggctttcctccagtctcccccgcgccgagggggcgctcagggcatgggaattgcgagctgaagtgctgcgtgtggcactgctgtagaagcaggtcagaggggtgggatttccgtggtggcctccccagcgcattgtgagatcccggacaccctcgggcatccacccggctgagcgggccctgcccaggatgtggacaaagccccagataacacacacaaagttttctggaggctcccttgtggtgtgggtggaaggactgaaatgttctgcggctgaaaggccgggggcggcgggctgaggaggctgggacgcgaggaagaggaagggcgggcgggtgcgtgaagaatcgagtgccccacggcgggagggaggagagtaggagggaggagatacctttgccccgagtgtgtgggccaaggcgccgcgcctactgggttgcaagactcggtccgcgccccggggccgggccggaggggagcgggactccgagggtgcggttcagtggccgctccgcatccccaagtgaaaggcggaggaaggggcggcggcggcctttccttttttttgaaaggagcggagctgggtgggaaaggcggagtcctcctgttttccctttccccttttcatcgtcgatgttcacagtccactcgccttactggctttgggggcgcctcgggcgatgtctttccctgtctatcacctcctcttccctttttcttcttccctttcccacagctgtgcagctgcaggtggtggctcgggagattttgtagttacagacgaaagacttactgagatactggaagctcggaaatcccagaaatgcaaggctgtgctctcaggctcccggctcttccccctctccccgcctaactcctccccagatacgcgcgccttttgcaccctaccccctcgggagaagttcatgggtccctttgcggattctaattcgatttggtggttcggctgcccgcggtgctttcaaagacgttttctgcagtcagaaaacacagcggtcatatcgaatcatgactgtcttttaggccttttcaactctacgatttaatgacatggctcttttaagaattc

SEQ ID NO: 42763 - DNA, 530 bp, Homo sapiens
aggtacacatgtctcacttggcattacctatatttaattcctttcacaccctgacgtaactggttatcagtttttttgtgtttgtttttttcctgatactagctttagagataaaaggacattggaaatactgcctgtttaatcagtttctcttatgttagtccagaataaggggaaatatgatttgggaagcaaaataagctcatttggaaaggcaaagttattttagtgatcttttaatgtatttctttaaggtatacacacagtcacacacacacaaacacacactcacataccccacatgggataatggataacttaaagatgtactcaatctgtccgggaaggagaaattctctcattatatgtagataaaagctgggaccacttagttcctggatttttgcattcattcaagtgacttggctttttggcccaagtggtgcattccagctatcctttgctactcttacattagcaattcgatttaatttttaatcccaaccatggaaaaattatgtgttaaaaaa

SEQ ID NO: 42764 - DNA, 1010 bp, Homo sapiens
actgaggaatagatgtgtgaatatgagtagcacaggacataaaaagttgaggaaaaaacttccaactgctttgagcctcttaattctatttgacctcctattcgtcactgttttgaagatattccataggataaagacagggcaggagggacaaaaatgacccaaataaacaacagtgagacaagtgggtggttttatgctctgcaagagacgtgatatgtcttaaatggaactgggttgtttgggacccactggacagcaagagggttttgaaatggtttatgacctcttccccacttccccgcttgctttgctcattagtgttcctaggtggctgctgggtgacgggcttttcatcatctctgatgtgggccagtgcgaaagagcagctgcaacatctgtttctaattgggtcgtgcctttataaatacttcttgcctatttgtcacattgcttccctcccaccctgtcttccttggagtactgcagaatctgtaagcgtccctggaatgcacacgtggaccttgtcattcccaaacagactttctgctggtcagcactttgtaatgttcggctgttacaggcattagtcacttgtgctcagagagagactgtggtctttggaaactgaagaaaatgtcttttttgttgttgttaattcttggcatccagttagatttaacttctcaagagtttacacagacttttagaaaaacattctgtctctaagaaaaaagtgctctagctttgtacagtttttggattttcacacttggtggttgtttgctgaaatgctgttttgctagtgattcccctcctccccctatctggggttgtaagcagctctggggctctgttcacttcggatacctgtttctggggactgcttttcaacagcgtttttcctaagggcatatgagaaatttaatttctgatggaatgaaggtgaaactctagtcccaggtaaacctgggtaggctgtagagacagaaagggggctgcaggtctag

SEQ ID NO: 42765 - DNA, 797 bp, Homo sapiens
tggaaccaggttttccatttcaactggaaacaatttctcctcttagaccactcattcaaactctgatgtccctcctggtttagggaagattacttggtaccaaaagttggctttgaatcacatgtcttggtaaatagtgataagaaatgaatttgattttccttttcttggaaaccactacttttaaaagggctcggcctttccctttgaagaatttcgggcaccctcagcacttcctgtgcacctgagcgggaggaatggagtgaggtgactctgtttgaaggatgacagagttaaggaaaagcagaagccacagttgattgaagtgattttccagaatttcatctgcaaagtcaccattcctggatgtgcttggaagatggatcttccgtgtgaatttaggctgagcttggaggagtataaatcaagggcttaaggttttattatattctcaaagcacaggatttctgcatgggtgtgcagtgaagttcatccttcccagtgagcaccctcgttcaccttttgtcctctgggccccacttgtgtttacagtacatgtttgtaaaacagagagtgacctctaacaccaagtctagtaagaggcagtgccactgtgtatgttacacagtgtgaggcaaaaggaggagtagcgcgcgcacagaaacgccgtattcaagccttggcagcacaccacggcagtaaagctagcggagcccgtccctggggtgcctttaaacccgcctgcattcacacttgcgtctttattgtcttgtggcagaatatgtatataaccagac

SEQ ID NO: 42766 - DNA, 390 bp, Homo sapiens
ataagcacagcaacgttaagagtgaaagaaagaaaaggcaagccttttctatgctaagtcgtttgctgaagatagatcatatcctgaaaagcaaaaaggattctgctccccaccagtcactttgtcgtggctgcttgcctaaagttggccttcattctggagtgtcctattgcctaacaaaataagctatttccaagaaatgggagaccagttcactaggcctagggctattcaaactgcttttttacaaccttactgttgtgtaacacaataaggtcaacaattctggcatttgatctggtatgaaggctatacttctagagttaagagaaaggcatttcatccttctcatttcatccttaactccagaggctcttaggaactaaaaaa

SEQ ID NO: 42767 - DNA, 2529 bp, Homo sapiens
ttgtggagtctcagttttcctcatctgtaaaatgaggctcctactaccagccttggggggattaagtgaattgcaagccacttaggagaatgcctggcagataataagcctcatcaaatgttgttatttaacgtcattactgtaatgctctgctgctctaagtcgagtggctccccactgacagaataaaacataaacattttagttcaaaccccttcagagtctgaatccatcctacctcccgaaacaccttccactgttttgatacccaattgtcaacttctgccaaaaggatctgtaacggagccccctagctccagcggaggctcctctgtcctcctttcaaattccagttatttaatctagcctttagagcacaactcaaatctcacctcccccggattccccccacccacccgccccaagccctgggtaacgttgccctcccccgaatttcacagcaccggaggttcaccccattcatttggcattcagtctgccgtgcaaagttagtaatcctcctggtgtccccggagaatcgttcaacctgagggtgggggtgtgtccccttctttgtgtattaacacgggctcgtagagcctccaacacgcactatagagtagctaatttgccgctgccacaaaaaaaagttactcgctgacagaaaaactggcccgaaaaggaacacagtagtgccgttttcaagtgggcaggtgacgggtctgtctgggccggagaggacgaagagggcggccccgaggttccccgggctgggggatgcgggagggtgggtctccggcgagcagcgcgcggccaagggcgctgccacgggggcggcgcggggggagcagcggggccccagcgcgtcgacgccggccgcggagacgcgtcgagcccccgcccccgcccccgcccctcaccttctcctcctcttcctcctcctcctcctccccggcagagctgtaggcctcacagtggtgacgcggggtcatccgggggcccgttaccacctcattctcataggcgcgcggaggcggtgcgcgcgggacgactcggccaactgaggagggagaaaggggaagcggatcggggggcgcgggcgcgggcgctggcgctcgagcgggacgcacggctgcggccgctgggtcggtcagcgaattagttccatgatgacccccggcctgaggccgccgccgctcgagcccgggttgggagggggctccctctcgccatagggcggcgggggccggggagaggcggggggtgagaccggctctgcccctgcccggggaaagcgcctccgaggggaaatggtgaaagggggggaggggagaaaagaaaagaaaaaaaaaaaaagaaaggggaaaggggggaaaaataagaaaaagcgagacagaggcgctgccgcgtccgctcgcggggaaggctggggagggaggggaagagaggggaagggaggaagaagtgccggcttcctcggctccgccctcgcggaccgattcctagactcgcccactccttgtaaactacgcggacttggtctttcacccttcctgttcctccccgccgccttcccggtccaacgaaagtacagagaagtgcggccgaaaggagacgggctggggaagtcgttggcactaggatggaaggagggaggacgttttctcgtggctaagaaaagccgaaggtccgtggactcattttccttgaaggagcggaagggttgcttgcagaccgcacggtgacgtcagcgtctctgggcccccactgagggggcgtgcggtggccggagagtgcgctgcgcatgcgcctggggaagaaagaagcggccgagcgctgcgcttgggggaggggatttcacgatccgctcctgtggtccagctttacagcagcttggttttatctagccctactcgtccccaggctcttagaaggattcactgggaaggggctactgatctcttgggtggagatcttgcagatttgttgacctagcaaagtattacgtgttcttaccgttgacatgtaaatagaattgcggtttttctcactgccacattgtgtgggtggagggagattctaaagggttttaggaatcggaaaattagggagaatcaaatcatgggtgcttaaggcctcagtgaaacactgtaaattatactgctgacggcgaggaacctgcttggcaatgtggcaaggggattttatccactcaaccaacacgtctgagtatttccgaataggttttattaccaggtgcttaaagaatgtgtggtgacataaatgggttttatttggggttctgttagtacaaacggtaactttttgctattttgattgttttaattatttaaaaatatgtagtattacagagttttgaaagaggaagagctagatctcaaccatttatagaagtctcgtttgttttttccatttgttttttatatagttattttaactgtcagtgaaaaaatatgtgttgagtttatttagtggccagactcagcaaactggaagtagccaagacag

SEQ ID NO: 42768 - DNA, 1938 bp, Homo sapiens
catgcgcaatccagaccctggagttgctaaggccccaaggcagagagaggctcaggctacggagaaagccaatcagagggctccaagactgataagttagccaatccagattcgagggtgaatcaggtcctcagcatgcccatcgccccacccgcatccaatcagagagccggctactttgggcggacttttcaaaacagcgaaaacaaaacaaatcggggacctttaaaaggcgtaatgagaccagaaacgatctccttccgcccctctgtcttcccccgttccccaacgcagatcaatcgcggaataagcccgacgcccagattccgctctccgccctagcgccaggcgggaggactggctcggcaaagccaaggagagctagggaggccgcgagagaggctcgagacggcagcttaggggcgggactcttttttaaagtccgtggaggaagtgcaggatccctccgcggggagtcacgtgccccgcccccttgggggcgtcgaaactcttaacaaaaacaaggggctcggggaggtttccgctgaggcggcgggggtgcggcggtgggctggtcttccgcggccggcgttgcgccgcggcggagggtgggcgcgcggggagcgggatggagccggggctgtgaggccgaggcggcggtgcctgggaggaagggtcggatgccggaccgggggcaccgctgaggcggtgggtccccgacctgcgagacaggtttggaagcccccgctgcgcccagtccgtgcggaccgcgaggccgcgggcgggtggaggcgcgtctccggcacggtgagtggacccgcccagggccgccgtgggtttctttgttcgtggtggggactgtgggctttgaggaggttggtaccatgcgagtgcctcggtgctgcctgctcctcatccgctggagcgaccagggtgctgccctcagccccagccccggggggagctggcgcccgcgatggacagatagatgctcgtggggtggaaggaggttgcgactaggttaagggcagtctccgcctcggtgccccccgcccccgctcgtgttgtcacggggacttgctggcgtggtgcttctcgaattgacagccccggggctctgcagagttgtggggccccggcatcagtgggtggacgggtgttgtccctacgggcgcggggcgggcgggctggactggacttctctccccggaccgtagccgggtgtgccgcgccaccccagggctcctgggacgggggtatccgcctctcgggtaagtccggaatcggcgctgcagcagcggacgggaaaagctgggggcgggactctccgagaggggcttctgcagctgggcgccccgggcgggcggggctcgggagtctcctccctccgcttctttgttcagtcgcgagactctccctcccctcccccctattgtgcaacaccccatccccgggacccgctgcagtcgctcgccacactgcagtcccctgggcagaaggccctccctggcgcgacttcaggtggggcagaccgaggggacgccggcgcccgcggacagtttcctgtttgtgaaacgccaagaggccagggctggccggtcttacccagcgctggccggcggacctgaccacggctcctccccctgccacacctccctggccgtggtggggattgccctggggctctggcggacgtgactggtcccttcacccgctccttgtcggggtgtgctggggcgacccttgctggaggtactggcctcagccctttctcccgcttccccacccctcttacccccagattacattctctgtgtggtgtctttactgcagatgaaggatttgggggcagagcacttggcaggtcatgaaggggtccaacttctcgggttgttgaacgtctacctggaacaagaagagagattccaacctcgagaa

SEQ ID NO: 42769 - DNA, 1412 bp, Homo sapiens
ttgtctttttcctacctcagcaatgagaagtctttgggttgcaatgagagaggaggcaggaaggtgcctcagttcatgactacataggctactctggaagctttcacaaaaagagactgcctcagagctctgtttctgctcagtctcatgaaagagttgtggtttttttttgtttgttttggtttggttttttttttaatcagtgaagaatgactcattatttatcttgagggtgtaacaatgaattgttgtaagatttattcaatgtcttgtctttttttttttttttttcctacagctgtggactcttccaggaaagaagaaatcagaaaacatcaccttttctccacacccaccctcaacttccacttctgtactatagaagcaaaattgattaggctggctaatttgaagagaaaaagatgataggggctttgtgctttagaggtagaagagggtaatagtcaggttcactctgacaaagcccactagagatggtagacccactggtagaaatggctacctggatacccaaggagagcattaatcatcccatctcatatctgagctcagtactgggggaggggataatcaggtctcaccaaacctggcagccttccactgtacgtgtgggcaaagaccaacagcagtggtgttggtggtggaagttatccaagtcacatggcaacaagatatgttatcggcagccaatccatttgggtctgtagcaacctcaattcttgtctcctcagaggaatgaatttgaggggcataaggcagaaagagctctaggcaagttttagaacaagagtgaaagtttattaagctttagagcaggaatgaaagtgtacttggaagagggccaagtggacagcttgaaagactagtgcacagtttgacctaatttgaccttttttttttttttttccttttgaaatggagtctagctctgtcgcccaggctggagggcagtggcgtgatctcagctcactgcaacctctgcctcctggctcaagcatttctcctgccttagtctactgagtaactgggattacaggcatgcacccagagttagggtatcctggctcccagtgaagggactggccaattaattttagtcataaaaactacacacccagctaattttttgtatttttaatagagacaggggtttgccactttggccaggctggtctcaaactcctgacctcaagtgatccgcccatcttggcctcccaaagtgctgggatcacaagcatgagccactgcacctggccccagtttgaccttttgacttgaggttttatacattagtgtacttccaaggtcctgcatcccttctcctctaattcttcccttggggtgggctgtccgcatggcagtggcctgctagcacttgggagaatgcacag

SEQ ID NO: 42770 - DNA, 1265 bp, Homo sapiens
attgtgaacaagacaccccacatttttattttgcaccagatcctggaaattatgaacccggtcccatttgtattaattaaaaactctttgaagtacgaattttcatgatacaagcaagagaagtcaggttaaaagaatggtaagaggaagagcaaagtagctttcaggaaaactagatccaacaaaagctggagtttctagaaacttctggcagttatgaaagatttgctgcagagagagtgggaggaaagccgtggtatcaggacgttctgtactacttctgaaatgtacatatgcagaggagcaggcacagatgggatggctaagacagcaagtttgacttggagccagcagggaaagttcaagtgacccaggaaattagaagcaaaaagaatgagccacttgaactagctgttctgcattaggcaaacaaacagattctgttcctgattgttcctgatgatatccagcatttaccaaacatttactctgtacctggaactgttaaaaagggacttatagtcatctcatttaatctgacaacaaccctttaaggcatgtgctattattgttcctataccaccagtgaagaaagctaggacaaaataagattaaatcattgcccagggcacctagcaagtgctggagcctggactttaaccctgacagactgtggagcccaaactcttaattatgacatatagctcccctaccaagtaaaatggctctccactctaaaaggcatgatggagcagatattgtgcggaaaggaccccagtggagaagtgaaaagagaaaggctgtgtccctgtggtgcaatcctttgtggagcaaagttccccatttcttcaggggtaggggttagggtgggggcaaccaaacataaacatccacagaccttggggagcccacacggggttttcctggacccattttgcttcacaagcacattttccatggattttcattaggctgtgtcagagtgtcagtggtcttcaaactgttctactgatcccttggttcaacttttgtagctcaactgtcttccacaatgagagggaactgaatggaggggctcaggctcctgcttcacttgcacagcttccctttcacttattttcatctgaatatagggattatggataaaaatttgtttgcaaaaagaagatgaggttctacagctaaaaatacactataaaaaccattgctctgggcagtcacttcaactgggagaagacgaataagctgtaggcagatcacagggc

SEQ ID NO: 42771 - DNA, 578 bp, Homo sapiens
tccagactgaattatattctaattagaaagttaaggttttctcaatgtattatgctattggagtccccagaagtctagtaatccctattagctatgtgtctgactcatactgcatattttacagacactcctctactctgtggttttactaaaaattccaaagttgtgtctccctggcatgctgttaaggaccttttattttttttaattctgatgagtgccaagccctagaaattagacctgctacccctttaaaaatgatgtactcagctacctgaaaatgctctgcttctttgcagagaaggttttagatcaatctctttagtacaagcaaataaccccaaatgtgttagcgctaagcactcagggagccttagattattctgcttttttgcctgttatgagcaatgctggtgactagaaccaacgacttactcaagggtaacatcctgaaaaatagctatgccaatccagggtgatatttatcattcctaaccacaggccaggcatagacacagagagtcagatcagaccttggctgtgtaaaccactgatatagccaaactgtacaaaccagc

SEQ ID NO: 42772 - DNA, 689 bp, Homo sapiens
actctgtccctacaagggcacaggtgccaccttgagcagctgtgactatgtctaaggccatccggttttgcatcaccaccttcctgatctgatcaaactcatcaattaacaaaaggagggcagctcaggtgtaattcatgggcccaatctctgtgttctgcaagggctgtaacctgcatttctacagtgatgacacctgttccagggacagttattgctaaggggtagaaccactaggggctcaatgcactcacaaaaactgggaacacagcacctcccagttatgtgtgtgactaagcaatgtgggaagcacagtggcaggcacagaaggccactcccaggtacaatgtccagtctagttggctggcagatatggccatcctatgtccccacagacctataaactcccagcaggcacaaagtccatgggggcccagccttggtagggctgcttgttccaccacatccttggcatggtggcatgtgttacgtttgcacaggtctcagcaggcaaccatcccacagtgaccttaccccagtgttgctctatacatcgtggtacttgcaatggggccaccatgttttctcccattagccagccccattcatcatggatgctatgagtcagccagggggcaggcttgccatgggttttgtgacacccccatccaaagctcaccatgttgcat

SEQ ID NO: 42773 - DNA, 1258 bp, Homo sapiens
aagccaatttcttgaaatctctttaatatcttgaaataaacatagtggtgtggtggtggggccagatggacagggttgaagaatgaaagataataaggaaatggaaacagaggacagaagttcacctttaaaaaagttttaaatttacttttgaggggtttggttgtgatggtaagagattgggggtcagctggagatggatgtgagatcactggagttggggcgtgtgtgtgtgtgtgtgtgtgtgtgtaagactaatggaatgctattgaaatgacctaatggagaggaaaacgttgaagacagaagataaaagagacaagacatggcataaagttccaaagtggagagtgggggaggtcctgggcacagcaggagagattggccttggatgcagagggagggcagttactctataagaagaaaactaggaaggaggaaagaatgaatgtaaatctgacagggaatagagatctggaaatgggaaagtaaaatgggttttccaaaacagctgcaattttctttatgaaattagaagtaatagtagaaagtaaaattctgacttatctgctcattgattagcttgtatactacttgccagcatatatttgagaatccaataaatgaatgaatgttgacctttgttgtgtttttataatggttgataaagtttttagtaaaattgctgaaaaggttttaaaaattccaaatgatcacttccagctagcttttgggccacctataaataaatcatttcacagctgctaaagtggagtttggaaatcccctactcaaatgtaaacagaagactctcccaatgtacttttctttttcttttttttttttttttaagctcagtcagcaggactcaaaacttccttcactctctgtgaaaattaaagggaagccgtgactttatgtggtctccatagatggaaaccattttgcatttatgctctctgatcttgattgatcccataacactgttctcaatcttttatctttggaaggaaaaaaaatggtgatacagaagacatggagattaaaataataaattcctattttcccagctccagaatcaacaactgctaacatttagtcatatttacttcaaatctctttttttctttttactaaaaggcatgaaatgtaaccagtaaagttgaaaagtccttgagtgtggaaaagtcaatagaaaaagcttggtggccaggtgcagtggctcacgcctgtaatgccaacaatttgggaggctgag

SEQ ID NO: 42774 - DNA, 938 bp, Homo sapiens
cccagatgtcactttctgattccaaagcccatgcacggtcttaaccagaccgaccagaggactcttgctacgtcagatccttactgttagtgagtatcccttttaatgttctgactaggatggccatgtaacttatcctgaaaactgagatactttgagtgtaaaagagggcactaataattactctgggaccacaggcataaaccaggactgtcccaggctaactagaatacatagtcaccatagtaatgagactctggcaaacacattccagcaggcttttcagatatatcacacaagcacaatggttttctagtagtaaacaagccgattgatttagattcccagtttaaggttctgttagcacgagaagtcctcttaacccagctggcagaaatagacggcacaaggagtgccttccaacagcgtctgcccatagctgttgcccacagaggaacacagcagctgctccaaagtctttccagggcttagcccttatcgccctattcacattcaggagcatggagtttctatttcctcccttgctgaagcatttaaaaaaatctgtctgcaaagaagcattcactcctgaaaaactttgatataagaatgggacgatgttgccctctggtgttaccaaggaagtggcaagcagctacacagactcggtcagggcaagggtgaaggcaagggaaagcagaacactagctcttaccaagcaagtgtatgaacatgtcttcctccttaatccttacgacaactttgcaaagtccatccttatattcctcatttttatagataaggaaaccgctcagagaatgagtactgtgttcaaggtcacacagcgagaaaatgtattgaaatttgaacccatatctatctagcattaaagtctatggtctttccttatatcattctataggccaatataaaaactg

SEQ ID NO: 42775 - DNA, 637 bp, Homo sapiens
taaatacacactcccacaacacacactttaagaaaatcacaatttgcattctaatagttgcccctagttatttataaaaattcaagcccctcaatgatgagagcttccccctccccatcctgtgactcttaccttcacagaaatttttatataaaaatatgcataaaagctatactgaatgtgttgaaattttagtttgaattttagaaaataatattttttaaagcttatcattattgatacaaataaattacgtaagccctactgggaaacccggcatttgtaaatagggccatgacaaacttaaaccaatcaaactcccacattctctgtcctgtcttttcccaaaacaaaaagaaaacaatctttatgttaacttttctgttatctttaccttaaattccatacctctccatgacattattttttccacacagcagttaaaatttaatgaacacatttcctactccagagaaaatactaaaaatggaaagttattgaaaattaagtggacagaggattttaccttatattcagagaaatattctaagaagttttatttaccaaatcagtcaacatgagctagcatttttcgtagcatttaaactttggggatctatctaaattttggttcctt

SEQ ID NO: 42776 - DNA, 4643 bp, Homo sapiens
aacttcttatatacattaaagtttatatatataccttttgtatactgaagggctctgaaagattccattgtcttttttacgttatagttacttaatattgctctaaataattaatcatatttgtgtttgcaaaggttcttcaatgcccatagtcagggctgcaggaggcagaactaaaatttaactaagcatctactacatgccaaacatatgttttctcattctattctcaaaacgaccttactataaaggtattagctctctgtgactgataaaactgtggcttatagatatgttacctaaggtcaaacagctaaggaaaaatcacacagctgggaggctaactgaagtctgtaaaacaagtccttttcccactaactacgtatgttaaattgtttttccagtagtggtaatagagaacagctcttcgcccctccttctcttccctccacttccccgtgaacagcatacactatttctttgtgagaccaggtgcaaagagcaatctctggccatgacacagagtacggcctacaaggatcgaaactgtattatgcttttatccacagcacggttctagctaaatgatctaactacatacaaatgtaatgaggttggagtagaaaagcacattagcaaataattatccaaatgccatttgtatttggttctgaaatgtactgtagacctattggcagcaggtttatctttacaactgggttttgcttaggctattctcaaaatagctttccagcagcacatactgagtagacaacagaggttgcttgatctagtttttggagactgaggaaaacatgtttgttgagcctatcttgattgacaagataactagaggcaatacggtaaaatgtaacactgtgcttccaatgtgtacaaacggctcagctaaactccctgaacacaatccacctaaacagtctaagctcaatagccgaccgagttaagcaggatgacagctccagtaacttcctcttcctcacccagctcctcagctcggcggcgcgtacacgcctctccccctaggaggcaggataaaacaatttcaaatgcacaaaatccatccaatcccacaggccaggaaagccagtttccctttcttcctcagcccttccaagaaaatgtttgtctaattaaaaaaaaaaaaatcttaccaacggcaaagtatttgcaacaaaaatccaaaatatttactcagtccctccacacagccttaggggaaggatgaaaagaagggaacacgacaccgcgtattcccaagactgactgttctgattcactttcctccctcgggtcccacagccggccgggcgaaggcttgcagttggaacgccaaaataagccttcgcctctcaggagacgcggaggcggccacggcgacggcaatcggcgagtcccgcctccgaccctcacctgcccaggcccgaggcagcgccgtgggctcgcgcgggctcgccgtcccgggaggcgtccggggaggtgggcgggcgcccaggcagttaggccgcgctgcaggccggcgcgcttcctgccgcggccggggaacggcggccccgggatcagcggcgcggcaccgaccagcagctctcccagccccgctgccgcgcgtgtgccgcactcactcagccctccccggccggccccctaggagcagctctcacctgcgaggctcgggagccgcagccacaaagcgggagggacacgccactctggggtcccggccccgggccacccccgacacacacacacacacacacacacaccccggaaccttcgcccgcctctgaagagacgcgggtcagccccgccgccccctccagtcacccgacacacacccactcgccgtgggtcctcgggccgcctccccgcccgccaaagtcccaactcgcacacccacacgcacatttgtccctctcccacctcatttccccggggacgcgctcctcttcccaacactctcggtcctactcggaggcaaaagaacactctacctcattctcttcctctggcccagaagcaacagcagccatttccccgcggcaggggaaacacacacacaaacacgcgcgcgcgcgcgcaccaggcccccacagatgcttcccctccagagccgcggccgcagacgcagacgcaaacacaaacacccacggcgggcctcgctcccgcccgccccgaggggaagccgcggcggcacacagggcccgtaaccggggctcgcgggcgggcgcgcagggaacccgggcccggggtctcggggggcccgcgccccctcctcacctgcattcagcgcgccggggtccgggcggcggcggcggcggcggcgacggggcggctggtgctggtgctgcggcggcgggggaggcggcggcggcggtggcggcggggctgagggcagcaaagacatgcaggcagcccgccggaggggagaggcaccggccggaggggatgcggggcgggcgggccgggccgggccgcctgacgaacggcagaggcggcggcgcggaaggcggctgaagggagcgaggagacagaccgggggtcgggaagggggacgagggccgcgccgccgggcttcgaggacagtgaccccaggcgcgcaagagaggccccgcggccgcggccgccggcgcgaaggccccagccgaaggaagctgcgcccccgcagggccggagccgcggctactgctccgagagccacgcagagcctggccttggccttggcctcctggtgctggggctgccgccgctgcgggggttgccgctgcgccgggtgctgctggggccgaggttgaacagagacgccagctttcggtgccttcgctcccgctcacacacgttcacacccccgagggccgggggagaggcgtccgggcgatatcggtattgagattaataacaaggtgcagagagtgcgagaacgaggagggttgattgacgtggaggggctggcgggagtcagtcactccccggcgcggagggttggggtgaggggaaggaggcggggcggtgacggggcggagctcctacgcagcgccttggccccgccccccgtgcgccgcgttttgtcgcggtgagcgcgcggaggcccgggcttcttaatggttttctgttttgctctggctgttttctcactcttttttcctggcctgagcgaggagcggggctgagaagagtggtagagtttcagaaacccacatccacagagccttggcgaagagacgggaaaccgcctcaccccgggttcttgtgtgggcgctgtttactgcaccctcctcgcccgaggcgacctgacagcgaagcagagcgtaggtctaggtggctgagacgccaggggaggtgaagtgaccgaaggaaatgtttcctgacatattcggtggattttttttaaaaacatatagcatctgtaagttgtatcgtcaaaggtaaataaaagaacctgtgacgctcagcgataacccggtcctattttctaattctcccttctcgttgtagactttagtttgttgtttgtagcttatccatgccatctacagaatgaaaacatccaaatgcaaactagaaatagtagtgtttacttggtgaacctggctgtgatactttaagtttctggggtttgtttttgtttttgtgggccagcttcagcttttttgggccagcagtccaaaaagcaaattacaccggctgtggaggcagagtactgctgttgcagttttgcacaattttaatctctttctcaatgcatgcccgggctcgtgtatttaccagtgttggtcaagggtatattagcaatgttcagtattttttcccccacaggagtgtttagcacactaagcacgttgcgttggttgcaattcatcttaggccttattactgaatgtaaaatgccttcatctcttgggggaaaaggtgcggtgaaaatgcaaatcatcatttagctaaaactgaacagctgttacaagagtccataattgcagaactattgcaccactttcatcttggcaccaggatgggtgaatgagtgagtaaaaaagcccctcagttcacaagacgacagactattttcttttctacctatgttaattttccatttccctccctagcaacaccagccccacaccatcttctgtgaaacatgtcaaaatggccttaagcctggaagaagtctcactctttcccaactatctaagagtctaggctgacataaaatgaataattatctttggctttgtaagcagcaaagccaagcaagtcacttcaggagtccaaatagtggacctgcctcaatggcatcttgccacagtatttctccgtagcacacaaacactctcccagggagaaataccaccaattatagaaggaaagaggaaaataaatacctgaaaaaatgtaaatcagataatgtgatagcctcacagatttaagcatctttaaataacaataaatttatatgaattttctgtgagtattcaatgaattttcattcatatacaataaacacatatggagggcatattatgttccagatgctatgtttagcattggagacacacagccaagcatatatagtcccttttcttaagtaactcactatcattgtaggggaagctgacacataaacaggaaat

SEQ ID NO: 42777 - DNA, 2005 bp, Homo sapiens
gaggttacaaaaatgagtaagatggtttctacccataaaaagctcagactggtgacaagaactgatatattgtggtgatggctgcacaactctttgagtacactaaaaaccatttaattgtacaatttaaattggtagattgtatgctatgtaaattatatctcaaaactgtttaaaagaaacacagcctgaggcgaaatctttaaaaagttacctaggtgatgtagggtacggtacacacgaagcagagaagatagaatgaaccaagttatggaggtgagaaacgtgtgtgtgtgtgtgtgtgtgtgtgtgtgtgtgtgtgtgttgtgggggaggtaagctgggaagtgataaaatccgtaatcagatttgttttagataaaccacaccgacagctgtgacgtaatggaaagtacactcattctgttttgtttttgtttttttttcctatcagaataacttgtgcgtgggtcttggagctgccattttaaaactagaaatgttttataaatgtcaagtattattattcaattgatcctaatggtaagtctactcgcttgccagcagggggtaaatgtagagattaatttaagattttaaagctaaggttgatcttgcgctgacagaaagtttgacaattagcaaaaaaagtttgtcagtgagttggacacctccctcgggtagcggcgaaaacgcctagagaatttttaaaataagtctttccaaggccggaaaagtggcggaggaagctagtgggtttcagggttcctgtttttcaagattttacgttgggtattaagtactctcacagcctgttaaaattgtcgctctgagtacacttgcaggatcaaaaaagaaaaagaataagaaggaaggattaaaataatcacagcatcgccaacaggatcgtattttcccgaaggtggttaaccagccataccggaaccacgaaacacacagggtcctgggcaacacggaggactaacagtaacaccgccacgccggcagcaaagctcattttggtccccgccccgttcctctttctctttttaactccttccctctttgcggattctagaacggaacctttttttaattcttcccagtagaaacgtaggaacaatttcgtgaacgcaatccggagtgcccaacatggcggcggccgtaaggtgcatgggtagaggtaaggcgaggggttgtcttgcaggggaaatggctctggcaccgagtctctggttgcagcagagtgcaaggcggattctgctctgggtgctgaaaatgcctcgtgctgtttctggtctctaggtttttcagagggtgggtcattactacttaaaagtgaccttatgaagggtttcactccattctggagacgtccaccctgagggagggagtgggagcgggacgtacatcgagcgccctccagccacctatgggcatggcaaggactgggtcgtctctgatactggggtgtgggctgcgggtagtggagtgtgataagtgaggtgagttctgataagggaaagatgatgtatttgagtggcttaagtctgtaaattagagcaattttcaaagtgctttttggtgctttcggaattacttcgttataggcgattccagttcttaaacttccataggtggtctaatttggatcaacgtttatcatttgagggggctaattctgtagtacctcttggtagcgcctcttttcatcttaataatttcaactttttgtctacgatgacagccctttcttgtgcaacaatttttttttttttttttttttgagacggcagtctcgctctgccacccaggctgggagtgctgtggtgcgatctcagctcactgcaacctccgtctcccaggttcaagcgattctcctgcctcggcctcccgagtagcagagactacaggcgtgtgccaccatgcctggctaatttttgtatttgtagtagagacagggtttcaccatgttgaccaggctagtcttgcactcctaatcgca

SEQ ID NO: 42778 - DNA, 593 bp, Homo sapiens
agaaaaaaaggggattgagcttttataggaacaagaggtatttcttctgggtgttagaaaaggctaaaatatctttgaagaaaaacatgctcaaaaagttctgagaaaagtattaaatacacaaaggaaactactttgatacaggaggacatagaattacatattttactgacaatacattcctgaatatctttacataatagcaatcttaacttgcttttatttgaatagaaaagcctttcgtgcagagtttttttttttttttaacatcaggaaacccttatgaggctaacaatagacttcaagattctgtgaacttcctgaaattttatgcagagtactgtgtgtacgtgcatgtgtacatttttcttgggtgagtggttgtgttttccatcaggaattcatgactcattcgttgagcaaatagttattgggtacctactatatgccaggcgttactctagataatggggttatatacatcaacaaagtagacaacaatccttgccttcatgggatagacgtgtagatggtataaaggtagatatctgttgatagaagatgaatggtagaaaataagtaaaaaaaagaaa

SEQ ID NO: 42779 - DNA, 618 bp, Homo sapiens
catttttcttttggaggcatctgaaggtcaagtttcagaaaaggaaagcaactaaatgtgtttaaatgtgtggatggaaatctgatcaaaggcaatttttttttttttaaatagactttgccaagtattcaggtgatgttctacgctagcactgactatgttaggacactagggttactggaaataaactcagccaagtattgattagtaatataaatgtcaaggaattaagcttgcagtggagcaggcaatgcaagcagtcctgtttggctgtaaaaatgccgacattcctgaagcgatgagctcatcattaaattcttcatcttccacacccataagagaattcatggcttgtttgctcatttttgctttggttttctagacagctaagaaggaaataaagcagtgcttcttaaactttattgtgtactagaatcacctggaaggtttgttaaatcgcagattctgcatcctggccctgcagttgttggttcaggaacactggggttgggcctgagaatttgcatttctgtcacattcccgggtgatgctgatgcagctgcttcaggaaccacactttgagaaccactaagatgaactccctcgaggcattgtgat

SEQ ID NO: 42780 - DNA, 1730 bp, Homo sapiens
tttttaaatttgtttttaccaaaaaaagaatcataataaacatactactttagaaggtttttttcacccaacaaagcattttgaaattcttctcattttaacttaccaaatttcaccttatctacaataaaagtttaatcccttatgaatgagatttatctttcaaaaaagaaatgaatttgcttttctcctttcatactgccagtattttcagtatctttatgatgttactatacgaacataaaaaatcagtgtgattccattaccatttaaagccagacactaagaccaatggaggctgatattcctgtaggccatagcaaccctgggaaatcttgcctttgctgaagctataccaaatccagaagtaattgaagtccccctaaggtttcaggtccccccaaagaaggcaggagttgtgcattactcagcattctcagatctattctaaagcagattattttcttagattttgattcaattccatgcaattcaagcatttttatttaataagtacaaggcattgtgctcaaggagaagtgtacaagctaaactggatcattctaattttcctgaacacttacaacctcgtaggaagacatacatacataagtaagtatgatacaaggaaaatttgtaagacaaagtaaataaaagtattataagaaacacagaagagggatagattactttaggctgagtgaggtggcttttgagttcctactagaagggtgtgtaggattgtgactagaagagagaggaaggtctggatggagcaacaagagtctgggctattaacacaggtttgagtcaggctgaccggagctgtaaagcccttctcgttctcactgtgtgttcttttcagttctgtcttcctgaggctgctgtttctgggcatggccaggggatcttcagactttacaaaccagttgtgcagagccaggcatttcaataaggaacaaaatgctgagtaacaacatgaagtcagagtgttgcttgccaagagctgggaggcctgggtggtttcccaatcttaaagaagcagaaggatattaaagtgagcctcccaaaggaaaacgtggatctacttaccaacgcagaaaatgatacacacggattcgatttaggtaagtgcaccccctgtgatgactattggtcacttccagatcacatggactaactgtaggtctcaactattttgactttttttttccagaacagactaatacataactaacggcttacctttgtgaaaaatattttatgcactgtagaacagataattttcagtcctgggccaaagggggaaactttggagagaattaaacaggaaatgactctgctacaaagaattcaggagcatgagtgaagtgaataaacaatccaggcacgattgatgaattctagatgtcctgggaataacagggcttgttgccagctcagatgggtgaaatcctactctgatgaaaggctccagggctgcaaggagaccactcctacatccatcacatcagtgtcacaggtttaccacctgctcagcgattattcaacatcctaaggccttttgccccattacacacgtttgaccacttagtccaggaatgaggtaccaaatactagggagatctcataaagcctgcagctaaaataagcagaggaatcagaagctggacagagtgacccaaggaggactggggataactcaggagttccttttttttttctttttg

SEQ ID NO: 42781 - DNA, 1882 bp, Homo sapiens
aaatcttttaccacaaataaaattgtttccctaggattcacgtaaaaaaacatggagcaaggtttgaagctgttgaactctatggttccttcttcttctttccaggcacgctacattcaaatgacttggaagagcaggttctctgagccaggatactaaagtccctgtttaggaaagagccacgttgtatgtttaccctaccacaaagatacaggtgagaaaaactgaagcctgggatggtggaccaaagagagacactgacagaatgagccctagacttccagagtctgggaaacttaggccagataaagactagtagtctggcagttattactgggaatcactcttactctacagctaggcgtgtgccattcctcctgtcccttaactagaaactccctatggataacctggcttctcattccactgggaaaattgaagcatgcagtagagaccttccacaagctccctccaccacctcttacccacttgcctgtctctatgcacataaatatctgtcttcttttctttcaataccatgtataggttgacaacactcacattttcatatctccagcccagatttctcccgtgtgtcttgacttgatatctaatttcctacatgacatctctctttggatgactaataatcatctcaaatgtgtatgtccaataccagactgctgatctgcctccaaacctgtttttcctgtagtcttgtgcacataagttgaaggcaacgccatctttttactttctcatgccaaaaaacttggagtcctttttgatttatctctgtctctcacaccccacatcccatccatcagcaaatatttgcatcatgtctcactggatactgcaaccatctccttgctgatctcactgcttttcagcctatttcacaacccagcggttgaaatagttcttttaaaacataggtcagatcatgtcatttctcaaacctaccaaatacttccatttcactcagagtaaaatacaaagtccttataatggccatacacaatctgccccctccccatctccttacccatctcacttcatgtcctgctattttctcctttgtttgtctctgctgcagccacactggccttcttactgttctataaatatgccaggcactttcctgcctcagggtctatgtacttcccatgctttctgctcttccagatttctgcagagctcatttcctacctcctttatgtctttacttgttcatcttctcatgcgactttcctaccatgtttaattgcaaactcctgcccccaacactccatgtctctctttctaccttatttttctccatcatgcttatcactcaccaacagacctcacttatttggtttattgtctgtctgcccctactgacagacagttcttttatctattttgatcattgctgtatacttagcacctagatagtgcctggcacatacttggtgcttcaaatacacttgctgaataaagtatgggcatgctatgaaaaggcatagataggtaaggacttttgggtccagattgtgagaaagtcattggcaccaagatgttttcactcaattttctgagtcctattacagaatcctggccaaaagtataatacaccaaagaaccagaattatcacaggtgaagtaaaccaggccaattgttttctagatcctcttaggtatttttgtgaattatacatgttatgggaaattttaaacttgtctatactaaagcaaattagaatgctttgataaagcttattttggatttctcagtgcttctccttggtcacaaaatatggcaaggggttctagaaatagatttagtgggggaaggaaagaaactaacatggaatcgagtgacttctaaatttctaaa

SEQ ID NO: 42782 - DNA, 1219 bp, Homo sapiens
agacctctcatatgacctgtttgtttatttctgttcccagatgacaaatattttttgaattctgcccagctcctcttggggtagacaaatattaaaacagaaaaaagtggcaaggtgcttttgttcagtgtgggctcatggggaaaagtcctataatattttcagctggtcactatgaaggcagccagcagtgagctcagccgacattgttgtgggatggcactatgacatcgattaacggaaaactgaatgttgaaattatgcagcagaggaaaagaaaaggaggaggacaataacaaaattttccaaacagaaaatcacaaggtccacataggaaaagtatagttttcaaactccagaagatatttgcaaacaccagtgagcaagctatgaatcttgttttcccataggccctaccatcagtagagatcccaggtagagcaatttacctgcacattgttgccagggaacaagggaaggcgagtcaaactatttggggatttagctgagctttgaaataactgaaaagctatgcttcaatttttaagagttcatcaggtaggatttctaggattgtaaggtcctcactctagaacttctgaaaataatcagatgaatcggaattaaagaactaatggccttaattgtgtctaaataggaatgaagtaacaatgactgtcatcatgagctattctcttctatggctctggacggtctttttttttttttttttctgttcagagcttcctgcttggtgtttgcctaagtagggaggaaagccattgtttgaactttgcaacaacagattgcaagctaaggcttttctacactttgtttaattttcctgaaatgttcctttttacagaaaagatctgttgttgacctagcatgctttttgtcttactcaatactcccctggggatgtagttaaaacaacacttagctgtaattctcctgggtggagaagtgtttggtggtggcaatgaaactaaagcacagatttgagcaactgtgggctgttgactttatgctagcctttcataaagagaaacctcaaaacaccgtggccattcagcaaacagtgtgagtttcatctaagcctggctggctttgcccttgctatcttcgggctagaatgatcctaaccatcagtgtctttgtgtcatgatgcagaaagttggctaggacataggaggataatgctgaagtataacttctg

SEQ ID NO: 42783 - DNA, 2737 bp, Homo sapiens
ccagagcactattttagtgttggcagaaatagcttctcttcaaatagcagggaagaaagaacaaggattttaagttcaaagtttttgtctaagcacattttctaatgtttctacccgttatctcattaaaaagaataaagaaataggggtggggatagaaccacattcatctactttcatagaaggtgcatactggagtcctgcagatacaatttatttgatctatattttaaaaattagggaaatgccacattagaaaacagttccaggtttttggttctcttaagaaactggaacctctgggcacagtgtgtgtgcctatcttcttttgtggaaaagtaggctggagctgagaattggctgctctctttacacaggctctacagtttgccattccctaccactcctgaatgttttacacccatatttattttgttgcttcaccctgcagtcgggagactcctgcagtttatgaaattgatacaacagggcttttttttttttttttttttttggtagggggtgcaaatctctttgatttgaggggaacgcagtggtcgcttttgcttccaaacagccttaaatctgcccgtttttcaacgatctgaccttactttttcagggtggccaaaagcacaaaattatgaatcaaagaatggtccccaattaccacgagccagctgtgtgaccttgggcgactccgttaagttcttttagccaagagtgatgaatggtctgcaaaacgaccttaatacctgttctgaatacccccacatggctgtggtacagcaggcgtgagatgtttaaagtactcctaagtaatttataaactgcaaaacgcttcccagcacaagcgtccgctacagagcgcgacgacaccgagccggtttagaagtccagttactggaatccactccagttccgtcctgctcccacctcctacgctcagggtgggcgagcggaaggagactctcaagggagaaggcctggaaaactggctaagaaacgaagcgagaagttcctcagcaggggtaaagttgttggcggcatttttaagcccctagagtggcacagcgactcccggtcgagatgacggaccccggtgcgtgaccagcgcgggagccagtcccgggccacctccctgcttgaagtcgggcctggccagtaccctcccggcgcaaccccggacccgggacccccgactttgccctagtccccaacccccacaatcacctcccttggtccccctccacgtgacaagagccggaaccgtcacttccggcggcgcgggcagcgcgcctgcgcgggtcgcccggcctcagtgagcggttggcagcagcgccccccccccccccccgccaacggccacgagtggcgggcggcgcgggttcggccggggcggcggcggcgcgacgggctgcggtcctgcgggtttgtggcctgagacgtctagcccactccctggaggggccggccgcccagcctctttcgctctcttcctctaccccggctcgcgctccaggcgcttagtgaggcggcgggacgcccggggcactggcggaggcggcggcgtcgcccctggattcggacccgccccctcgcgccccgccccgtccccgccctccccaccgccctctgcgggagccgggcagctgcagcggagccgcggagcgggcggcggggcccaggctgtgcgcttggggagcgcggaatgtgaggcttggcgggccgcagcacgctcggacgggccaggggcggcgacccctcgcggacgcccggctgcgcgccgggccggggacttgcccttgcacgctccctgcgccctccagctcgccggcgggaccatgaagaagttctctcggatgcccaagtcggagggcggcagcggcggcggagcggcgggtggcggggctggcggggccggggccggggccggctgcggctccggcggctcgtccgtgggggtccgggtgttcgcggtcggccgccaccaggtcaccctggaagagtcgctggccgaaggtacgggcgcccggggaggctcggacaggcaggtgagggagggttggggtgtggcggcggcttctccgggtcctcgccctccggactgactcttataccccattcttcctctgctgccgggccagcgggggctcctaaagagtggctcgggctttctctcttaagctggcttttcttgccgctggctgccccggccggtgcacagttctctcatgcctagtttaaatcattttctgtgctttttgacgcgagaaaataggtagtagacgggctaggaagtgggttggtgttacgattgggccagtgactcattagagggtcagatcgaacagggttgaagctccgttctgccagctgtggctcagacgggtgtcatgcgttggccttttcatctaagcctccacccgcgctgcagggcataggaccctgcagcccctggtgtcaagctgggctttgctgcagctcagtcatctgttgaaaaacaatgtatttgtgtgcatgtgtgcgtgttggaggtgatcctttgctctaaattcagttagtaggttgcactgaggagcaggtaaacttggagcccatttatctttgttatttagaatcttctctgttggacaaggtgctattcatgccctcccagtatgtctctttgatagtagtttaaaaggtgatataaaagcaggttaactttcacttaacgaggttttgtggtcggtcc

SEQ ID NO: 42784 - DNA, 1125 bp, Homo sapiens
tatgtactttgtagaatttgtaatgagtgattataatactttttaaggctggtatatgttttcaatcttatttttcagagtatttattatattaataataagtttgaactatattatgtaagttaagactgaatctgttaatgattgatttttccccccctcacacttttttgaatttaaaagttaataagcaggattatatcttagattatcagacaggtataatactacatttggggagatttcttggtcacagcaattttgtattgtatgctatttatgcaaagtttatttgtttacacaatacaaaaatatatttgttcatatgctttttatatgcaagatgtagacaatttaaacacaaagaaaaaaaaagcagtttttatttccaaggagttcacgttctaattgacaagtaaacgattacaacctgatagatattaggctactttgagagtgtggaggaggggaaagactgggaacagagaaaacaggagcacataaaggatgctttccctgcggatgggagttgctgcactcttccttgaatgatgaatagtcaatcacttggaagggtgtggagtgaaattatagcaggcaggcagtttaggcaagaatgactattgtgaaactacaggactaggacaaaaggggacatatacaggagtagtgggaaatgaagctggagaggtagataaatgccaatcatgaacaactttgtttatatatcatgctgagaaatttggactttggcctataggtcagttaattttcaaccttctagtcagttctactctttgagacttggttgtgactgtgttgtaaatgatctgttacttatacattgttaaaatttcatttgcgaatgacttattttaaaaaatggtgttactttaaaaatatcttcattcacttgaatttcaaaatgttcttttgagaagaggtgaaggtgtaaagttatatctaacttgcaggaatccaggttgaacagcaattggtcttatctatgacatagctttaattagcatccactgttatagttgagtgttaattatgaattattgtaggatttgtcagttgaattttattgtgacttctgttttttaaaataattagtaaataatt

SEQ ID NO: 42785 - DNA, 1363 bp, Homo sapiens
ttttttctgcatgggctccataagtatttgccaaatgaataaatctcgggtgtatatgttaacttgtttcctattatacaggcacttatctggcccaaagctactgaattcccacagtgttgctctaaaaagaaaggtatacaccgggcaaatatggctcagccccatttcaatatatatctcaatgagccgaacaaaccgaataaaggatgtaaaagccctttgtaaagagcaaagcgtcataggagagctgtaattatgatcactgttactatcatgattattccgtggaccaagtaccccggccaggtaaggggagataacgggggaggagaggcggcaaaaagggatgaaaaggatggggcggcgaggaaatgatgggcaagcagaaaggcggggaaagcagaagggggaccagacaaaaagggtgtaggtgagagaagggggcactccaggcggaggcagccagaccgtaccttttgatacacagcctggacggcaggtaggcccggtagccgtcggtgatgtacgggttgtccttgagggacccggggatctgctcgtaggtgtacaggcggatgccacggggcaccaggaccggccagtactggtagctgcccagctcgatgtaatgcgcgctcttcagcagcttctgatgcatcgttcccggccgccgccgctccccggctcgggagctcccccaggtcccgcctccccggggagggggcttcgccgctggcgcccccgccccggagcccgcggacgctgcgcgaggtcctaccgcgctgccgctgctgcccagggcccggctctgcgctcacaccggccactgccgccagcgccgcggcggacccggcagcgtcgcagcctcctctgacgtcagcgcgccgcggcggccccgcccctcagccctagctgggaggggcagggtgctggggcgcgcccgggtgtgctcgagcgtgcgctggcggcggcccgggctcccgggcgtctctcacgctgtgttttggcggcgcctggggtcttcgtttgcatatgagaagagccgaaagcacagagctacaggcgaatacaagtggattttttttctttttctgtttttttattagaagtaatagttgctgcattttgaaaaatcaagaggaaaagagttaacaggaagaaaagttcgaggtaattaccgtttagtttatgcttggaattacacacacttagtgtcagaagggactttgaggatttctaagctgaagtcagctcttagcacgataattggaaagagaggaaacctgatgcacgtggaacatacaccagcatcgagcacatcctgagccataaaggaaagcccccgtgcattcaaaactcc

SEQ ID NO: 42786 - DNA, 838 bp, Homo sapiens
caacagtgttaagaggtgggatctttaagagaggattagatcaagacatctctgccctcctgaatggattaatgccattatctcaggaatggattagttatctcaggagtggtgtcctgataaaatgatgagttggaccctttgtccccattgctctcaaaccctctcttaccttctcaccttcatgggatgatgcagcaagaaggcccttgccagatgtcaccaccttgatattgaacttcctggcctccattaagtgtaaatcactcagtctgtggcattctgttgtaataggacaaaatggactaagacaaagtagaaattccagatatgggttccatagtacatcaatgctgagcccatttctaaattttaagcacagctcatctgccaagttgctaaggttttagcctatgactcataagccctttggactcattaccacatcgtctccctttgaacttaccctacaatcaaggaacagaaatacagggtaaagaagaatctagctgcgaaaactagattcaaacaattaaccaatgtttgtggagggcacatactgattttcctacatcagtgattgggaaagaaattgaagtttatatacacattgctaaataagaatagagacaatgcacatccgaatcaaattttggcaatcataaaaggcaatgtttatgaacatgtctaaatgcaaattagaaacaaatcattgtttattaaaatcagtttcatttaatctttgatatttctaatatttgctaggaaagattcctgtcttttatttctatctggtggctttgttcaaatcactctctaaggttcttttatccagttt

SEQ ID NO: 42787 - DNA, 695 bp, Homo sapiens
tgaagccagcaaagtttctttcaggtaattagactgatcgaatctctccagtggcttctcgtcatccctgggaagagatcagactttctattacaagacataggaggtcctcccctatgggttcatgccaaaatccaaaccatcattcacctagcacagtaggtctcagcctagcacttctgaaaacatgtcagaataactcatgattccacatgcacttcatctgaaatgtcattcaagaactgtcaacatcttattcatgactcagaactgaattgggagtcatcaggtcagtcaggtttctctgaaatgctccctttagtcttggcaaacccttcctcctttatgtttctactgttctttacacacgccgctattaggacttcagttaccttccatttacacttatttgcacacatttctatgtttccatattaaaatgtgaatttccatatcatattataagcacttttgtatccccagttcctagcacagtactgacacctactagataatcaatattagccaagggctgaattcagaatttcacctctcctttcttcctgctttaaaatctactttagaaaacgtttgctatcattcacttatatgtaggtataaatataagttcatacttatatgaacttataagggctaattgctttttaatctatatttctaagggtaaaataaag

SEQ ID NO: 42788 - DNA, 1684 bp, Homo sapiens
caagctaagtaagggtatctgtagctgaaactttggtggtacccagagttaaagaagtcagtcccagagcaagactccgtcaaaaaaaaaaagaagaagaagaagtcagcccgttttctggggtgggtaaatacctgcctaattgtttagagtggaacccagctcttcagagtaaacacaaaagcctttcttcgcaggaaatgcaaaccacattgggcatgttaaccctaggcttttcctggctccaatgaaagcgctatgattaggataaaaccaggcaaactttagcctgcgtacgagcagggtcgaggaggtgggtaaggactctgtggccgatggagcgtggcccgcaagaggccacactcccatttcccaagaggccaaaagactggcaaacagtgaataccccaactccccaaagagccaagtagcccggggctccaatcactacccccgacccggctgatctccgcccacacagatccgaacgcgcttgccctttgaaagaagacagcaacagggcacccctccgcgggtttccaacaccactccccggggtgcgcacacgcatctcagcctcagccccagctgatccagtgccgccctcaccaggagaccctggacctccctcgcacactcacttgtccaggacgaagtagagatcaaaggctcttctgcaggagggctgctcctgggcgcgcagcagccccccgggaccgctgagcaccaacagccacagcccggggaacagccagctcccggggctgcgggccggggaccgctccgccaccatcctgcggccgggggcctgagactccctcccgctcgcagtcccctaagctcaggagggtcgcaaaggtggcgggagtcacccggcacgcactctggggtggggggcggcgagcagctgagacgccggcgcctgcggcagcgggacccaccagctgacagggagggagagagggaggtcctgagaggacaaagggagtctccgccaccgccgcagctgccgccggaactcttgacgaatcccagtggaagcgcgatccagtcctccccctcccgattccggagagttcctgcagacaatgcgggcccacggcgacagctcgcgaaaggagttcctctccggcctggggccgagcctccagcgcccgcctcggacccggacctggaacccaccccgcctggagggctgaagtcccccccgctgccgtgcgcttcgggacaaggggtccctgggacgcggcgacggcagaacaaactaggagtggagactcttctcctccggcggccccaactccctccgcactccgaaactttcctcccggtgctggactctggcactgcgctgacaggccgtcccctttaggggaggaggctagctggccctgggactcccggctggagagaagccacgccgagggcaggagcccgctcgggccgggtctgggctgcgtgtgtcagtgtgcgcctggggacgagggcggggccccagctgaagcctccgagccacacatgcacacttgtgggttcctgccgagttgaagatgactaacgcttgccagatttgggaaagggaagaaggagtttagaaaaacaaaagttatctagaaactaaacatacccgtatgtcctgcaggcctggcctattttagcagctgtgctaaaacagcccccatgc

SEQ ID NO: 42789 - DNA, 952 bp, Homo sapiens
aacctttctctgccaaaaataatcctttttttctttttttttttaagagtatgcctgctttctatattattgtcttctcccttggtttgtatatacccttaaagttttaacttgttccagtttcccatgctgggagctttaggagtttgaaattaaaataccaatccactggggcggggttcctctgagccatgagaaacatggctcaaagttctgaaattaaaaagcgaaagttttggtcaaagtcctactcctgaattggtctctggcaagttaccaaacttctgtttctcaatgtgtttaaaacaaaactactttcacctgcctaaaagaggaatcgagaaacacaggtgttgcacagtggggcatctcttaggaagttcttaccactctggcaatacctaacattctggacttgcaaaaatgactgttcctttagtacttttagctagagcagagctgtatggggttctctaaataaaaccacatgcttcacatgaatgttagtggtcccatttggcattttctcagggaaaagattcttactcaggcttctttggtgaaagttctggtatccataggataactttaggccctcataattcccagagggaattcccagaggacgtggcccactcttagaacacaactccatgcctaattctaaaccagtggagcaacagtgacccccagtggccaatggtgtggtcttcttaccccccagtttgtacttctaaggagagttgaataattacatagtggaatagtaaccatccaatccatcttggcaactattaaattaaataaatcaatacccctctgacctgcttggttttattttaacaacaatgcctaaatatcaatatagcagtggcaataatgtatctctgttaaatagagtgcttgttaggattttgattaatgtagggtcaataacgaatcattttttgtt

SEQ ID NO: 42790 - DNA, 1357 bp, Homo sapiens
ctgtgcattatgtgactatgtaccaagtgtgtcggttaaaaaattgtttacagttagttatttatgttgttactagttaatctttgttttccaagtacaagagtttagaacacctcagaagttttaaggcaagcacacctggatcaggtgggcccagtcagccattcgggcatgtagcacctgattggttattttcaaagaaccagatactacaaaatgaaaaacaacagaagttatttctatttgggtgagccaatcatatagaattctatgatttaaatgttgaaagagctcatagagatatggcccaccactccattattttgtagatgaagagatgatatgctaaagcctaccacaattcattgacagctggtagagtgacagaggcagaaccacaagccctaatctccagactttggactagtgaactttgtacaacacctggctgccccacctttagctcaatggttcataaactgtagcgaaatctacaattatttcaactttcttatggctctggatttaaccgttaggatgacaggaaaaaaaaaaatcctggtttatgcgagtgttggtaaggactacaagaaagactagacttgaaaaaagtgattaaaatggaaaattcccaaagaaagaggcagacggttgcaaactctaaacattcataactaaaccagtgcttcttagactttaataagcataaaaatcccaccattagagtgttaggtgtggatctgggggccccaacttgagtttccgattcagtaagtgtggggtggtgcctgggaatatgccttctcatcggcaccacaggcaatctgactaagggcaaaggtgctccacactacaccctcatcccagcctcaaacacctcagctttgtgaaagatggcaggttagagtcacagtgcaaaaggccactggatcaaataccaaagcactgtgactaacaggtgactttatgatgaatcacaatgtttgtagttcaggaggatgtcacagtcaaatctcatgcttagtggattcatcaccatgtgtgggggcagaaactacttccactcttaccttccatactgcataactgccaggtacgtaagtcatattattattttcattgtcgttaatctgtacactccgttctgaatctatatcatgctttacagttctcattagttaactcttaatgaactctagtatgttggtgttattcccaccctcgttttcttatcagaacacaagaagaggcttaaaggcaatggctgcctctataaatgttctgagtgatttaagctaaagcaagaaatgccattggaacattgcacaatcagggccatttgttctaggagttcaac

SEQ ID NO: 42791 - DNA, 6114 bp, Homo sapiens
attgtattgagagggcaaacaacacagagaagacaactcagagtcaactcacttctttggtatgtgaacagacagaaactccaagactccaagataagtaccttctttgaaagtgagtcccacatgcttagtagatttcacagttaagggaggaaaaaaaaatcagtatttttgaggaaggaagatcctatttctctcgcaatgaaacagtgatattatttcctgatttatcagcatccatacaaaaagttaatttccattctgcttgatttgtcttagatgctgcttaaatatttcatactaattcctaattgttggaggaaggggattctgactcaaatagtttactatctttggtttccttggaagaaaaacaaagctaagatttgtcatcttttgtcttggggatgtgttgttagcagtttattaaaccacaaatgacatttcggcacataacctggagagtcaattaaaactcttctatgaaataaatctttactgtgtgggaactgaacccaggacatattgaatgtaaagaatgtaatgcatacattctttatgcattaactttttagctacatcttccatgcagttcctaaaccggacagtagatggctcctcgttccttgtctttcaaagagttggcactttgtagcagtaacagtgctggtttagaaaagcaaaaggataactagagttatggggaaaatatattgagaaactggtatttgtgatcttggcatattattgaactatacagctcatactgtacaggtgaagacgtactggctaataatgccatttggtcataatgccttacattgtaggtgctcatctataatgagaattaaatatttcattttcctggaagaataaaaatgatcttctggataatcaaaatcatcattacctaattgagtgctgtcaaaaagaactttctgggatactgaaaatgtttttcttttgcacaatccaatacagcagccactagccacaagtgacttacttagcacttaaaatgtggcttattgcaactgaaaaactaaattttaaattttgtttaatttaaataaacttaagtttaaatattcccatatgactagtggctaccatactgaacagcacagatatgagtagctgaatcatcatttatacaaggtagatctcaacccaaattagataatagcatgtggagaacattctttaatgaaaggttttatttttctacacctaattcatctcaggaaaatgatctgatacctaatgaggatgtttattaaaaagtagagttttctatttatattttagtatataacatggttactgggataattttccagctgtgagtttttgaaaaactatattcatcccttcccatttttctcttttagatcaatagaaagatattggtagtccaggctaatttgtactttctctgggttaaactaattttctaagcagggtttcctaataaagtttgaatcaactgaatgatttccagacataggcatatcctgaaatgaaataataaatataaacctaagaaaaaatgattgttgaagacaaatttaaaaatttagtggatagtaatattgatttaataggccaaaaaataatctgacaccaatctttttgataatcatttttaatattcatacctaaagaaaaacaaagcaaaaagcagtttaatattaaatttctacatgaattcataaataaaaaagaaatttcactctcctctcttcatttccatgtacccagaaagtaggtgaacacctaactgcaaatcacttgtcccttcattagtccacctctaagacagggtgtaaatgcatgaagcgatagtacaacaaaataaagcagttatgacagacctaaagaaactcataaatcattctgttcaactccccacagtcgttttatagacactgcaggcatagagaaaaaataaatcactgattagggctccagatcaaccagaacccaagtctccttatttccaaggcagaaatatgccacagcactaggctataacatctgtcactttaggataagcaaaggttgcatggatcttttttgtagttttaactggagaatcaaaaaggacaactataggtctgaaaaagtgaggggggtgggctggcaatacctgaattcaactactactaataaaaatcccataaatcttaaacagcatttttaacagtgcaattggcctctttaagaagtcacaaaatgttttcacagctttttcatttattatgtgtggcatcagaatcaagtttcccaatccctgcttcaaggattctagattcttctcccaagcaaagaaaaagacattccattcacccatctcctttccaaggaggtgctctcctggggctatcccaatgttcctcccaagtccaattcttccaggtactctgcggatattgacaaagctgatcccaacactcctgagtcatactagggatcccagctcctccccttcaattttcttaccatgtctttttccttagaaaggtgtattgaattgtttttatatagtctattgtactctattaactagtagttaattttaggttctaagaataaaatgttatataagaactatgtgttattataatactttgatttagttatacatataaatacatatgtatatatgtacatatatgtgtatatatacacacacacacacacacatataaataatctattagatgctaagctgtagggggttagcgggagacaatacatgggaatgctttctggtgattctcttctccaaaagacagtatgattcccaggtattagatgtgttagtatcagataaaatatccagtggagcacataaaatgaagcaagactgaaaatgcaccataggagaaataaattctaagaatgtaacacttcgttagacaactggaaagtacaaggccaatatgcttagtagttagaaatgttgcccacctccaagaaaacaaaggattgacccgacatgcagtggaagaatgccaacaagaaacttgttaatcagtggctgatctcatcttcaccagaaaatctgcttgagaggcataatataacgctgtttgtaaaccctgatatctgtcaaaagtgccctaaggtcctcctctctagctccaccactgcccctcacttaaaaaaataaaattacctttaatgatagggtttaacaagctgccttctttttttctgttatgaaaacctcaacagcaaataatttttatttctttttattaaagaaagcaactctatatttgttctaaatctcatgggaccagttattttcacccaaacggccaaccaggtatatacgctgcttaactgtaaacctccttgtttcttagcagaggcttatcgccatggtccaactatgttttaaattaaggcatagccatcacatgccaagctctagctactgttttcacgaggaaagggcaattattcaccccatctgagtgtgactgtgccagacatcattcaagagtgcaccaccctgatccctagactcttcccctttatgcacccagttcagagaccctcccttcggccattagaccatctgagctaaatatagatctacacacaccagcagttcctgaccgtcgtcacatggtgctgacgaaggactccttggagacgcgttcggcccaaacacatacacaaatttgtgtgcatattcatctatatacaccatatccaccgaattcatcagggaggatggacacatctacattccgaagagaaaatcgccgtctagacaatctccttgtgttatctgccacacttgtgccaccctcggcagtgtcagaggattaagctacgttgcttttgcctgaactgcgccgatttggttggggcaagacagcaagcagtattgaaatggtacgtccatacacacacacaaaggcgcgcgcaccccagcccccgtctcgcccttttccctggtgcagcacttaagttgttttcacagctcccttagaaagaacctcccttaagctgactgcccgcgaggctcctagatacctctagctcatctgagattccccaggcaggtgacccgaggcgactcaactgagctctggcaaaagcaaggcgactcagtgtctcccaagtttgccaggtgaacaccgaaggatgacagcacatcaccttgtcggtggcgagtatgtgacttctgttcccttgtcccttcctacgagtcagactttagattacatggcactgacaacaaaaataaacagctccccctacacacacacgcacacaaaactggtcaagaagtggaagaatcaacctaggtatgcacacgaaggaaagaagggatgaaaaaaatgatggacgcgattacaactcaagacaaatcctcaaaaaccacctatctcgagacagaaggcctggctgcaggatcagggagaaagagggaaggcacaacccaacccaacccaagcctggccctgcccgggtcccagcggctcggcctcgcacctgttggggccgcggcagtcccaggtacccgcagcggccgggcaggggccctcccccggtcccgggctgtaactcggctcttggcgcccgcgttcgcgctcactcgcctcgggatctcccgccgcctcggagcgcacccggcagccggtgaagtctctgagccccgctcgctccccgcgcggcccagggatctccagggagagcgcagcgcgcagtagggtccggagttcccgctccgggctgtggtcccccagccgggagaacaacccagccagggaacaacctacctgcaggtgaactccgagtcctcggcctcccggctgcgtgccgcgcgcccacaaatgcgaccaaaggacagggagctaaagcgcgcgggaagaagaaaaacaaaatctgtctaaccagtcgggttccttgtttatactgaaactacggcagccgccgccgcgcacgccccccttggctcaggcgcctgcctcccgctgccagccccgccccgccccggcaggcgcgggccaatcaccgcgcagctcaccgcccacgccgccgccacccggcccggcaggcaagtcccagtgggccccagactcccgcagcgcgtcagcctgggtgccctcccacgcggcagaggcccgcggagcccagcgcagcggtgtttaacagcgttggtcaggctggctccgactgtgcgcgtttcctcttgagtgcacctgccccgggctgttgtgcagtcgtgagtgtgtgtgtgttcattcacgtgtatactatctgtaaataccggcccgactcgttacacagtatttattaacataattgtgagctaaaggttactgtccatgtaactttcagaagagagcggagaggaaccacagaacatttgcttagcaaataacacatagatcctggtgctaagcactgtgcaaaacgctgggggcacacttggcaaagtaggctggtctctgccattgtgaaacttacatagtctagtggaggacagacattcagcaaataatcacccaaacaaaatgtagaattacagctgctagaagttgcacggagaggaacctgttccgtgaaacatgattccggaggcaaagcagggaggctagtcctcagtgagggctgtgttgtcatggtaaccacgtactcactccatcatgggatatttgataactatttcagaaaaaaggtaaaaacctccgtacttcactttgtacacataaaaggaggccagagggaaataatgatggaaacaagggaagaaagagacctatgaaaagaaaaaatttacagaattaggagactcttaccaactgtatttccttgagtaagtgatacagcttttctgagcttcagttttctcatatataaaacaacactattcatacctgtcctatactgttataattaagattactgagggggaggaatccttttccctcctgctccatgggtccctccccctctccttcctggggtggagtcattttgacgctcactttgtctattcttagcggattcctctttcattttcttcatttatgcctccttttacttttcttcctctttatgatactccttccctcctttgtgtaaata

SEQ ID NO: 42792 - DNA, 1174 bp, Homo sapiens
cgtattgatatggaatgctaatatattgtttagtgaaaaaatatatagaatcattatgtagagtatcctacaatatatataaaagagggagaccaggtatgatgactcacatctgtaatcccaacattgtgggaggctgaagcaggaggatcacttgagaccaggagttagagagcagcctgggcaacatagtaagaaaaaaatgttttaaaaaattaactggatgtggtggtgcatgcctgtagtcccagctactcaggaggctaaggtaggagaatcacttgagcacaggtcttactctgggaggcagaacaagaccctgtttttgttcgtttgtttgtttgtttctttgtttataaaaggaaacaagaaggaatatatatttgtactgtaatattttatacatgaaaaattggggtcagataaataaggaactggtaagtagttagctatttaggggaggggatgggaacttggtgggtgtaagacagtgggtgggagaaacaggaaggaaacttttcacaagacagtttgtcatattttattgtgtttgaacagcataaatatagcacatattcaaaaatctaaaaattttggaaaatccctatcaaaagccatgggaaatgcatgtttttaagtagaaagtatcccagacagtcttatatcccttattcttgctgtggagtttcagaatcaattctattacttaccagtttcgctaaaaatgaaactgaaactctgcatacttctcatatacttagtcctaaaaatagactcagggaaaaaactcagaaaaaaaaccttctcatgataattttcaatattgatttttgttgctttacagaattacaaagttttagattacacttaaacatgcactatttaaagccaaacagaccactgttgaaagatatccaaaccaaggcatgtgcttacatgatactgaagtaatggtgtcaaagtaaaattaatctttttctcccatcaagctctccatggaatccaagagagggaaacgctatctcacacaatgatggagaaaatttcatctaagaaaataaggaattattattattattattattattattattattattattattatttgagacggagtctcgctctgtcgcccaggctggagtgcagtggcccgatctcagctcactgcaag

SEQ ID NO: 42793 - DNA, 3796 bp, Homo sapiens
atatacaaaatgatgagctctataattccatctgattactcccatttaaaagaaaaccagcagtcatttaaatggtagtttctgaaagaccataatattaagagtgggtatctttggtaaaagttttgagatctaaaaagtttttatttttaaaattttgtaaaatagccacaaattaaagtttttagggtaataaatatgttttgattttggagaaaataatctgcccttcctttctgcaaatattatttccactgtcaagtttgtggtcaataaagctcaacaattggctaggatttcctcaatttatattaaaaagtacttcatttttcctgaattcacctggaagtctctgttaatgagatcatagatgagaatataaaacaaaacaaaaacaaaacacactgaaaccgacaaactgacaaatttgacacactaaagttcaggtattttgctcacgtactgattcagagcctatttcctgttaccttatccataatttttgtacacatagctatttgacttccaagactttagtagattagagccaacaagttgaatgggggttgagaaggggtggagtagctactgatagtgtggcaacaaggaaaggaacagaaaattataaaaagaaaaccttgaagcatccggttgatatacagattgtggcataggggcaaacaagtctacaaccttcagtaggtcccagatcattaatatataattgtagaggaaaataactaaattttaacaatagttaacactgagtaataaagaaaggcaaaaatataaccagaatatactttttaagaagctgaaaaatgaattacattgtttaatataattccacataaaaagcttacaataaaattaatctagtgtttcaagggacaaatgatcaactatgttgaatgattcatccccagctgttttaggatcttttttttttttttttttttgagacagagtcttgcactgtcacctgggctggagtgcaatggcacgatcttggctcactgcaacttccacctcccgggttcaagcaattctcctgcctcagcctcccgagtagctgggattgcaggtgcccgccaccacgcaagtctaatttttgtatttttagtagagacagggtttcactatgttggccaggagggtctcaaactcctgaccttgtgatccgcccacctcggcctcccaaagtgctggaactacaggcatgagccaccactcctggtaggatcacttatttttagggtaattaaaaaaaaacttctgctgactttttgcatcacttgagaacacgtgcttctttcttagtgttagcccaatattagggctattatgctaatatttctgcccaactgaaaccatatagacaggtcataatggtaccaaaagacaagaatgtgactagcttgtcccgtccttgctttctatggatgttcatccttgcatccactgtggactaacacatgttttatgctggcagatcagtacattactcctgtgcagctagttctgttgttgcctggtagagcttgctgatgtcctttctatggcacagccagctgcttgcaaagagcagatcagggttagacatagttctaaccctggagaactgggttccagttgccagagctcagtcctaaaattgggcaatctagcatccgggtgatgataacaacactgacaaactgctgacacagaacccccaaattctttatcatcacagaataaataatactccttaaaatgaatcataggcaaacccttaggtcaaaatccagttgggtgtatttttgacttgttcctttgagtgagggcccctcttcctatccttcttcctccatttaggtactcaagtttttctagtgtaaaagtgtcacttttgtgaatgtgagtcccctctttgcctttctctctcaacatttccatttccctcatcttctagtctggaggttgctctgctgagtccccgcctcccacagctccttggccacagtccgaggctggtgggtggaacgctgtttgtcagggactgtctgggtcagaagtggctgggctgctgctcagctggagggacagacacggtctccagctgcacagccagtggataaaggaccctttcactgtcctctcttctcctcacaggataacggatcacaggagtttctttttcctttcctgctccttacccagctgtcacagcatccccttccctagcattctgcctcccagatggaacatggggacagaaagctagagagatccatcattggcacctggaaactatctaccccaaatttatatctaaaaggaaagagtctcatctaaatcaaaatatttgccctcttgtcaagcgtcatgtccccttcaattcctcagtttccactgaatttccgtctggagatttttattcccatttctcttgcagccaaggtcagcaatcccccagtcacttgttgtgggggctacttttcttcaatagactgtttgttttgttttcgactcagtttcttgtttcaatttctgcttttctttccccttttcactcctccctagccagttgctctctgacccttcactaattccgcctcctcctctcctgatttctttccagattgttcttcactctgtcccatttcactctctggcctcacgcccctcccaatgtcacccatccctttctcattctcatttgttccccttattcttttggtaatttctgcccccgtgatccttatcttttctgtcctaaatgttctgtttgtcttcctttccctcatccgataaactgaatccagtgagaaggaaagacacttcctgccctatgaaattgtgccattgcattttaacaaaaataagcactgccagtaaaattgcttaacactaatgaaacataaatgtttgtagaaagacaggaagcaggacaaaaagtacttatttgctatgattgaagttaaaatttgaaactgtgaactgaaaaggagacattcttttaatagttaatgagccaaagttggtaaacgcagtgttaatatttctagggtttatgaccaattctgtcctactaagcatgttaatcaaatattggacaatttattacctctttgtataattcttgttttttaaaattattaattttaatagcataaatccattgtaaaaaaaattaaaaatagaaaaggatataccatgaagttattttcccctgtacccaaatcctaggccacttttccaaatgtaaacacagttcattcataataataatgtgtatatgtatgtttatataacatgcacataaataatatgtatatataactatgtttctctatatgtttattctcccctttttatacaaatggaagcatactatacatattataatgcaacttgcttcattcacataacgatacaggatggaataaatttcacataagcacatataaatctacttcactcttttccatgattgcatagcacccccacttttttagagattcaggggattcatgtgcaggtttcttacatggatataatgcataatggtttcttacatggatataatgcataatggtttcttacatggatataatgcataatggtgaggtttgggtttctagcatacccatcacccagatagtgaatactgtacccaataggtaagtttttaacccttaccccacttccacccttcccccttttgagaactccatattatcaatataccataactcagcaattctaaacatttttggtctctgaaaactttatattcttaaaaattactaaa

SEQ ID NO: 42794 - DNA, 3167 bp, Homo sapiens
ttccattccctcattcccccaaactgaatatcctcatccaaaataaacatttgtagtccctaagacacggtttacagaccctactccctattttaggcatcttccagtctgcttacaccatttttctaatatgaaatactaaaacctgaaaaaaattattttagacctttttttctatgatcattgtcttatacactcttgacttatattaagcttgatattaactgaagcttcggagatgtttttatgtcagttaccattacacaacatcagcctatgctttatttgtgtgactaatttttgtttgtttctgagtttaggactttacatttatttatatttaaaatttttcatctcaattttttttttgcatatttcaagctatcattatagactactgagacttcttcagccttgagtctgtcattcatatgacatatgttgtattagcttatcctctcctaaaccaaagttgaaatgaatactaaataaactcaaaatcaagtccaggaacttctatctgaatcctattttcaggttctctaaggctccatgcaggggaaatttacatgttctatgtgcctttgagccagaattatccttgagcattttgatgcccagaaatgactaaatgtctcagggcatttgtttgctttaggttaagctggagaagtttcaaattgtgtagtaatctttttctttaagcgatggtatttcatttcagcttgaagtcctgttttcgaacggaaccttagtagatttctacctttcctttcctttttttccataatgtagatctcatttcatgctcctcccaatctctacctcaaccttacctcagaagactttatactgttcttaagagatcatgttaatccatcaagagtaaacacactggagagcaggaacccaaagccacccgagtggagagacagacacaagcacagagtgagactgtacttcacatctggaaattccctcattcctcttttgctgctctactgttggtattactttaacatgaaatggagctgacaatttgaactgtgtaaatagaagcccttaacaaaatgtacctcatagtaaaatgatggtttaatgaaacctacagattagagttctgctttaagtcaacaaggtgttattttaacaaacttccaagctctaaagatgtagagcacagtttacaggtatatggcacactcaaagatctgctacctacaggctctgacttgcaatcagaggcatttatcttatttggttcaggcaaggcagtatcaggtgcagctaagatcctttaagaaaaagagttggaaaactcatagcttggccactcccttgctctgtgactttgggcaagtcatttcatctatgtgggcttgtttcaacttttataaatcgaggtggtgctgaattatatcatcctgaagtctcttttagttttaacattatcattcttctaaatatgtttttatgcatgaagtttacaatgtttgtgattataaaatgattcattaaagaaaaattagacaaaataaagagaaaaatctttgtaaaatcactacctaaaaactgctgttaatatttttgtttatttttctaattctattttctatacatatttctacataatatttaagtactagacacatgtatgatgtttgttcacctagggctcctccagcctgggcgtacataccttacaccaatgtgaccggacctctctggccactggatacaaccacagtccattctaactaacgaaggacctagaagttgtggtttgactgaaacaaacaaaaaaatgagctagaccactcaatttaggaatttggaattgggagactgagagatgaaatcaattagtaatgaggctgagatgagcagatgcatgatataattgaagctaaggaaaacattttggacaatgtgcccgctgaagttatgaagacagcaaaattatgtttaagggaaggaggttgaagtggtagagtgagaaatatggagtaggcatgcaggtagaagccttgacaggaaaatctagtagcctgagagaagacctttgtgcttagtaattttccagattcagtttccaagaggtctgttattgactcctgtgctttgattctcatgaggctcctgaaacatacttaaaataaaagtccttttatctgagcggggtcaatgttactggcaaccaaaagagacctgactcaatttaaatttgaattaagatattttattgatgattataaactatttccccaagttattacatatgctttagatgcatagttttcaatggctaaataataatgtatagtaggatacattatataaagaacctgagtgtcagtgaagctgattactgttaatgctgttagaattattccctaggtattaaaaaatctaagacctgaagttacccagaggattctggaaaagctccaacattctttcaagaatccttttacctgctagaagaggcaacacacacacacacacacacacacacacacacacacacacacacacagctacacagcttaatcattctttcaagaatccttttacctgctagaaaaggcaacacacacacacacgcacacacacacacagctacacagcttaatcagtagaatttaacatggataaattcagcctgacttcaaaaaaatctcgagtgctgttttcctaacttaatccattacaaatgtttttatgagggcacagtgggtattctccagcttccccatgccatcataattcagacagagccccaccctaatctgatcttagtcatggaacaagaaaatctgggacaaaggccactgtgaagttcagatgagcaagttaggcacacaggaacaacatgtgcacctaaactctaaatccacattttctaatagaaagattaaaagaatatacaatgccataattatctttataagaaaggtcaaaatggtatcagctcatagacgaaatggtatcagctcaagcaatggcatcaccaatgcttggtaaagcctccagcaagccatgaggaatctaggctccattaaaaacatgatatcaaatgttgccctttgcaaatctggaaattgcttaagaaaaaaaaaaaaatctatccccttccctcacacaaattttatacacatggtaacttg

SEQ ID NO: 42795 - DNA, 504 bp, Homo sapiens
tggcttcacagagctcagtgattttttttttcctatctatgtgaaaagagggtatatgcatcctacggcagccttaggtcatgtgttttgactaccctcaggtggtacaaattaaagtttctttttccctcagtaatacaccaggccatctacttagcatttttccatcagaagttccacttgatatttttcacctgggttctggaagagacattagggtggtgttaatggaaaagtatcagcacattgcgacaaggaaagaataaacaatatctctgtaatacaaatatgactctgtgccctttgatagcagcacattccacagcagcaaggatctgaggatggtgtgtgttgtgttcgtgtgcatatgctgttaacaaaacttttatttatatttaaacatcagtatatggtgatgtgtgtgtgcatttagtccatacatgttgtaccatatgttttaacctttaaagataagctgtaaagcaggatcagaagaacaagaat

SEQ ID NO: 42796 - DNA, 4395 bp, Homo sapiens
caatttatccatttcactattgatggacattgtattgttttcagtttgaagctgttacaaacaatgcagctataagtatccttgtctataccttttggtacacatatatacatttttctatggtgtttgtaaatgtgaatagacttgctagatcatagactctgaatgtatccaatacagacaatgccaaaagttttctaaagtggttttaccaactttctgaaataccaaatttacactacctccagcagtatgtttctggaataccaaatttacactacctccttcatgaatgacactaggtgagcctgaacatctgcatttacttttctcttaatattacccagagctggattctgtcgcttgcaaataagaactttacaagacagctgaaaaatgtggagagaagaattacagattgagaatagcaagaagaaaggccctaaggccattatgtaacatcttgtattgacttcttgccaagcagatactgtattcacatgtttacacacacatacatccctagatagatgagagagagagagacagagagagagagagagacagagagagagagacagagagacagagagagagagagagacagacagagacagagacagagagaaacagacaggtggatagccagaaatcatctcagttaatcattctaacttgccaattttatgcaagctactatgttaggcaaaaccctatgaaacaggtatgattcacatttatttagattaggaaactcacatctaataagttcaaataacttagttaagatcaactacaagtagtgacaaaggaaggatttaaattaaacccaagattgtctggctccaaagactctgctgttcaccaatataccacaatgatatagattatttttaaacccaagaaagagttgatttatttataaagggtatttagagcatattctgttaactgtcaacaacttcaaacatcactagctatgttccagggttatttttttccagtgtctgtgtggagcatcctaggcaagagggtaggtgtgtcatgagaaagatggaacattccagggagtggagtgcatgacaaattgtttgtgaatattcttcattcactgccagctgctgatactgcattccaatttaactcaaaacagtcttaggtaataatgctaactaataatcataaacgattttgcatccctaacacattacaggtcagaatgctgctaagtcacaagaaaaccatacatttcttcaccatctacactcaagtctttttttttttaaagatgctgcttttctcagggtgagtgtagagtacaggagaaatataattttgtttgctgttatatttttatttcattctcatagttaaatacaaaatttgaatcagcttatcaaaatactgtataaatttaacctgtaggaattttatatattgtagtattggtatatttcaattggttagctagtgtggaaacatgtttggctttgttgctgttgttatgttggtaatgatttttgatgtttgattggcataaagttttactggttcatgacccctgataagattttttccttggatgagatctccctcaattcgctttttaagtttctatgattttaaaaacatagatgacataaaaaagaaaaattttaaaacttactagatttggaacacactaaggtcatttttgcatatcatgtagcacctataaagtcatgttacatcaaagggcaacattggaatccacctggaaatcaatagttacaacccctaagaaaggacttccctcggccaaataggaaagggtaaagtagggcaataaggagagtttaaatattttctttttgaagcctgtttaattacattgtttgataaaccaattctattttgaaagcctctctctaaaaattactattgagcgacagttacagtatcatctgttgcctgctgcttataatttacaagtgattgctacatgtaaattgtataattaatcagccttaaagagaagtgaaaactgtgccctccatccaaatgcaaagctaatttttggtgttggtactttctatttttgcagtttaggctgatgtgagtgtttagcagccacatgcacaccagctgctacttccaggagtgccactttaagtcttcagaatgtgggcagctgactccttcatgaatgacaccaggtgagcctgaatatcttaatatacttcatcctcagtcatattcacaggcaaggaaataccttcccactgtcagagaaaggcagcctcttctggagaagggcagatactcagcggatgcaaagcccagttgcgcagcaccaggaaaaagtacaccccagtaattcaagtaacactctttccaatcctcaatattctgaacggacagtctactctttttgagtgtccctagcatttaatttataatcataattttaaaaagatgatttctgaaccatgaaaattcactcaatagctaaagacagattgaggtagaattcagctctcgatggagaacaatccatttaggctctgaaattaaaaaaaaaaaaaaaaaagaaagaaaaaaaaaactcagctaagaaactcagagaatgagtcagcactgtggatccggaacctggtatttaggtgtcctcaccgccaaaggtgtctccaacctggtatttagtttccctgaatcagctaccttctaattcccattccccaatgtattgaatgatcctcttgacttaaactcttagagaaaagctaaaaatacaaacaagacatgacaacacagccattatattcttcttagcattctctttctaactttacaatttatctgttaatattagtatacgcatataaatagtttaaaaaataaaaacaaaagttgatccactttaatttattattacatttggtctatatctggactctacttgacctgataagaattgagaagttctagtaccaaccaccaaataaatgagagtgtaacagaaagtattatgacagaattcacagagtaaggaagagttattttaccaacttttacacaggagattcccctgcttttggctgaacatgaactctggtctctgtgaaacctatttgttttgcctgaaagttggaatctagctaatgtcaatgttagttttaccatcagtcaagaatttagcttaatattaaactttataataaactgagaggattcacttgcctgctgattttctatgggtggcatccacacatttgaaatatagctaagaattatgttaatttagtaaaaaacatgttgcagatgcagctgtttatttgcttttcatagcctatgatatcattccaatgcatgtgtcttgatttggaaggtctgatgcactctgagagtgactttgatttgagaataggctacacccaaagtagctgtaagctatggccatgcccatttgcttcaatgtcctaaagttaaatgtgtgtgtgcaaataaaagaaggtccctgttctttacaatcaggagtcaagtcaaaagacactgatttcaatttcacatttaactgtttaacagttatgatctctgaatagtattccatgggggcaagaagtctatgttttccttgctgctgtatccctagcacctaccattctgccttgtaaaaaacaagtgagtgaaaatattttttgagtccttgttgctgaattgcgttctgtgtgcatttctgtattttcttttgaaaacttatagtggacatatatttataataatgaaaaagaatgaaattttataatgcttaatattctttcttaatagtctaagtaaacttcttttccttatatgagccaatttgtcaattagtctacccagaaattataatttaaaaattttgagagaaataggaaatgtcttaattgtttcctggcactgcctacttttacaactactgcctgcaaacattttataaattcaccctgctccatgaggaatttataaattcaccatgaggaacagagtgaatttataaaaattgggcctgttgacaccgtgcacagctcctcctgccaggcctgagtgttcaaggtcagtggctgggctgatatgatggaatttccttcataataagataaaaaaaaaaaagccagaatctgttgtttttagaagataggtgcacttgcttgtcttgcttaatgggcctccggggatcaggtccacatgaacatctctgttcagaaagatggactctgctggagcaacttcacaaaaacaggacttcctgcaacctcctgcaacccagcattgcatatgttgtattgagttaagctactgagattttaggggctaaaaacaaattccctttcaatgagggaaaaggaagtgagtgttgaaaggtactggttcagg

SEQ ID NO: 42797 - DNA, 2520 bp, Homo sapiens
ttcagttctgtgcaagtaactcagataaataatgcaattcattcatttgttcaacaagtaatgactgaacaaggcattttctagatgctgcaaatacaacactgaacaaaacagaaaatgtctcgccctcatggagcttagactccatggaactcagattcgaggggtgacataaaacatcagtaagtgtaattggtagtatttcagaaagtaaaagttcgagaaacaaagataaatcagggaagggggatagggagtgtctagggcagggaaggattgacatattcctgatatctatgacagtgcctggcaccaagtaagtcttcagtgaatgaggaccagaacatactgtcattgtaataacactcagcttccctgcagtttttctcctggattagtctaatacatctctttatatgtatatggccttgagaatttgccctatttccttcattgcccaataaagtagtggcagatactagcctctgaaaagaaaacagatcagcttccattggtgatatttctttgactccttccccaactgctcactgccttctcctgttccaaacttgtcttcgctgcactcctgaatattggttctatttttttccacaagctactcttgattcttggtacttagtgctgacagttaagctccccagtaaaccttcaatcttcctgaagaatgtgtctcatttcctgaattagagaagtcatttggtgtctgctcacccaaactgtctttcgagggacttttgtccactctaaccccgatagctaagcagccatattttaaaaacacaattccttttcttttcttccctcctctcaccctcatccagggttcaggtaattacactaatgtcaccatctgagccaagctaatcctttggcttgctggtattaaaagaaagatgagggccaggcatggtggcttatgcctgtaatcccagcaatttgggaggccgaggtgggcagatcacctgaggtcaggggttcaagaccagcctgaccaacatagtgaaaccccgtctctactaaaaatacaaaattagttgggcgtgggggtgcatgcctgtaatcctagctactcgggaggctgaggcaggagactcgcttgaacctgggaggtggaggtcgcagtgagctgaaatggtaccactgcactttagcctgggcaacaaaagtgaaactccatctcaaaaaaaaaaaaaaaaaaaaaaaaaagaaagatgagctgggataactaagttctctgtctcctaaatttgaatttaattatgcaggcagactataccagttggtagtataaattaaagctgaagaaaaagcaccatgaagcagagttgggttcatagcaaggcacatgaaatgcaaaatcatgaagcaatagacactgtaagtaagcagaaaaagcctcagagcaaagaaaggaaaacaaatctgacactgggtggtggaaccagaaatagaagaaaagagagaaagaaggcggacgagtgtactttattattccctagagttgtaccacaagagctttctagtttcagttctaattacagtactaaatcaatatatatccctaatgttcattagctgagcattgaaggacttcctgcctcagagcctttgcccttcctgttccttctgcctagaacactccctgcaccccctttcccattcatccattcagcaaataatggagaaaaaatgaaacagcaagggcaaagcccctgaggctctgcctcatatttctgtttactccctgccttccttcaggtctctgcttaaatgtcacctatgacagaagcattacaggttgatggtttataaaatgacaacttgcccatcattttctgcctctttctttattttgttttattctttttcatagcactatcaccatttgacaaattgtgtagttatttttgtgttttgcttgttttcccaactaaaaggtgaactctgcaagacagagcaacttcgtcagattaactactatatctccagtgcctaggacagtacgtagtaggtgctcagtaaatatttgcttagtgaatgaataaatccagagaaaggtccctagaggagatgaagctgtgctgggtcacaaacagtttttcatgtgaatacagataggaaaggcattctaagcacaggaaatagcattagctaaagctcaaaatcaagaaacaaaatagtatacaaagccacaaaaatatgaacaaattggtgcacatatagtgtagttgaaatgagatgcagggacacagtaattagagacaagtgtagatacataagccagattatgcagtattagatgccatgctaaggaacatgggctttattcagcaggcgaagagcatccactgaaaagttttaagcatatattaggactatatggtaggcaaaattctaagatagttcctcaaattcccagcccaagtgtacccatatcttctctcggttattgaagtaaacactaatatataacataacataacataacataacataaca

SEQ ID NO: 42798 - DNA, 2632 bp, Homo sapiens
cctgacctaatcaggtgagcccttaaaagggactgagctttctttctttctttttttttttagacaggctctctctgtcatctgggctggggtgcagtggtgcaatctcagcttacggcaacccccacctcacctcctgggttcaagcgagtctcctgcctcagtaaagatgaggtctcaccacgttggtcaggctcgtctcgaactcctgacctcaagtgatccaccagccttggcctcccaaagtgctagaattacaggtgtgagccaccgcacccagcctgagctcttttgataaattggatataagtacgattctccattgctggctggggccatgtgacaagcaatgggaatggcctgtaggaaatgagagggcccctggctaacaaccagcaagggaatggcacctcagtcctacaatggaaaggaattgaaatctgccagcagcctgaatgagcctggaagtgaatcccaagttccagctgagaccacagtcaagcaacaccatgatttcaacctagtgagaccctgagcagagatccagctactccttgcctacagaaatgtgagctaacaaatgggtgtttctttatgccactgtgcttgtggtaatctgttatactagaatagaaaaactgctagactgtgtggaaaacagcttggagagggttaagactagagacagggagccagggaggggggtgctgcagtcatccagacatgggaggaatgcccagaattgcaatgatcctatacctctgaaattcataggggccttccttccctgctgagctgagcacacaactgcctttgaactctacgctttaaagcaccctgtaactttggaggaagctgctttccattgataggttggctccaccagctctgatcagtccattcccagcttttccatcttcctgccaacatgcggtatcaacaagtttcctgtctaagccccctgagttgtaaaaatcagtcatgcttctcaccaatagcttcctttggaggcatggacacatagcagctctcaaccttggcagcccatgacaatggtcttgagagcttttaaaatcatgatatccagcccaaccactcagagattctcattcaactgggtctcaggcatcgtgtttatttgtttgtttgtttgttttaactctttcagtgattgtggcctatagccctggttgaaaacaacagaaatatagcctcaatttgaaggtacatgatttgagagatgatatttagtaataaaatgtcattttctcatctatctttcagaatagcattatggaatattctcttttcgcctccctcttctcttcttccttctgcttccaactttcccagtaagaaaactaacatcattattatgtaaaatttgttacattaacatttcattatagaaatgatttcaagtagttgatgaggagactaaggctcaaaataagttaaatgaattgcttcataatcacatcgtttgtgggctaaacacaatctcaaaccatcttcatgtcccaaaccttatgttttccccatcaacaccattccataaggaactgtaaagaatatatctacctctgtttatatcagccaccacctactgactatgttctagatactatcaagtatgtttcagatttcatttgagtctcacattgatgttatgtggtaagaatagatacttccacagtgataaaactgacgtttgaagtggttaaaaaactaacccagggtcagacaacaagtaaatgattaattcagaatatatgtagcaatcttctgattccaagttcagtgttcctactgtattcacttgatcctagagacgaatgactctgtcaaaggcagaatatccttggaaagaacattcttcagcccaaataaaataaaaataatccccactatttcttcaagtttctcccccaccacttggggtactcacataaattctccacttgattctaaagctgcactttatgaaacagcttgctgataactacagtgatcctaataagatactgtattccaaaaatcatgtgactatacaggcacacattgacacatatgtgaatacgagtgacaaacacaagacatctataccacagaaagtgaattatgattattccgggaagtgagtgatttttttccttcttgttctccttcactttctctttcttctccttctccctgcccctcctcctcttcttctttttcttcttcttccatttctctttctaaattttccacaatgcaaatgtaatattttataattaggaaaaagttaaatgatgaaaagagaaaaaaatgacagtctccaaaattcttttttcctgcctcatctatcccactgctatgtattaatactcaacccctctcctccaaagtttatttggtattaggctcaaataaaccctctccttatatattgctatattcattcatttacaactgcagctacatgcctataaattgcccatgacaatagaaagataagtaatattctccctttgtcctcaagaacctcacatctagcgtgacaaactaattaatgggttattattacataactttggtattacaccataagaaagaaggaacgccttcattctctacttttcatcttgag

SEQ ID NO: 42799 - DNA, 2609 bp, Homo sapiens
tgctggtatggatttctcctgtttgctgtggaatagaatttagggaagtaatgagggagccctgtcgtgttcaccacacacaggctccatcagtgcaaaatttcactcggcagatgaacacagacagatgcacattttcttcaccaatgaaatattaaacatgacagttgtgttactcatcgggaaatgctgcatgcaaaatgcatgtgtaacccacgaggtcttcctcatttcatccctcctgcttggctagggttctaggagatgatattcctcctgcaacgatgttcaggtatccaattccaaaagttacggtcaatggtatctttgggaagataatttaaaggcttttggctttaaattaaggatccattaagataataaaatgttgtctttgactttattgttattctgcctaagggatctgtgggagaacacaggattaaaaactatggagagaaagattcccatcactatggaaacagattcatttatttttataggctgatttctaattcctctccctgggcaaagctcccactaacttctgatgctaggagatgatgcttattcaacagatattttgttgcttggggttgcttttcctgtttatttggagagaagggtggtaggagaggagggctcagtaaagaggcaagctgtataagaatatgttttcagtggtttgacttaaatcagagtagccaactgattggagtgagaaggccatatttagaactcactaccaatataggaaaaggaaaccccttaagtgttactagcttgacatcaactcttaaaaaatgcaaaatacagagagagcagtttcaagaagcataactcctgaataaaattctgtctgttgactatgttcagcctagaacctcataactatatatagagaacatcacaaagggtagcattctttaggaaccacaataggtttccagtcaactatttttaactactcatttcttactgtttttgaagtttatattacccaatgggatgccaaattctctctcttacaagcagggatcttgtggataaggaacagctcttacttcccctattagctacttccaagaacaaatgaggattgtaattgatacctgctgctatgctgttgcactcttagcctgagaagtgctagggatataaatagcagcttgatgatttaactcaacctggtttaagagatcatgtgttgctgttactttgcatgaaaatgacatcatgcctggttattcaatgtgctgtgcaatccaacaaactgaggatggccaatcacagatctctgtatcagaatttggtcaaagctctggaatgcaggatgaaacagtgcatgcagaactggtagaaagatcagtggagcaattcatccatcaaatctgaccaaacagctgccactcccctttcaggcaactcagacattagccatcagtcctggaaagccataggagcaaagccagttaaatcatgattcagcaaattgaaattcaagtaaagtgcaatgcagcagcgtgtttgcgcacgtgtgtgggtgtacgtatatgaagaaagccacaggtgtggtgaaagattccctagattgagttccctatttaatctttaatatagaggagacaaaatttagaaattggttttaaaatgtctgtttcacattgccaaatatttgacctcaggaaatacctggatgtttggccaacttcttcatcatgtatttgacacaggtaccgttctatgcttacttcagtgcacatatgcacacaggccttcagagacggttagcccatttaccccatttggctgcctcttatccaaaggactctaagtgacactgaaagcaggatgcagaggtgggtaaaaatatgtgtaggagaagactaagtaactcaacctgggatggaagagtacatgatgtaatattgcatatcccaaggccacattttccacagcaggtgggggagggtggtatatgatttgaggattttggcaaaagcactggcatccctctgtattagaaataaaaaccaagagatatccgtataatagaaaactggataaatcacacattaaaatctttatttcaagtcaataaccgtatgttgaaagaaatgtgcaaggtactaggcaggagacaacattaccatacacaggcctcgccctcaatgcctttacagtccggtgaaggattgagacacagaaacaatgaatcattggcaaaagaaagggggaaggaggagtctaacgtgatgctaagattcctacttgagtgactagcaagaaatatggaatgatgagcaattaaatttttttttcaaatattacaaaggcaacacgtgctcgttcatccccaccacaccccaccctgggaaataacattaagtcagctgattattccaccattcccatgtccattcaaacacacaaacacatatacacaggtagagttttttgttatttttgtttttataataacgggatgatgtacatattaatttgcaagctgctttattcacttcagaatatatcatagatgcgttttcacactgaagagctgcaagatggccataattcattgtcatctattctgctctgatgggaat

SEQ ID NO: 42800 - DNA, 2284 bp, Homo sapiens
attagcaaaggaggctgtgggtgtgtctgagaggtaggtggaagcagaaagagtgcaaactaagggaaacaagaggaagagccagtctcaaaaagcagaacctggactacggcatcaaacgtggggtgagatctttaatcacagtgacctggatgttgctattatatctcatgtttagggcacagaaatggaaattccaatctcatatttttttaaaaaaattttgcaattcccatggtagccttgggaattgcaagtgccaactgcaaggaatagggtgatactgacatgtcaaatatacttttatccaaaaatcatcccagggcgtcccagctattggggattatactctacaccccacaagaagttcttcagcaacactggaaatgagttggaaaatggtcatttcccctccccatgcccgccttgtgaaagaagccctgtcaatcacagaataaaaggccctaaatcattcactgagcagaaaaatagcctgtaaattatcaaaagcttattacatccatgttgacagcacataggctatgatgctgaaatttcactctcatcatctctttctggacaacggaaatggagtcttcacctgcctatttcaaaagtcctcttgatgataagctctaaatatgttgctgcaacacaccatgtgattatctacatcatacacctcatgacattgtcctgtgtttgtggaggggattcaggacaggaagtgactctgtcataactgggcacacttatgtacacacttaaaatgttcaacctccagggaacactgacaatcccctccctctgcctgctcatttcttttgtttagtgatgacccactcctattgataagcagcatatgtaggaaatgctccagaggaaaagaacagccattttacactatgactaggccatacttcaactggcctgatgagaaggacagcaagattttcaacactggcctcatggagtcagatgatgcacaggtatcaaatgctatccctcagacaggtttttaagaggacagtgtttgcacaacagtgataaaggctatcctgggaattgcaaattcaatttgacttacagcagtcatgctttcctctggagacagagatgatttgagctgcagggaaacacatacacacacacacacacacacacacacacaactccttgcactgcctgaaaattagtatggattgacaaaatgaaatagcatagtagactggcagagagatgataattgcagtagggcaaccagggctggttgagcccagaggaggaaattatcattttgattatgttcaggagaatctatttatgagtacaggtttcctagttgagtcagattaaatatttttctggctctaaaacacaaaatttctataaaaataaacttaggtaaattctttgacccagaatcttttcaatcatttctgcttgatgaaaagcagtcgtacaggggaaggcttctcatttatctcacggatcatttacacctgcaacttggcagcattcttaccaagtgtcctctccacacagccacctgccatacccgagtctccttttcctcatgcttcttcagcccattggctcaccccacgtggcagggaacacagcctctgtaagaatgaggaagtgaaagcactgtgcaaaagaaaagctggtatacaaggctggtgatacgtctgtaaaggcaaactgcaacacgttaaacttgaaattcggacaaacctgagttcaaattccatctcagccacttacaaggtggatgaccttgggcaagttacacaacctttgtttccttatgtgtaagacagggaaatcaatattcacttcttaggattgtggtaaggattggaggggaaaattaataatcaatggatccagacatgcacatgtttagtgtccctggcatgttgtaggcaccactacaatgtaatgattatgtggagaatctataaaatcctataaaaatttgcctgagtcgttgactccaaagtaataaactagtttgctttaatgttaaatgccaaaagcattactcaagaaatattatttcctgattgttttttctcataaaacccacaacattctttctcatcaagttggctagagggttttgagggttggggaccccactggacccaggttttgttctaactgaattgcattaaggttagaaaagaatgaatgatttaggaagctatttctaattcctttatgtctgtaaaacactcaaataaaataaatctgacaaaatcagtagatttcccaaact

SEQ ID NO: 42801 - DNA, 2232 bp, Homo sapiens
acatcctttgcacattcttctaggtggttatttgtctttgcttactgatttgtagaaattcttttaaaatatattgtgaacaatagtactttatctattatttacaaatattacaaatttcttctccctgtcaatggcttctgttttaacattgtttatgagtaactagttactaattaaatacagaagccaaaagaagtaagcacagactctggacttggcactattacatgaacccttcaataagctaaaagatgaaaaaattaagactcaaaaacaaagttgtaactagaggaaccaacgtttaaagttgcatctggaaaccacaaatctagtgttctccacaaaccaacacactttctcatgtgttccctcttgcagaaacattgtaaagccttatcactcactgttaaaatgtgcaaagatagaatttatggcatcagaaatatttaggaaagcttgctaaaaagccagagatttttattttttaaaactgggattagtcatagaaatatgcattgtaaacaagcttcccaggtgataatgatacagcctgccagtgagccagactttgaagacactcttgacagacagttgagaaaccagagctcttactgaagctggtgggggcccatagaaagtctgggtgttccagctgccagggcaaatatttgatgtgcctccctcctgctgatctagagactccatgaggttagggatatgcctcttctgtttactcccagcatctagcacagtgcccaactcggtaaatacttgttgaatgaggaaatgctctacttaacacattctgtaagccactgcccctggctaggaagagtcttaggaaatcccgcacctagcctcaaattctcaacttatctctcctgttaaaagggagataggcaccaatgattcattccacatgccaagtgctcttggcctcagttattgaccctctggactgacaattgtcatccaaaagtacatatcatgaaaacaaatgatcctaattatggttgtatctataaaatgacagtcaattcagtagagaagcaaatttatctaactctttactatgtgaaagcaaatacccacagtttctttgtaagctaatgctcaaaaggtacttattagttcccctttccatacctctcttttcaccttatcctggttccataaagtagaacaagttcctaagggccccataactaatgagttctctttgaggaaagcatgattcattgagcctaagcttttagccctgacaattacctgcatccagtttaaaccacccctgtctttaatcacaactgtcagcattttccttcctctatgctttagtcatacactgttgagaagatcagtgggtcttctctccaaggcaggccagcaatgatgcctttaagctagataagaacgtaccatggcagatctggctgtgatgcaatgttcagagatgtttagcagggaagaaaaaaaaagtcagcatgtctgagagctttgtcacctccaaccagttccagttccttaaaggagtagatatctctgaatattctcaaaaggtgtaatgaagagaggcccagagaagtatatctgagtgaaaagtaggatacagtcatgaggggatgcagttcagggaggttctcacttatcttcgatatttttatttttagaaataacattaaaattattttaagtataaagatgtcaaaactccttataggcttaatcaagaaactcacggaaatgttactgaaagatagaatgaagtcatcttctccatagctagaggaggtgatactgggacgcttattttctcattcctaaagtgtggtgagatcagtggcatgagctgcaggtggcagctgaacagaggtgggcggaatatcttctctggaggagggtatggaattcattctctctcttccacaggccagcagccaagcacaaccctcttctgatcttcagaacaattggcttctcttcaattcttccctggaagaggcagactgaagggggatccacatagaactgttgtttgggcctcctgcactgtgggtgtgtgtgggagacacttacaagcataatgcacacagagtataggaatttattggctggtttcatcaactgactgtagtttctacagctcagatgaaccaaacccatttttttgcctgaaaagttatatatagcctcctgaaaatgttttaagacatgtaattctgattaatt

SEQ ID NO: 42802 - DNA, 2569 bp, Homo sapiens
gaattttgggaaaagccctgagagtgctttctctttgatctaattcccagaaagacttcattcaatccatccaagggagtgactgaactggtaataattctctagaatagagatttcccaattgctctatgctcattccaattttttcatttgtaaggtattttctattagtttaatccttctctgtctctttctcccttcctcttccttttcccctctctccctctccccctctctctccttagccagcaaaatctggcctaaccagcaggctattaaacagcacttccacatgctacagtccaatgatttggtaattaattttcataatgatgatctggaaggatttctacagcctcttgaaagatccaagaaaatatataccctactggttatacatatgctttgagtgtgagaggtagcctgggtgtccagttctggtggtgtcatttactagctgtgtggcctcgggcacgttacttaacctctctgcctattaccatttcctcatctgtgatacgaggatacaaagtttattaagaaagatagcagttaacactctagttatgaaatatgtcctatgaaccagacactatgccaattgatttgcctgaattattttatttaaccctcacaacaactgctgagtcaatattaaggggatttcatcacagtctcatttgttcaatattagcaatacacatattgtacctatggtgactataaaccagaatatctaattaatgtaaacatctcatttcctcactagaagaagacacaggcagtctacttcaattattatccaaagctcttctgttcagatgcgcttttgaattcagaaaatttttggactttagaaagacaatatggttcatataacaaacagaacacactggtctggggcagcatcctgtaactgaacgcattaacatttctgctctgaaacatgaatcttctccctaaagagaacaacacagagcttcctgtcatctcaaaacaggttttgttaccaaaagtcattcagaacaggtagttttaccatcaaataagttagaaaagaaaaaaataaataaacttaggctattgtttgtatttcaaaatttcagataggacattgtgaactttattacacaaaagcactaaataaagaatcaagattctagtcctggctctagtagtaaccgctgtgtaattgtgggcaaattgccaaggtgctctggtttcagattcttcatctacaaaataggtgactactactttctcctaagttatacagaagtagctgtgaagatcaaatgagatagaattcatcaaagtattttgaataagtgaagtgtttaccaaattcaagctgtttattatcttttaaaatgattttttcaatgattatagatttaattatgcactactgcttcttgtttgaatggcacagtgttgcttacatgggaaaagattccccaattaaatctcctttttgcatgtatcactgctgttgtttcttatacatcaataaagatcagcaaatacatgatgactgcactactgaaatatttctctgggttaaactacaagaatcacctctaggaaataatgataagctgctgtgtcaaatcactgcagttactgaatacctgaaagaccatttttttgttttgaagaagcaagctgttcaagtgtcaggttgattttaacctgattttacaacttcttaaaaatctgctcatgtcttccttttctgggcggtctatgaagacagcattggcctgggagtttgatgatccagttgctagtcccagcctgacctctaatgttctgtgtcatctaggacaagtcacaacacctctgagatgaactctccaagtccctgagcctagtcagactttgggaggcaagagagggttcactgctcctatttgttgtccccaacagaagactttcaagccctggttgttcacaggattcaagccctggttgttcctgccacacactcctggctggctgggagctgcctttgcactgatatcaatcacatgttgctgatgtcagcccagctgtgacagctgaggccaccaccacccacagctgactgagtgagtcacatctgcctgctttctctttgacatgaacctctcggaagcccagggacagagcccataacctgcttctccctttgcagctctttatattctttcagcttgcacagtctccatggctgagtgatttgtcccattagccatggttttacaaaattaaccatgaatgttctccagcatccgtggtaacctttctgccaaggagcaattataactataagatatcttcttttgatgttgacttttacaaacagaggatccctggcaattaaaatgcaatgaggtggttatctcattaaaaaaattataaatactccctttcatagagacgaaggacacattaagtaacctttactatataataaagctggtaattattatcaataacagaaggacattctgtgttttaaaatccaaggtccatgacatatgtgaaatggtagggtaaatgtaatatagaaaaaaaaaaaacacta

SEQ ID NO: 42803 - DNA, 1382 bp, Homo sapiens
tgcctttcatgactgacccctgcccactccttcaaaattaacttgtcttccagtcccctctctcccaacttgaaccacaaaggtctccattcccccctcattatcaccaatatcctttcctccacagggcctttgcacaagctgctccctctgcctggaatgctcctatctcctttcacctggttgaactctctgtccctcagatcaccgaacaagctctctctggccatgctgaaccctcataatagctcttgtggtccagggcacctctctttcctagccctctttacagttacaatttgacatttgttttatgtaactcatgtctaattagcttcctgtaatatcccctatgcctagaacataattatcattcaataaatacttattgactggcttattgattgagtaaataatatttgtcacctcattggactatgaacctcatgaaggaggaaaccatgtttattcttccactgtattctcagcacccagtaaaatgcctgacacatgagataatatctactgagcaaatgtctaaaccagagcacagttttgttacctctatgacaattatttcccaggacccttaaaaaaataaccttcaattcttttcgtttccagacaaaaactccaatataaacagaaggcagggatttcaccattatctccaggtggccaaatctgatagaacatgcaaaagctagatttcagcagggacctccaggactcacccatctcctccacatgctgcctgccttcctgaacaggaactcagggacgacatcagtgcagttgagtttgtatcctctgtcgtcctctgaccccactcccaccaccatcctccacctctttgatgtccatcttagactacacatgtgcttctaataagtgcaattctgaagaaaagaaaaggaaaagtgagtgccatctggcatcattggttttcatggctttgtgtatgttaaactcagtatatctattgatatgaatagatatgaatatgatatgaatagaaaagaaaggaaaggaaaagaaatcaccaaatgggtaatcacatctccagacaacttctgacaagatacttttcttcaagcaaaaagaatgataaacaagactccctctgtctttgatggggcacaggatgactgagtatgacttcaggatctgtcaccattgtcacaaccccttctgaaagctagaactatctgctgacactgggccaacctttgctactaaaagaaatcaaaactccccctctctctcaatttgtagaatatggcaatcctttccttgtatgagcagaaggcagaacttcatcactctgggtttgaaagcacccctaacccctgacccaagggaagcttggaactcgcatttca

SEQ ID NO: 42804 - DNA, 539 bp, Homo sapiens
taagtgatggtttgacagaaagtcgatggctacacaattttactgcataccagaaataaaaataaaaaggtctggtttgccataaacacatttcataattagagcactgacagatggagtccttattctggttctaaattgctgcatcttcatttcttcagggtttattttgagttccacctgcacaagcactccaagttaaaggataacaagaaatgattcatgtgttccccagggcttggggaaatcccatgcttctttttgtctttcattctttaccaactgccctgggcccatttattaaacaaacaatactgagcattcatgttccaggattaggctgggtactgctgggaggatagagaagaatgagatatatgcatgccttcaagagatgatgaagctgtgaagcttattctttgagaagtttgactaagttctgttttggttctcttttcttttctcttccttgtcttccccatccttcctgtgatctcgtttctctttgtgccaattctatgcttgtacacacttctata

SEQ ID NO: 42805 - DNA, 2888 bp, Homo sapiens
atgctaggccggagataggaacagctccagtcaagtgcaggcccgatcgactaagaacttaaccagagcccgcggagcaaaaccaatgtaccaacaagaaactcggagcatttcaccagacccaatttggtctgcatgtcaaaatgtagggcctgtatgagtatgccattgtgcgatagcgtatggtggagaaaatgagtaaatccttaggcgaaacttattcaaaatcccaagaaaacagtcggcctaaggccgacaagggagaggcagaggtggacagcctacgcgttccccaaaacatgtgcttataaacaatcgcatcgtttcaggatggtggagaagcaccaaataaaccttagtaatacaaacagagaagctgtttgtgtctgtgtttttatgcccaagactgtagaaaaagggaaaaagaggggacagcatggaaagaaaaaaggtaccccacgacaggcgggaaaaaatcctggcggctaagtcggtgggaggagacccatggcgagggaggaaaggagggcgggccgaggagcagcatggtgacggctaaaggtggaaacgtgtgtgatgggggaggggggcgataagcaggcaaaggaagaaggaaatgaaggtccggggaacccaacatagaaaaagggagaccagtgcaaggaggctgcatgggggcccggagaacgggctgagagcgggaaccaggcctaatggcgggggaataaagagggggagggggactagttgggcctgactatcctgggatgccccttactcacccttcatcctcctcgttcttactggcgtcaatcttcgccccctccgactcggcgctgcccccttcggtgcctccagacgcggttccgcccccggtcccggctccgcttcccgccgccgccgctgccccctgtgtcgccgccaccatggctccctcctgctcgcccgccgagccgcctaccgccgccgttgccgctgccgccgccccgtccccgccgaactgctcctccgacatagtgctagtgtctccgccgctgccgccgagactacacccgccgctgccgcgaaccgaaactagcagcaaagtaatccccgccgctgccgcgcgcccgctctacctcgcgaagcacacaagacagggaaggcgcgcgcgtggctgcaaaggctcctgcgcctctccctggcctgcccccttcgcctcccactctcgcgcggcgcacactcccgctctctcccgctgcactaaaaaagaataagcaccagcggcggccgctctcgcctcctcctcgctttaatggcgccgccgcggaccacctaaaatggccgacggaagaacggcgcgtcccggtcacgtgacgcgagagcgcgcccttcgcgcgtccccccacccctatccccctagttttttttttttccctttcctcctcggtcccgccctctcgctaccctttataccttcctctcacgctccgcgttgcacagccttgggggcctttaaaaggaaccggaagtgtcgtgagctaagacagtcgcgcggggaccatcgagaacaaggagtgctgtttcgaagtagcggctagaggggccccctgcctccgcccccgcccttccgaggattcctggagtccactcacccctccccaccactccagtagcggcgggagcagcagcgttaggccggggtgtggctgcacctctgcgaaggctgtcgtgccccgtgcagctgcggcgttcgggtgggggaggggaggctcacaccctgcggcggcttaagcctggatttacgcactggaggagggaattagccctgagatgtcagccctgtgcccctggcgctgtccacccggacgcccgcggagcgccaggcgccgcagcggaccgcgcgcgcactgattgccgcagctactctccctgccgtcgccgcccgggaccgggtgacattgaggttttcgtctatcgccgctgggccgatagggcttctttttaagatttggctttccaagtaagatttttgtttgcctgcttttctcctggaatttttttgtttttggtcgaagaagcaggtaacttgcatatcttaaggaaaacattgtttttgctttgcttttgttgtttaaagatcctaaaacgtaccgtgattcctttacgttactaataattggaaagtgtgttaaatcaagggttcgcttaatgttctttagcctttgtacatagaatatataaatgtcgtgagtcatctttacgaggtttatgagtttgtgttcgggtttggcttttttgttgtgtgtgcgtggtttttttttttcttttcttgtaacaccgttaggcgtttcattaaggtgtataaaaagtaattttatacacctattaaaaattcccgctgcctcggctggagactggattattcgggctttgggatttgctgcttccagcagtatccttagaagaaaatgaagcttctaggtacttctgtagtcaacaaataattatttgcctgtttaattaaagtgttcgggcacgggggaaacaaagacgagtttgcagactccagcaaaaatcttaagagtttaagtatttgggccgggcgcggtggctcacgcctgtaatcccagcactttgggaggccgaggcgggcggatcacgaggtcaggagttcgagacaagcctgaccaacatggtgaaacccccgtgtctactaaaaatacaaaaattagccgggcgtggtggccggtacctgtaatctcaggtactcaggaggctgaggcaggagaatcgcttgaacccgggaggtggagattgcagggagtcgagatcatgccacttgcactccagcctgggcgacagagcgagactccgtctcaaaaaaaaaaaaaaaaaaaaagtttagg

SEQ ID NO: 42806 - DNA, 2812 bp, Homo sapiens
cccagattcctttaggtagaaggcacaacttcctagatgaatccctcacatcttatcttacttaggtccatcttcgttctcagctgtcaagccaacgttccacccagagaactcatcaatcataacacgttttgtgaatctgggtaccagtcgcctgcttgtgccccaactcagtcctctaaaactcttcccaggaaaaccgcgccgagtggtaacagagacacaatgaagaggcggcggcagctgcagcgtgcagcgctgggaggccggcccctcccccccgggtcccacgcggcgcctgcgcgctcgggacacagacgccgccgccctcctcctccaacccctccgcccttcccccactcttcccgggtctctccagtcaccccctcgatctcttactttcctcttccctccaatctagtggggcccagaaggcacgcggggaatcgactctgagaaagaatgggggcagcgcgcggctcacgaggaacgaagggcgcgtgcggcgcgctgggggagggggagcgggggaagaagcgtgcggtacccgtcatcctgctgattcttgctcgcgttgatcttggatccctctgcgaattcctctatattgctgtactcgttcatatcctccatagtgacggagctgtcggcaggggggtgctggcgcgcagtccgggtcgcggcagcagcggcggcggagcgttgtatggagctggatttaaaatggcggcggaagagatccgggcgccgcctgcgccctccctttatagccgccccgcccgccaatcgggagggctgctgggcggtgacgtggcgctgggcccggcgcgccccctgccgggcggagctgggagcgagcgaagggaggagcggggctagctgccgcggcggccgcggccgccaatgggagaggctgcgggaggctaaagtagcgggagcggaggggaacaatggcggcggcacatgggaaagcctgggcgggacctccatcgcggccctcccggcaaggagagaggccacgcgtgaggggacgcgggcttgggagaagagaagaatcagaagagaaaaacgaaggggcgtaaattcctggggtcagcagtcccgagcagagccgacgcagggccacagtccctcttgccttgggagcctttgtctctggcgtccggtccagcccactcctaccaaaaagccgtcaaccccgcctttttctgccctcggttcgccagtgcggagccgctgcggcggccgctgctaccgactagcaccgcggccagtctgctccggaaaaaggcggactgcgcccggcgctggcgactgaggcggcgagcgcgctcgcccgccgcgcgcacgcgtgttttgtcctcgagctggcaggaaccagccgaacaggaagcgggcgcgcgacggctcctccgggcagcgcagcgcgggcgcctcttccactgtgaccacgggcgcgcgggccaagggggcgcggcggggcctcccgggctgatcggccgaagcccgggccccgcgcggcctctggcgggctgacgccgggaggaggggcgggggctggccagatgactgtatctatgcaaaggcggaggcggtgggcggggagggggctggattcagtagagggcaaggggcactcacatccccggcgcgccactcgcggggctcctttctgcacgtgccccgggcctctcccgctcgctcaacctgtctgcggagggcgcgctctcgcgcaccctgctcccgcgttcgcttctttgttcccgcccacgcgaggcccattttgacggatccagttcgaggcctgacggcggccaatcggcgctggcgccttcaccctccccgccccgccgaacccgtcaagggccgccccttttcctgcccacgtggtctcgggctcctgccccgtcctgctcacgagttcagggctcctgggcggccgccttttccagttccaggtgtgcagaagtgtcctctccccacgcgcggcgggctgcacttggtcgctggctccgagatcgcgcggggccgccggaagcccaagacggtaccgggggccgcagccgcagccggcgccgccctccgccctccccaacagcaggccgagtcccgtagcatccggtagggaaatggtcgtgctttcggtccccgccgaagtcaccgtgatcctgttagatatcgaaggtaccacaaccccgattgctttcgtgaaggtgaggggcggaagggagcggggatgttacttttccttaaaaacagttattattttttctaagtatttcaggccttgcattggagacgagggttaggagaggcggtgtggctgcctcttgtgtggaatggggaggaaggagagaaagcctgcggtgggttgcggggatgcttttcctcgcgacactagcttctccctcccccgcccttgcgcttggttggatccagatgggtgggaagggatggaagttgacgctaaaaatcaccgaagggcaggtaagccggggcggggtgtgacggtgcgggcctcgccacccggcaggtgtgcacccggtcgcttccgcaggtgagcgcagcctttctgctccgtcgggcctggtgtggcagcggcagcgatttaatggtccttaaagcttccgatctcaaaatggaaagactgaagtgtcaagatgacttttcaggtggccctggtgtcgggcaatcaaggttcctcttcgccccttcccactcttgctgttagtggccaaactgcacagtgtattattttactctgttaggcgctgtggtccatagcgctgattttttgagctataggacacgt

SEQ ID NO: 42807 - DNA, 512 bp, Homo sapiens
tctcaaatcagttatactccccccaatatcttgacttgttcctcgcctggggtgaattaagggcatattcattgactgaagaagttgaaccattagcattctcagtgtgtctgaacagtgtcgtatgggggagcaaactgctttgatttggaggacgagtgttagtcttctggaaagaggcaacctgacagtaaagaacagcaatctgccaaacctgctcgacagaaatatcctcacttcttttgttgtaaatctacatttatcatgtcaccttttggcctacaacatggttttctgaacagagttactcaccagaaaggattttcctaagcaaacaactattgttgctttagccccatggtgaatgctgtagtacccccttatccacaaaggacacacacattccatgacccccaagagatgcctgaaatctcagatagtaacaaactctatatatacgatgttctttctctttctttttctttctttctttctttctttcttttttttta

SEQ ID NO: 42808 - DNA, 838 bp, Homo sapiens
gcgaaacctcatctatattaaaatacaaaaaattagctgggcgtagtggcacacacctgtaatcccaggtacgtgggaggctgaggcaggagaagtgcttgaacccgggaggtggaggttgtagtgagccgagattgcaccattgcactccagcctgggcaacagagcaagactctgtctcaaaaaaaaaaaaaaaaaaaaaaaaggtcatggaaatagaggaaaatgaggaaagaatgttgtcatgaaagccaaggaaagaaaggtgcaagacaaagaggtggtcaacaatgtcaaatgtccttagagttcaaccaggactagcactgagaggagtctgctggatttagcaattcagaggtcactggtgacattggcatgaaaggttttagtagggcacagggtcagaaaccaggttataattaagttgagaaagggatgggaggaactttggctgtaaacaaacagatggagcaatagttcaaagaacagtcaggatcaaagaaagattttgttttttgagagagctacagtaaaacagcacattagtactgagcatttgtataggctgataataagagctgaaaagagagtatgaataagacaagataacatgtttgcttatcaagttagcaaacttttaatcaaaatgacaatgctggtgagaatgcaaattgaaatgcaaatatttctggatttgtcaaatatgtaggaagatgcagcccaggctatattcagggataaattggtggtcttagatattttcattatagtagagacagaaaggagggaaggaagagaaaaagatgcaccctcttcatgaatttagaaagaaaca

SEQ ID NO: 42809 - DNA, 1589 bp, Homo sapiens
gagcatgaatttaaaatgggaaaaccctctcatactccatttgattcatttaaggaggggaaaaccactcaaggactctctccagaacccaaagctaatcacttttttattgcagcagattaccaaagagcctaggtaacccacctaccacggcctcccgccgaaaaaccaaaaatcccatttcttcccaagtgtgcgcccaggaaaggaaggaagactgtgcatttagagtggagggcggtacacagggcaaagcaagttagtgcctccttcccagatcccctgcttcccgagccagcctgacctggctaaccgcaaagtgcagggagaatggcacagggaccgggaggtcaaacttggggtcgcttctcacccgagtccacccgataacgagatgatggggcggcgggtggggacacctgtcaaaggacggggccggggccggggccggggccgcagcgggcgggctggctggcggcactgcggcggcggggaccgaggcgcgccggctcgggcgttcgcaggtcgcggggcagagccggcaccgactcctggacttgccggggagcgtgcgcccgcggagggctcgggcgggcggccccgcgcccgggacgctatgggagggggccgcagccgagcagggccccgcagccgggcggacccagccgccccagccgcgctgcagcccccgccgtccccggtctccgcctgcgggctgcgcacggggccgggccggacgccccctggctgcgcgacgggcccaggcaggggagggggcgccgcgcctacctgctctggtgcggcggggccgctgtcgcctcgaggggctgtgacctgctgcggtggcggcggcggcagcagtagcggcgggtagggcgcttccttcaggaaggggtgggatctgctcacccgcccgcccggccccctcctgccgcgccggggcccgcccccgacttattctggggtccccgctgctaggccttcggggagagttgatcccctgggtctcgggcttctgccacccccccggggcccctaatagtcacccggggcaggagccgggtgtgggcgggcgagccgcttccttccgaagcctttgtggacgcgtttgcctggcgctcctcatccaacaaaaggaaggacagaatcttggatcctccgcctggtggttatttattcctgacctgttgtaaccttctgcctggctctctttcgtccgcacacctagggtttttgcacaaagcagctaaaattcattttcatgcccattgactgaatgtagttctcctccactcagcgctgtcccgcggtttttggtttttttttttccatcctattgaacaaacacagagccaacttcggaccctggcaatgaacagcagacaccaaggccgacctcccagcgccagcttgcagctttcctccctgggtctcgtctgagtccgtcataaactgtgttcatcagcgttttgacagcttcccccatcccggacccccaacctaccatgggaccccatggcaccatgtcagtgacctctagcagcagcatggatcaatgccatttttatcttaggctcatcatgagcctg

SEQ ID NO: 42810 - DNA, 398 bp, Homo sapiens
aatcccacagtttgaaatctcattgtgtagagtgcaattctaatgtttactgacagatgtttttcatacaagatataaatgcaagccaactttttcatctggggtttacctgtaaaaaggatcaaggataattgactgtaagtgattttctatttttatcttacatgatgactttacaacctagctctccatgtgagatatgacttcataacactatagtttataaatgcccggtgagtcactgtgtgtgcattccaatagaggactgacctgattcccaactactaatgcactctctagcaccaggcttcagcttctggctgagagaggtaatataatacaaacctgaaagtactggaaacacagtgggcttgaccctttagtcaggtcaaaacaac

SEQ ID NO: 42811 - DNA, 2050 bp, Homo sapiens
tgtgtgtatatgtgcattcttccaatgctttcattagattcccgtaagacagtgaaatccccccaaaattttgaatcattgctcttcacagtttacaaatttatttctattcccatgttattggtttcaataaagaatttgcttatataaaattaagcaatatcattataaatccacctcaaatttcaaatttcacaaataaccgcggacgtatttaagataaaatcactacaaaactacaaaaacactacgagttatccaaaagttcttaagagtctacaaacctctccctgagctgttaattaagggatagtgagaaacaaggagcacagaagaaccactaaaaaaggagagtaggctgggcgtggtggcttatgcctgtaaccccagcacttcgggaggccaactcgggcggatcacttgaggtcaggagtgccagaccagcctgaccaacagcgtgaaaccccgtctctactaaaaatacaaaaattagacaggtgtggtggtgggcgcctgtaatcccagctactcaggaggctgagacggaggttgcagtgagctgagatcgcgccactgcactccagcctgggtgacagagcgagactccgtctcaaaaaaaaaaaaaaaaaaaaaaaaggagagtaagcttttgccaactcttgaataaacggaggtacagaaaacgcaggacgctgtaacaagaacacacccttatcgattaaatacagttataactgcccacaaagacaaccaaatttcagttttctatagttagaaaaaataagttaggagaaaggatttgtcacagactatcagatcactgcaacttcaaatagccctacgtaaaattaattccttaagcgcaagaaaaaatttataatgcccacaagtccaggcaatattttggtttattttacaacagccccgtaatttaacaacttattagcaaaaacatgtaacacttaatgagactgccctcaaagtacaggctgcgcctggctaccaccgtccttaaaataatcctagttaaatgacagtagacgtcagttcaaacctatgaacctttaaatctggcaatagttcaagtacaaaaaaaaatcctaaccaaagccaaagtaatcctgagattttttttcctctcctcaccctcggggaccgcacctctttgtgcacaagggtctgaaagtctcctaatctcaaactccagttaccagcccggctactactccccggcaagacactgtcgccagcctcgggtggcttttgctcagcagtggagacgtcggcgaatgcggacgggcgcgatcactggagtccagatgccaggcgttgttccgccgggcccgaaaccaagactaggggcgcgccgtcaccagagaccgggcctcaggctggtgcggggcagcggagacccaggctgcggtcccagttttggcctgggctctacctcaaagcttaaggaccggcgaagaggacaaaaagcaacgggcggacgcacctggcgaggaccttcggcagccggatcctgcgttagtgcagcgctcgtcggactctcccagcattcgccgccgcccctcctccccggccagggccacctccacgttccgttccaacgtggcagccgcagccgcagccacgccctgcgcccaacacttccgggagcgacatctttccccgcccacccgacgcacagcccgccacggcacttccgggaccggcggtagcctgggaggcggggtacggctccgctggttggtggcgctctgcggtcatcgcgccccggcgatcgtagaaacccttttctgaggggcggcgcgcagaatgtggatggggtagccaggactagtgggtaaaggactagtgcagagggtgtccccgtctggccgaataaccgccgtggcccgcaggaacgccacgtagcactagtcctgtgaggcgtcggcagcccctggcgacactgcccgcgccaaaccaggtggaaaatcgggctgcaagggctttattgtaatttgtgactgagttcttaaaattacccacttgattgcacatt

SEQ ID NO: 42812 - DNA, 2535 bp, Homo sapiens
cactcgggtcttaattggttgagcaggaaaaggctctaacagcccaaccaacttacagtatttaaatccagttcttactctctgcacacaccttacagccaaaaagtatttgccctgcacatcccccagggaccaatttttccaaagttccttgaccatctatccttaggccatgtgacttttaaggaaccataaccaaaagctattaattccattcagagaagatacaagcatattataatggaaaactggtgtgaataagtaataccttaatatgtatcttcggctgtaatctggacaaagtaaacacaaaggggaaaaagaagcaatcttgttaggcctggatatttggaattatttttgtgtgctatacaaagaaacggaaaagttgcaaacccttctctgttttctgtatgctaaggatctccttctcagagacaaaaacccactggcccgtttccttctctaagcaaattgaaatctcttcctcaaacataagagcttataactaagacattgttctaagctctatctcctgaaagctattcataatgcctcattcccaaccaaaaccacttaattgccccttgtcccctgcccctattactactgaggagccccaagaaccttaccttatttccttcattgtggcaaagtgtttcagaaaagggttccttgaattaaaagtcggcgtatcctatttgactcctgctcctccggtatcacatacctacagccaaccatgccaagagcttccccattatctccgcatcggagagctacaagataaagcgcaagaacacgacacgcatctcagtaaatcatatatttttggcccgactctgtcttcaacacacctaaggcaccgtgttttatccctcttccataccctttcctcccgatatcctccagtttcagagaccgcacccggagacccattggcaggttcctggattcgcctcaattttggtcctgcctctctgcttcgcattttcaggcttggcctcacaagaaggacgatggcgccagattgtgccagaatgggtgaaaacagaaggaaaataaaccggttgcagcaaaacccactattccgcctccaacgcggagggaggagcggtcaaatgcacgtcttcaggctcaggcccttccgattggctgctgggacacaacgtggcctgtcattggctacggcaccggcgcagggccttcggagaggaagtgtggaagtcccgcgcctctaaagcccgcctttcgtgacaaataaaggtcgtagccgcagagtcaacgggcggagctaaagtggtcgtgattcatgctgtcgcgggaaccccgaaggtggggccccacgtaacaagaagatgacccgaagttgctccgcagtgggctgcagcacccgtgacaccgtgctcagccgggagcgcggcctctccttccaccagtgcgtatgggagcagcctcgaagccttcgaactccctgcggggcccggcgggccgtggcgtggcgtggggcggggccgggccgcactgtgggtcgcgccgcgtgtgtgacgcgacgtgacgtgcgcagcgtcggggcgtgggagcggaattggggcactgtgagaattgagattctctctcttcccgcccagtgtttacctctgaatagccggttctcgcaccgcctaccgctttaaggagagttacgcgaaaggagtcctccattaattggatggtcttattatttgaagtgaggaggccgaaagggaaggcagtttaggacaacggttgaagtgtgtgtgtggcgtcttcctgagcacgagtacagatcagttttctcctgtactgcctgacattgcaagttcttaagtgctgttagccgagctgtgcaaggccggtccgattctggctggatttgatcatggcagggaagtttcatttggctcgacagtggggaagaatttcagatcagtcttatctgaactcatatccatggttcagactggtataggtcattcagtattcagggtacactagcaagtagaaaagtgggtaaaatagatcctcacagacaaaaggagcagatttatggaaagatcaaaaagaactttatggttggaaagggggggtaggaagagggtagttaggaatggcatgggaaaatgtaaaggatagaaagtgcaaatatagaggagtggaaaagtacctgagaaaccattttaaaaatgtaaatgccaggttaaggagtttagagtatgtatggtaggctatgtataaaattcattgatttttttttttttttgttttctattttttaaatagggctgattcctccacctaaattgttagcagtgtgaaccaactcattgtgtatgtgagaccataattgatttgggatttttcttgtgatagaggtagttttaaactagggagacatgaattccaattttaattgagtatttactgatgtctgtacttggctctgggtcttggtttcttcttctgtaagaggaataaaaacctgccttgtagaattttgtaaaactaaaacgtaag

SEQ ID NO: 42813 - DNA, 1683 bp, Homo sapiens
aaagagagctcctagagctgtatttcatttgcattataaaatctacagcaaaatttttcataactttactctctgaattcatgaactaggttggcgggggcaggagggtgagtatagagaagaacttccctgaaaagcatgagtataaaatataactgagagtatctcaattgttatatgccaaatggcaggggcaaagaggttagttactctaaggataacagagcattaaaaattttttttctaattcttacaaaactggtccctattctataaaatgtgaacatccacaacccaacaagttacagactaggatctaagacacagatcttaaatgcagataaaatgccaatgctctgcctccctaaagaaacgtacaaccccaagaactgctgaacaccatcaaagcaacacccgccagagtggctgttttaaacattatatcaggaaatcatgataagtgctagcggttcctctaggcctcagcagcagccttaggtataagagcaaactggagccctcttaacactcaaagaataatgttgatgtcatgacgaggctactgattcttcgcactccggacaagtcattccttgatccaccgcgcaattctttccccacccacccccatccccccaaataaagagatctccggacagagaagccctcgggtaccccatcctcctctacctccagcggctgccgctttctcctccctcgggctccgaggtaggggctccagaaggtcctgggcaatcccgagccccggcggggcttgttttgcccgtgcacgatagctctggccagcagcttcctttcccagtttgtccaaactggagcgctccagggtacccggggaccgagaagggagccggggtggcgacgtcgccgtcgccgccgcctctggtatgtcaggggccgggattgtatttcgaaagatccgccattttcacctcgtcatcaccatcacagctcagcagcttccccgacagccggagcccgggccgccgccgccgccgccaccaccagtaacctcccccttcctcctcctcccctccccgcccgccccacccgggaggcgcacacccacatatccggggaagcctcccgccgccccgccaaccttcaaacgcacaagggccgtgcaagtgcacacgggctacgccgagacctttcacccccgggcggagcacgggcccccgcagggacgccaaaggaagtcgcgccacctgcggggtcccaagtccggcatatttttgtttgcaagaccaaaagccatgcggagggtggcataaggacaataaagaacccaaactctttcattttcagagcagcaacttgagagagatggtggaatgcgtttcattcactgtggctatctcaggcactaaaaacactgtgaaagacctttaatgtcattcaccaactttgacattttaccccacccgcagaactactttgacaggatgagctatttccatatgcatgttcgacctttgacacctttgtcaattacaggcagcaatcctcatgcagatgaagtggtcaaaatatctaatttaaaaaaataaagttctgagctatcttcctctccaacttaatttatctggtcatttctgtccatgaacactgcgacttccaatctgtcatcggtttaagacgtcaaagcgcaactagatttga

SEQ ID NO: 42814 - DNA, 2110 bp, Homo sapiens
cagatgctgagagtataaagtgttctcaattacttcatctttaaacttcatttccccactgacggccccgtccatccgcactctgcttggttgtttaccgttgctggccaagctaagtcccggcccgctcccttcccccgtgcacctcgggaacattatgacatttggctggtgggcttcgcgaggaaaacggacacgcacgaacaagagcctgtacaaaggggcataggaagaacgcggcggcgggcagtagggagaggagggactggcacaaaatgacacagcagcaaaaccggttcccagaaacctggggccgccacgggtggcttgttgggtcgcgcagtgtgcgtgtcaacagccgcaggagcccttactccagaccgccgggcaggcggctggccgagcgctggccctgccgggtgacagccaccctctcgggagccgacgggaagagaccgagccccaaggatccttcgccccccgcaacccagcttcagggaaggggcgcggcggaccccgctggcgggttcccgctccccgccaaggcccaccggcccgggctcccggagggagcggtccagcgctctccgcccgcgcaggcactcgcagcgggggccggttcccccttcccgccagcccgcccaggagcccccatcccgggggctgacactcaccaaagccggcggcgccgccgcctcctggtcgcgcggcgctccctgggctcccagcagcagcggcggcggcggcgcctccgagacacagaccagggtttgttcaaaatcacgcgcccagccccattccaccgccgcatcccataatacgctgggccctccccgcccgcgcgcccctctctgcccgcccctgcgctccgcaccccgccccacggccggcttccttcgctccgcctcttccgcggcgcctcgtccctccccttggcaacccaagcccgcgtcattccgccgggctccgccagggcgctccagttccacgtgacgccgagtggcgcccggtcaaagcgatcgcacggaatgttccatcggactgaagctgatggggggaggacccgcatcgcgctgcggttgggagagaccgtcccttcgtctagctttccttgttaggaagtccgggttgtaggtgcgacttccaggatatcccgctgtttgatgtgcttgagtgaggaggtgatcagtagtcacaaatgccaagtcactgtgtttttaggcactagttttgcagtgtcgctaaaaagccacagggagattcattgagagttaaacttattttgaaagacgttttgcatttcttgcaacacgcagctaagactaacacagtcaaaattatttgtatttaatcaccttttattttttcccgcgatttatatgatatccaaatacggagtcggatgaacagacgctgacagatcattctgaggggaaaaaaaaattattctgagagattattatcaactgctgtgagtgcgacaagcactacatatacgaaaatagaaaatacaagagtgtaaatgtaagatggtgcgatacagtgtataatttgctaatggagtacggaggacatacaggtcagcatgagagactacctcgggaacataatggaggaggtgaaacagtgtaggggaggcagcagtcactttggaatcaagcagtactggtatttaatggcacctccgtttattagtgtatattgtataacgtttattttcctatccagcaaataaaaataacaaaacttcccaggattctgatggttaaataaaatgaagggtgttaagcaggtacacagtctctgcctgaaatgttagttcccttgtgccataatcaacacccagtaccagcccaaacactaatagtcaggatttaacaaggcaaatgtcatgaaattagcaaagccttgaaaatgggaaggtctgtgacatgtgtaagtaatgtgataaagttgaatgacacaaaggctttgttggagatcagcattgtgagcccactttatgaggaaccttgagagctagtgtgagaaatcctcatggtaaaatgattgatggtgctgttggggcaccactggaaggaagaaaagaatgagatggggtacccaaaac

SEQ ID NO: 42815 - DNA, 1842 bp, Homo sapiens
gtaaaattttattttattaatatttgcttgtatttgcagaaattctataagaatacatgagtattgaatgttatacaaacgcaggcgaccatataatcttccattgaaatggaacggtttctagaatgaaagggaggatgttattattattattattattttttgagaccgagtctcgctgtgtctcccaggctggagtgcagtggcgcgatctcggctcactgcaaactccgcctcccgggttcacgccattctcctgcctcagcctcccgagttgctgggactacaggggtgcaccacctacgcccggctaatttttttgtatttttagtagagaacggggtttcaccgtgttagccaggatggcctcgatctcttgacctcgtgatccgcccgcctcggctgcccaaagtgctgggattacaggcgtgagccaccgcgcccggccgaaaggggggatattaatcattactccaggacgacagagggaaaatcgctttgtactggacaaactggaatgtctgaccaaccattataaagtgcacggagtgggaggaggaatagggacattttaattgtatttctaaaaagtatcttctgtggtgaatcggaaacaaaactcattctttaccacaggcagtttaagcgctgcctgaaagatcgaaggacggtaaaccacagacgtgagaaacggaactttgcgaaaacgcagtcgttttatgtaccggctactcattggagttacaccagagactcactactggagttcatcagccaatccaaagtccaagcgtgagagccagagcctgtaggagagacctgggcaggcctcagacctgaggagtggagctccgcatcactcaaccctgggggcggagctagcccaggctcccacacccgacgctctggcccacacagacgctactctgtagcatctcaggttccctctggctgcactctggaggaccacactcgttttctttttggctgccagaggcccccgcatccaccgctgagctgggagaaagatggcggcagccgtgcgacaggatttggcccagctcatgaattcgagcggctctcataaagatctggctggcaagtgagtatttcccaggaacgcgggagtacagaggtggggaaagaaagccacagccttaatctccttaggttggccacggctcttgggcgtgaagctaggagccggcctgacgtccaagggggcgggcctgaggtcggctggggaggcaaatgttgggagaagcagaaagctggaggggaccttgtgcaggggccttcgaggctatagacttgaaatgattgtcagcttgttcagttcttgatagaatctttctggtcccttaggattttggaacagcggtctgagagacgactgctaccctggccttagtagccttccctggtacctcttcccatcgctggccggcctcacaccgaatctggcctctctttggaccttcctcctctttttttttgattcagagaaatgtatattctggggccttgatgctgcgtttttcggggagatggcttcttggggctggctgaggttgaggcggtatggccgctgtcatgtcgtccagaccattcagactgtcttctgtgggtccttgtgtttcgggtattttctctgccaccaactctgatggcacataggcggaatgtgctcatatcgtgggtcaggatgtctacagtagtgatgtttgcaggaatctgaattttgtcgaaatttatatagaatgcttaggttcactccaagttaaaatgtgtgacgtgcctgttctgcaagcagttgtcaacagtattaagcataggtaggta

SEQ ID NO: 42816 - DNA, 1405 bp, Homo sapiens
catgagccgcggatgtgtacgtggcggtggaggagcccctgttgaggggcagagccgtcgggtgacggactaggcgaacgtgtgtctggcggccgctgccttcgggcctcttccagggaggaggatcgaggaggcggagagcccgcctggctcttccccagttgcagggacaggtctgaagcacgggcttcaggaggcggggagtgggtgggtgggcttcttaccttctctgcccgctctgcactcgggaaggggctgtgagcggcagctgcgcgcggggctcttcgatcaaccctcaccccgccggattacgcctcccgccagcccagctctgggacccctgggtctcctctgctgggaccagacctgcctgccggtaaattcttaagagcagcccgcgcagaatctatcccaaggagaccgcccatttttgctggggcaatcagggaactgcgtctgcggatggctgccctcgggggaccattcgccggggcggcgcgccgctggggactcggcgtgaaccgggcagcgggcgcgcggtctcggagcccagccccagcggcaggcgccaggagccgcaaagctgggcagggctggcgccgcttcctcccgggcacccgccgctctgtcgctccgggcgcccaggctcaccgggcatttctaaattgtaaaaagtttttatcagatggtatgggctgagcaacgctgggattggaaagtaagacaagaaactatcacccaccccctcccccgcccgctgatttgaatgcttattagatggaccctggattctagtcttggggtacacgcccacgtgtaagagtaagcaaccacagctctctagacacactcatgccgccaatctcatgaaataagaggtaaggaccttgcaatgattccgttttcgtcactcaccccttttacaataattagcttggctttgggaaaagtaagtcccaaatccccaacactgagggtaagctccacaaaggcaggggattttgtgggccaagttcactgaggtgtctcaaaaccttagctcgggacctggtacacaggaggagctcactagcgcccccgccaccacgctctccgcttccgggctggctgaggccatgcgtgatgcaggctccagatggtgcatagcaaacagtggcgagagcccagccctggaaacgcaaacaaggctaatgtttcacctgactctgcagacctccacaggtggggaccagatcttccctaaatcccaactccagtactaacatggtcgaaaccatatttttgggtgatggcttcccacatttgaaatcctggaggaagaagcattacaggaaatgctagagaatatgtattcaaatttcttctgcatttcatcttggttatcaaataccagaaaaaatatgaa

SEQ ID NO: 42817 - DNA, 2006 bp, Homo sapiens
cttgggaggctgagacacgagaatcgcttgaaccctggaggcagaggttgcagtgagctgagatcatgccactgcactccagcctgggtgacagtgagactctgtctcaaaaataaaataaaataaaataaaatatttagtgtgtatttttagcagtatttaaaaaatattgatcagagccataaacttcctgcagattctaaagtgttaaaatgtctttaacactttcctctcttcaaggaaatgatgtaaactgaaagcaatttatgtttatgaggcattcctgcaatgggacatgacctctgatcccaataattctttcccagatgctgtgttgacatttctactgcttaagtataaagcaagtaaaagccatgattatttcagtttgttactatgccaatgctgcctaagaaaaaaattactaacttgaattttcaagattgttgaagagttttaaacgagataaacaaatataaatctagttaacatttgcatgcattactttccatttctttacatgaatttatacttcgttaatgggtaggatatccctagatatatatatatatattttaaatatttttttttttgagacagagtcttgctctgtcccctaggctgaaatgcagtggcgtgatcttggctcactgcaacctctgtctcctgggttcaagcgattctcctgcctcagcctcccaagtagctgggattataggcacctgccataatgccaggctgttttgtatttttaggacacggggtttcaccatgttggccaggctggtcttgacctcctgacctcaggtgatccaccagcctcggcctcccaaagtgctgggattacaggcctgagccactgtgcctggccttattttttatttttttgacacaggtctgagccactgtagccagtgggatatcccttttaaaattcatctataatttttacaaattctccactttttgtccccacctttcccccacccctctaaactaacaccatttaaaaaactcaggcttagaaactgaatgttaaaattgttctcctgaaatagaatctgaaaaatcagcttcctctttttttttttttttttgagatggagtctcactctgtcaccccggctggagttcagtggcgccatctcggctcactgcaagctctgcctcccgggttcatgccattctcctgcctcagcctcccgagtagctgggactacaggagactgccaccacgcccggctaatttttgtatttttactagagacggggtttcatcatgttagccaggatggtctcgatctcctgacctcgtgatccgcccgcctcagcctcccaaagtgctgagattacaggcgtgagccaccgtgcccggcctcagcttcctcttaagtgaacagttcctcatagatggtttctggaaagataaatcctttggagaagaaaaagagtgctaaaaatgcctgaaggcaatgaatcacatactgtgctgttaaaagctttatatacgtgattcattctacaaatattttttaagaatttactatgtgctaggcagtattccagacactggaaataaagtatgatgattcaaacagaaaatatctgtgccctcatgaagttaggttcttgttagtgaggacacacaacaaagaaaataagtaaaacaaattacagtcatgtgctacacagcaatgttatagtcaatgatggaccacatataggacaatggttccataagattatattgtattttcactgtaccttttctgtgtttctttctttttttttttttttagacaagttctcactctgttgcccaaactggagtgcagtggcgcgatcactgcagcctctacctcttgtgttcaagtaatcctcccacttcagcctcccaagtagctgggactacagctatgtgccaccacacccggctaatttttgtattttttgtagagatggggtttagtcatgttgcctgggctggtcttgaacttctgggttca

SEQ ID NO: 42818 - DNA, 1380 bp, Homo sapiens
agggccacgagaacggaaccttccgcttgagtcaccatttaaacaagtgtttgtggaatgagaattatcttgcccgcttcaggtgctcaggatgcagacagacgtgaaactggcgggtcctttaggagactgtcccgactgcgtgtcctgaggtgactcgccccagggcgcacggcagccggcagccaagctcaagctttcaggctctcatttcaaagtgtcccgaggtgattcgccccagggcgcacggcacccggcagccaagcccaagctttcaggttctcatttccatcacgccccggccggccgccgcggacagctccgcggagccgactcggaggctgctacttgcaaattcccgggctgcccgcccgcccgcactcaccaatgggcttgtccaaccgcatgaggcgcaagtacggctgcagggggcggggcgcagagtccaccaccgccgccgcggacaaactgagctggcgcccgcgcggctcgggacaggcggggggctgcaagtcaccaccgtggggcgcgcctgccgcacgcgccagggcgaaggagcggccccgccagcccggcagccacgccagtgccacagcccgcaggccccgcgcgaaccccgcggctcgcgagcccagcatggcgctggtgaggccgggacgagctcggattgacgtcattccccggcaggcatgcgcagtggcacccgcaggatgcaatcctagtctgccaggctgggcggcggtgtgggcagaacctttcctcatccttacttgtgaaattggggtcatcgtggtcgcttactctagggaggaatacttaatgaaaaagggatttctattggcaaaaggcaaaaaaattacaataaatttagttgtaattttttacaactcgatcttgattgactttgtggttccattatcgggcaacactcagaacggggtctctgaggaaacaaacaaaaaatagaatcgggcaacaccttattctgtaaaatagaataagtgttccaaagagtcgagcggaggaagttggctttatagacagaaaaagggctgaagaaagcagaagcagagaacaaaaagcggattggtcacttcaaattactttcattgcgaggcggggacagggaaacaacaacagagaaataacggattggttaacattaggttacaccaggttaaggactaaaacaggaaacttaattgtcatgacgattgcattttgaaatggcctggttggaaaattggctgttgtctctctttcctgacttctcagaatgtcagatacaacttagttttagtttggtgacttggaactttagcatgggtgactcttgattcttagtctgatctgttgggacctagtgcaggaacttagttc

SEQ ID NO: 42819 - DNA, 413 bp, Homo sapiens
ctattgaatgtatctgagtttattcatttttttctaagtagtttccattgcgtgaatatatcatagcttgtttatctattttcctattgatgggcatgtgaggttgttgacaagttttggtattatgaataaagctgctaagaacattcttatctcactctttttgtagagctatgttttcatttctcaagggtaaataactaggagtggaacttctgagtcataggattggtatgaaactgccaaaagtttttccaaagtggttgtatcattttacactcccatgaacaatgtatgagagctctcgtggttccattagaccaacacttcatgttgccagtttttaaaattttagccattctggtgggtgtataatccacctcatcgtggttttctttttcatttctatgatg

SEQ ID NO: 42820 - DNA, 2224 bp, Homo sapiens
cagcgcttccctcccagactacaatctacagtgactggcctctaacagaaacatggttgtaccactagacactccaaggagttcctaggaatttggaattgagactgagaaactgaatactgacttggagtggtctgctacacagaagacacacaaacctggaggcagcaatatagtaaagtgattaagacaacaggatttggagcaagaactgtactatctcaacttttcagggcctgattactgtcgtaaaatctagataatataactagcttaacataacgggtcttcaataaacagcagattttatttgtacagtaggagctgcagttatctggaagcctagatttgtgtctcagtcatgccacttaactgctgcgtgcacaacttttatgtctcggggtttacatttcatatttatatagaaatgtaaataacaaggcaatcaatacctcctaagtgccgattaacagtggtaacgaagacgagagaagtaaacgaaggcgataaaactggtcaactctttgcatctgggaaggatgccaaaagtttgcagtttcaagttccaagtcctccgtacctggtctcccacccctctgtcagtgggcatgtgacgtaggaggtccgggtttgtatcaccacctccaaggacgagacattccggggaatctgagagtagaaggggctgtacctcaaccggcagtacgcccgcggttttccgcctcctgttctcagccaccatttcctcctcctctttcccctcatctccgggcacgagctcggccgcggtgggagcgccaaaaatacaccccaagcttggacggttccttttggggagagacacccgccggcggatgcgggaaccacattcatccatggcaaggacccagggccctattcagacgtcgttctcagtgacccagacgctaagcccatatggaagggagagtgggacgccggagcccgcttctacatccaccttgggaaaagaccccaagttagctctcagggctcgcggaccggaagcacgcataaacttctaccctgtccaatcataagcctcacgtgacctgccgcgtagggagggcacgaacagaaaggtgctgcgcatgcgtattgaaaaacctcacctactctcgcgggtcctcagcgttctcctgcggaacctttgaacggggtactcgagcccacaggggaagagcagcggaaggggcctttcggaacgatttggaacgaaaggaagtggaagaaacgcggaaccatggccgctgtggttgctgtttgcggtggtctagggaggaagaagttgacacacttggtaacggctgctgtcagccttacacatcccgggactcacacgggtaaagtctccatatcctatgctccattgtagcgctgcaggcattaaccttagtcctaatggttagagtcgtccctgttagcaaaacgactctggtttctaggcgattaagtttctccaagatgggtgggaatctgtaattgcctttgactgttttagtgtcgtctaatccactcctttaaagtatttaaacgtatgaggaagttggagtggttcttaaaaagcagagactttcctaagatctctggataatcttagtgaggaagggacatttccagagtcgcccagcagcaaattccagatgtctaaggtccccaaacagaacaaaattgcataatttttgcaattttatcttctctgtgcttctctataaattctttctgggacgggtctgttactttctttttggtatgacagtgcctttctgttgcttctcctataagaatttgcattaagaattttctctaaccatggaatgaagggaaaataaatgtcagaaagagcaggtatgggcgggaaaatatgttcttttccccctaagccctggaaagcacacccatgttgagtcttactctgtcccaaatataaaagtttttaaccattctgaatataatacaaaacctttctttaatatcgtgtcccttaattcatcctgtctccataaaaacaaaaatctttagctattcagctaagaaaaagaaatggttaattgctgtttctgtttaatcgcagtgctttggagaagaggttgttcacaacaggtatccagcaatgaggacctggtaagaatttttttttctattagtaaggcctttgcaaatatgaccaaaatgtttttctttttaaaacgagatctggtattag

SEQ ID NO: 42821 - DNA, 1356 bp, Homo sapiens
accagattaagctgttccatccactaagatttgccactggacgcaacatctatttttattcccttaccatcctaccatcgcaacaaacacgcacagacgctgctctgcatgaaaaagtccgcctggttttgcaaacgcctgtcgggcgtcgcgagaaacggaaagtttaccgcaggctccgcagagcagcggaaagacgctccgtgaactttccatcttttcacgcccaagtttccacagctacaggggcgccgaggaaagatgggagcgtgtgggacacttgggtcggaaaagggaaataacggaggatagcagagggagggctaatgctggagaagacttcgtgggcacgaggcacctcagggaccgctgagggggagagaaggcagagccgcgaccgcagggaggaggcgcggcggcgtcgggggagcgggcggggaccggagcaacagcggggaggcaggccgcgcgcagggctcttcccaggcgacgccggaccccgccccgtccctcggctcaccgtgtccgagtccgtgttgaggtgctggaaagcgagtgcgccgagcacaaagcccgagagcaccgccgacgtactctccccctccatgctaccgccgcctcaggctacacaagaggacgagggcggggcgcgcggaggcaagaccctgtggtggcagcgaggcggggcccagcgaggaggcggggcctgcgccggcgcacgggctgctgcgcgctccgcagaggggcggggcgagggggctgagggcgggcgcgggcgggtccccagccgcgcgctcggctcctccttcgcttctgctgccggcctctcccggaaggccgctgcatgtcggtaccactgcagagggctgcgaattgcttttggtggcctgcgcctgctgagcgacctgtcacaaacatgcaaagctatcaaaatgaacacggttgacagggtcattttaagacaagcaatgattacaagaataaaagagttgagtagcaacattacgatgccacagtggatatgccacggttttggttttcaagctgcattttagcacccttcactcactgaaacttacagaatactaataaccatttggggattgtctttgctagaactctctagccatgttctgtgtctgtgtgtttgtgtgtgtgcatgtgtgtgttcccttgcttttagaaaacttcagcctaatttaaacaatacatggatatttaatgttctgacagtttaatgataggcataatcatagtaagctggttcatttaatgtaaatggtaaggtgagtggaccagggcttggcaaatgtattttacacacacacacacacacacacacacgtaaaggtatgt

SEQ ID NO: 42822 - DNA, 2174 bp, Homo sapiens
ggcttgtcacttcgttggctccccacttcctccacaccctgggcagggaccattttctctgcaatatttgctatcagcgctgtttcaattcagtttgctggccctctcagtttttttccagcttgaaacaacacctgaaaagtacctgtaagagattttggtcgaattcagcggcaatctggaaaatcccttctcaaaatcccttctgctcattcttaaaaatagttctggtctctaagagaacagcaatgtagtaaataacatacagggttttgcccttcgttgctctgataagggctggcgcggtagaagcgcggagcctgaacacccaggagacacctgtcagcttggtgaatgaaggcttgcgccggcctggcatttctgctacgcctaagcgcggatagtattggctgaatggtaggggaaggtgtggttggaatcttcccccagaaagggagtgacagatacttagccgcagggtttctgtgccagggagatggcggctcagtgggctaggcaacgcgtggagagagcttcctactctcgggataagcaagattgagccccacagctgtaggccatgtggggaaggaggtgtggaagccagaagcggcgtacacggctgcgtggtgcgctctgcgttttcctgtccttggaagccctttccaagagttcgttttacacccacacaaacaagacctcaagcgtcccagatacgtcagcagttcattctgcgggtgaagaaaatattgacatttttcagatgaaaactctcctcctgaaaggacctttgctgagtgctgggggaggcggggcgcggggaagaacggagaccgcccaggaggctgcggcactcctgggctaagtactgccagggagctcccccgttgggtgacggaggaggtggggcgagggcagcgcgcagaaatagggcgctgggcgcccgagcgcagccagcttccagcacagcccgcggcccggtgccagctccgccggcgaccggtgtgccaaagtgcggtgctcccgcagggaacctggctcggggagggcctccgtgagtcatctgctgagttgtcgcaatcgccacccagaggaaatcaggcaccgggcggggcgggttcctggctgcgctcgcgcgctctgcccgcgccgcggtgtgcctccgcttacccgcagctccgaccactggctcgcgctacccaggtctccgcacgccgcggtggcttcagcccagacctgggcagccagcggagaaagagttaactggcaggggcgaggaggagcccagggaggaaggaaggatattgccgtaattctgaaagtttttttccttcctctcttcccttcgcagaggtgagtgccgggctcggcgctctgctcctggagctcccgcgggactgcctggggacagggactgctgtggcgctcggccctccactgcggacctctcctgagtgggtgcgccgagtcatggagggcgcagagctggccgggaagatcctttccacctggctgacgctggttctcggcttcatccttttaccttcggtcttcggagtgtctctgggcatctccgagatctacatgaagatcctagtgaaaactttagaggtgagtgccgggagggatgcagccagccccacaccgctgcgggctgagaacccgggggtccagttctcaaggtcagtggtcgcgagtcaggggtgtgtgtgcgcgcgtgtgcatgcgtgcgtgcatttctgttccttgcccgcagcagtgcgaaagtcagcatctcggcttctttcgcggagctggagggatctaggctggaaccactggaccactctgttgtttctctggtcgaaggcgaaaaaatcattccactccctgagcatcgttattattttactgattagaataacaacaatgcgaccaactttttgtatcagaggatttgcttatatccattatgcagtgcagtttccgcttcacccgcttgtttttacagccccaggtttcagaggtccttttgtgtactaaggcatccagttcagaaaggcatcatgttcttctttatgcccaagataagagaccaattgctggatggcagaaagaaatcttattttattttagtggagtcatggaaattttatctaaccaacagcacttgaaatgccattgaaaaggtatat

SEQ ID NO: 42823 - DNA, 551 bp, Homo sapiens
tagatcttcataattgtaacattttcctatgcatcttcataagtaaccatgtggacagatcattttccgtagttcatgatttctttttcattctttttttttgtttttttgtttttttgagagagtctcactctgttgcctagactggagtgcaggtgcccgatctctgctcactgcaccttcttcctccctggttcaagcaattctgtttcagcctccagagtagctaggattacaggcatgcgtcaccatgcctggctaatttttgtatttttagtagagatggggtttcgccatgttggccaggctagtcttgaactcctgacctcaagtgatccaccctcctcggcctcccaaagtgctgggattacaggcatgagccaatcgtgccttagttaatgatttcatcgagtcctttccagctttccaagtctgtgctgcctctttctgcaagcttatttctgatgcatctttgagcgtgtcctacccctgaatgtctaatttgttgtgaaaataattgttacactttacgccctacgtttaggccctta

SEQ ID NO: 42824 - DNA, 2094 bp, Homo sapiens
tgtgatctgcccacctcggcctcccaaagtgctgggattacaggcgtgagctactgcgcctggcctctgctgctctttcatttagtgaaacacatttttttttttgaaatgcatttcaagtctcccttcccagttaaatccctcttgcattgtatttcttctgtgcttttattgaataagccaactgaaagctgagcctaggcaaattattatctttgtggttaaataattatcttctgtctttagccatattctgctgtgtcttttatttaaaagctatttaatttgttgaacttcagatatgattatgggtaaatctcgttaagaagctctgttattgcactttcaccttcctcttcttcttccctttttttttttttttttgagatggggtctggctgtattgtgccaaattcctggcctcaagcaatcctcctgcctcagcctcccaaagtgctgggattacagccataagccatagtgccgggccatatcttactcttctaagcttaaggacttttcctcattgttaacacaaagaaaaaggtaaatctttttccccacttcaagtaactctgttattctgagcattaaacttcagtggaggttatagttacccttctaccctagttttgtcccctgaaagcagaagtgctagagccacagcatagaaggctaggacaagaaaatacaggaataatggctcgtttgcttctttttatcagctgtgctttggttgctccagccataggacaaatgcatctccttggaccctgggacttggtctgactgagatcctagcaacttttattttagcctgttttaaatatacaaaggatcgtttgacttttaagaggcaccagccttactctttgggcatctgatttccagggattatgatgctgttaggttggagtttgaatcggctcatagctttggtagtaattgtgattaatattagtaattatgtaattttagtgactcaagatgaattgtactctaattgcattatgacactaggacattttaaatgattaccatgaaaagtcaccaagcatgaataaaggcctgcatttacctgggagtgagtcataaacaccacaaatacataaaggcggtggcttgtcattttggcattgttcccttagaggctgatgctggcgtgactcagcattgttggccacaaagtgcatgcaaccactgcaagtcttaccccatgccctgctccagcggcaccacacacaaagactgtggtctcatggcctgctgttgatttagcccctgtgctaaatttctctctgccttgtatctcatgcccccaagtctctgcccctttgcccacctaaacactcaaaaaggagaaggtactaaggtgaaatttcggttgctatacctatttggagagaattcaggttgcctaacatggccctctaattttactttgggaatttttttctgtgaggcaattgactacttgaaatcctgtatacattgattatatgaacattaataaaatcttatacattcacagaaaatatgggatcatattttgtgacagaagtttgagaaatatcaagtcaggtgggatcatgcatgcctgtactcccagatacttgagaggctgaagggggaggacctggagtttgagtgtagccagggcaaaatagtgagacccatctgaaaaaaaaaaaaaagaaaattgaggaatatttttatatacttattttgttttggacaggccatttttgatagtttaaattagctaacttgattttatggtgtaaactctgtgaatacaaaccagtatgtgttgccctcaagaatatgaagtgtaatgcatctaatggggttatcttattgctaaaatacaggaacttgtctagctacttgtagagagcaacataattcagttatggggttggaaggattataggttggggctttcttttttattttgcgtgtgtgtgtgtgtgtgtgtgtgtatgtatatatatatgaaatattatgtattagtatgtgaaatatatatgattaatacataatatatattattattatttttttaagacagggtctcactctatcacccaggct

SEQ ID NO: 42825 - DNA, 632 bp, Homo sapiens
acatgcttggtagaatatgtaaaatacttaaaatctttgcaaggtgttaagtccatgttccttttttttcaagattggcaagctttttatttattaagttggtatctgtcagtgtatcattcatatcccttcttcttcttgcctctgcaatgacgttggcacaaacctgctaaaataaaataacatcctcattgtcagtgactcattgtccaaatcaatgagtttacttgccagtgtgtaggccaacccacatgacctcccacaaatgatatcaagtgtgtgatgtgggcagggattgcaaaatcacagcatgtgctagtgttcagcatctgatgttccactggcatactgtacaaaaagtataagcccaactgtgctaatcgataaagaagcatgtttatcagggtttgtgtgacagagagtaaaaaacaggcattttgtaattgaggaagataacaaaactaatatcctttttccccccttttttggtaaaaaaaaaaaaaagagagagagaattgccttgccattccatccttatctccataggacaagcatctatcatgttctttagtacaagcctgatttaattttagaaatttggaaatgatatttcgtaagtttgatataattgg

SEQ ID NO: 42826 - DNA, 550 bp, Homo sapiens
ctgtatcttctttggtctgcagtagaccctgattttcttaactgcttgcttaggaagtttgctttacaactggaggacagaaaaactagtgtgatttataaatggactgttattctaagagttcactcagctaatttagagttaattatgtttgagatggtttcaacttctgccttcatttccacaggcctttcgtatctggtattatttatgtacaagtgacttgctaaaggcacaggggcacagggcagcttgtgcaattaatcgcttgtgtgagatagacagttgtaattttatcttcatccaagcatggactgtgttggcttggtgaaagcatttggtgtaagaacaaagttcaaacgtttatggctttacccttttaaagctgacttgtaaagtaaaatgaatttttttttttttttttttttttttttttttttttttttttttttttttttttagaattagagttttaccaatttaagaactgtgggctgctttgaaggatcaggattaacttattaaaaataatgagattgctttaatgata

SEQ ID NO: 42827 - DNA, 710 bp, Homo sapiens
agtccatagcacttcataactgcataagagagaaaaaattcttgagtgtggttacacgtgggagagagccatttcgaagtgtgtttgttccatccaattcattgtgatcacggactgctcttattaaagtgtccccacctgggtccccttctgcttctgagcttgagtgccacctggtgaggaggcagtgtcaagcctagtttatggaaagcacgatgtggaacatgagtagaaggcactgcgtggtgggatgaagctgtaagtggctgagatctgattagcgtggtggtagcagtagtaggcacgtataccagccacaacattattgttgatcatcttgcttcatttccctggacatggccttggcatcctctcagcagagctttccaggcagtggctacctgccaactaaacttggcacatgaattgaaatctttttaccacccccagggtggcctatgcttgcctcattcagatttattaccagggaaagtattgcttaactacagggaaatgcagatttctaagaaattatttctgggttgttgttgttgtttttttttgcccatattgctagttcagacattggggcatagtatgtcttttgggaatcatttcagctgtgataatgaagcgaaattcaaggtttcacatataattttgcttgaaccttaaactagtgcccccaaaacagggttcgtgtactctgg

SEQ ID NO: 42828 - DNA, 1260 bp, Homo sapiens
acaggttagagttgggcaagttttcaaatcattgtttctctagctttataaaggaaaacacctatatttggtgcttacaattcgtatgctgttctaggtctgaggacacaacaatgacaaaggcaaaaactctgggctatggaaatccactgaagcaggtggaaaataaaaacaaaatcaagaaacatgtttggacgaaaacatcataggggatttagagtgcctttgaacatttttcatgtaagtttgggatagtaaatgcctaagcactcttctgaaagagtttacagaaaagtatacttcctttacaactaaagtatagtgtcaatggaatcaagctctgtgactaggagccgggagtggagctgacatctatggaatgcacacgtgacagtgctcatgtgctgagtcacctgtggggttgaccttggttcaaagcctgtttttcattgcaatcattctttgatacaggcagccctgatgtctgttgctaaattaagcacaagtgaacctgtcaaacgtcctaactggaaggaattttcagtgctggttatttgtaaggcaggttctgaaactgttcctgcagaaccgaattttttttaggataggcagagaaatgactttggaaatcctgttctatccagtcagttctccagatttttggttaacaatggaatgatgaatgaaataccatagcttcacctagtaaattccttggtccaaaagctctctttggaaactgcttctgtttaacagttatcctctttaggcatttacacatattttataaaatacatactataattcaggctctgttagtcttgaggttctttgctgcccaaggcaggaacttgccattcaggagcttagaaaaatctggaagtagagacaaacaccactaaccacaagaggaagtggcgaggccctgttttccagcccaggaacaaagtgctgtgggagtgtagagaggtgataaatgttgggtggaagggtgtgtagaagggaggacatgagtgtgccttgaggaatgactaagtgctctccagtgaagtcaggaaacgtgcaggtgattccttgttctgtgcatatactgtccttcccaattcccatacccttgagaaaacaaaacaaaaccaaaccaaataggagagggttgtttataatcgcagacctttttgactccgaaatgccccatgttcttattttggagccatttaccacttccccagcatcacttccctagcccaagccatcatcatt

SEQ ID NO: 42829 - DNA, 1806 bp, Homo sapiens
gaggagaaaatggtatgttaaaaaaaagttggcaaccttagcatcttttgaagccatctatgttctcccaacaattccttcaaatataaaatgttcttcaaatatcgacactcatgtggatatcctttttgtctaacagataaattgcggtgagattaatcttgcttttaagatgcatattcaaaattgtcattatacaccatcaaaacatgatgaaatatatgacagcataaggaaagaaatgctattttttcattaccaatgaaacatttaattgaataaaagtaaaagaaaatagaagtaataactactaatgtctgtggctggaatggggtatgtaggaaactagtatatgccaccccaaaatacgccactatggcataaggattattttcagttgaaggcaattgggaagaagtagatataagaaaactctctgccatcccctatttgatgaagtcagacccttcccagcctggagacagcaaagaaatgcacacaacaaactaccaactattctttatctaccatttatttgccttcccacaagttgatatccctagagtccgtttcctttatgtcatcatttctctaaaaatgtactgttctttgcggagaatgctatacagtggtcccccttctctgcagttttgctttccttcgttttagttacctgtgctcaaacttggcctaaaaatattgaatgaaaaataccagaaacaacaattcaaaagtcttaaattgtgtattgttcagagtaacatgatgaaatctcacactgccccacaccactgtgactcatccctgtgtccagtgtacatatgctgcaaaagccacctgcctgttagtcactgagcagagtctcggttatcagagcaactgtggaggtttcccagtccctgtgttcaagtaacccttattttacttaatagtggtcccaaagcacaagagtagtgacactggcatattgttataattattctatcttattattggttattgttgttaatctcttactgtgcctaatttataaattaaatgttatcacaggtatgaatatacacaggaaaaaaacatagtatatatagcattccatactatctgcagtttcaggcatttctggggggtcttagaatgtattcccccgaagatatggggggactaccatacaaaatggagttctaagccacctctttgagaattagttatctttccctggttgtttcccacgcacatatgaggtagacatgttaataaacttgtttgtttttctcttgttaatttgtcttttgtaacactggtctgtcctagttaagaactcagcaggtagaggaaaaataatgtttttctcatctacaggtgagagtactagtagaggaagtgaaaggagatggagatcgggtcacaagggccttggaagcaaggttaaacacactggtttgtctgttattattttaatgtcattttagacttgaagaaaaactgcataaatagttcaaagaattcacagatatccttcattcagattcttgaaaaattaccattttacttaatttctctctttctccccttcccttttcccctaaaagcttcagtgtttttcaaaaaaaggaattctcttactactcacagtacaatgctcaaaatcagagaactaacgttcaaacaatacaattattttatctacagaccttgtgttttttccaaatcccaataatatcctccatagcaaaggaaaatacaagttcatgtactatattcagtagtcacttcaacctctactttttggaacagttcctacgtcat

SEQ ID NO: 42830 - DNA, 796 bp, Homo sapiens
tcttccattaaaatagtgcttgccaaacaaaatcttcattggactggaatgatgctttgccagatgacatcaggataggcaaagccactattaaaccctgtgctaaagtgggtgtcaataagcagggtaggaagaagaaaggctggaatatgaggagacttttaaacatctatcaacattggcaagccacagtcaaaaagtagttcatttttgatgaaagttttagtcaggctgagaaaattgaaagtgcaagaaaatccacagagaaagaaaaatcagccttctaagaaagacacaatactcttttccaagctatgaatagagatgacaagtactattacctcagaaaagcaatgcagtacaacttttccctgccctgctccaaccacacaaatacctatcagtggtagtagtggccttaatgcattttcagcagctgccatgtcttgacaggcttcctcacatcctcctgaaagtaaaaacacctatgccaacccatgtggtggttatgcaacctaagacaagctgggaatcactgaacttatttactctggtgactcagatataaatctaggtctctgcggaaaaagaggtggagaacataaaagaatgtatgacaccatttttcattaatatttattgtataactgaagcaaactcaaaagattttctgctctctataggtctgacaaagaaattagctttcagaaatgcttcaggtttgaccaggtacaatgtaccatctgctatactgaatgacctgaggcaaaaacaacacccctttatacagaacttt

SEQ ID NO: 42831 - DNA, 2234 bp, Homo sapiens
aacactagccagatggcctttggttggaaaggtctcatctgcttcttaaatcccgccgtaactgtgaatgtttgcgatgccaccacatccccagtacaagagaactggagcatctctggctccttccataatcgaagggcttccagcgtagggcgtagggggagaggcccgaagccctggagacagcgcccgagggatggaggccgcgctcggctgcgctcaggtccgggtggctccgggagctgagaccccgcaggatgcagcgggggggggccagggcctgatcccctacccctgcgagccagggccgcctacgcccccactgcttcccacaggtaacgtccagccctctcctcccctatcccccgaaatatcccggttccgctccgctccgctcgccgcccgtgaccccgaccccgacccgtccgcgacggcgccctccccaggaggcagcggaggactagggccaggccgcccaccctggcggcggcggcggctcccggccaaggcggaccctggggaggacagcagctgggccgcggcctgtccctagggggagcgggcgcagggccgcgagtgggcagcgcctccgccccgcacgaacaaagcggccaggcgcgccgggccgaggcagcaccgcctctccgggagcgcggggggcggggaggatggcgggggtactcacctgagggccggcggagggcgcgggcgggacaggcccaggagacgggaccgcggcgggccggggctccgcgccgagggcgcacgggctacggggaaggggcgaccggcgcgacgtccgcggcggggcccgggagccccgcgccgcgggccgggggccggggcccgagctcgattctgcggccgcgaggtatgggaaccggtccgccgggccaggcagcggtgctaggcagcaggggcagcgacgccgccgcctttcccttctcctgcccccgtccctgctccgccgcgtcctcgtcctcgctgggtccccgccgccgccgcctcagcctcggcgctcctcgggtttcttctctccatcaaggccgggccgacccgcagggaccatcccggaaagtgaggggttgttgccgtttcccgcagctgttggtggccatctttaatcctcctcctcctcctgctttctccacctcccgctggctgtctgactgactgactggatcctcctctttcccctcctgctcctcctactgagccggccgcagaaattgcagccgctcagcttctaccccctcctgcctttccttcctctttccttacttccttcccttccctcggcttcccgctcttgcctcactctcagcggctgccttcgcccctgtctgcagacagcgccgctggatgctcccagctggacttcaaccccactcctctcagtccctctccccactgccttccagacgcgcctcttccccgccccgcgcccctctctcctctcccacccctgcccctctccgcggcgctcaccctcctcagtcccagtttctgaaaggactcagctgagaaaggacaactgggttccgctttccttaaccctacaccctttagctggatgctgtcagaggcgatggagaaacgcaaaggtgcgttaattttactctagccagagtataaaagaactgcccacgccagctattgtactacgcagcttcgaaactcctgcacgctctcctgtgtggctcccgtccgtgatgggactgtagttgaggagctcggtctcaaatggtgccttccgtcagtgaccttgagtcggttgcctaagattttagattttccttttccttcctgggaggggcattatttatacctttgcagtcccacaaacagtgtttagaccaaataagtatcctttagtaaacctagaactgccaagtgatcatcattttgcccgtttgttcctactcaacccagcagacaatttgggtcacgcttcagttctggcagtaaagacaaactgagtcagcagttaggagtggactcccttaaacaacagagttagagtggggaagtggtcataacatcgctgtaatcacaaacttgtttttcctaacactgcaatctacagaagtttcaggatttcctctaataaacataaggcaagttggatttgctgttttcttctttttgacgattttgcctttagagttggacccatttgtaatgatttactcgtcaattactccaagataacaaagttggaggtaacattgcta

SEQ ID NO: 42832 - DNA, 556 bp, Homo sapiens
cgatgccagatgcggaggaaccaggcagggcgcattctgtcagtggcgccaggcggtgtagctccagctctcagataacccaggctttgggagggcggggctcctgccggcctcccctgtagtgcggctcgagtcctgtgaagctaccagttgccaaatgaaatctgaaacctcgagctgtgtctgagggttggccccactcagttgttccagcctcttgtactgtatatttacacattcacacacaatcaccctttctaacttctgggactctttgcgcaactgctaggatttctcaagtgcatgtggcaacacagcccagctccgggtggaaaccagcagggctctggaggggctcggagaccaggggagctgtcaaggctgcggcggggaccagagaggagcctggcgggggtggctgggtggctgggggaatccccccaacttcccatcgcaggcgcagctctctcggccgcctatttcctccgaaacccgcgctgcggagcagcccagtgcatagagttcaacacttccccttgttgtggaaagtaaagga

SEQ ID NO: 42833 - DNA, 541 bp, Homo sapiens
aatatattacatttaaaatgccccttttgtattatcggatgctgtgattctgtttattactaggaagtcctggtcctaataaatacaatatttgaacagcacaaagatagagtggtggcaagatgcgcctccatatggatgccccttgatctttactattcagaaatagttctcaaagatcaagccaaagcacacttggctcttggcactaaagaacttggactttgagagtgatcaagtattgcatgtgatgtggcggctcttaaaagggactcttcaaaataaagtgacaggaatatacactgctcttttgtttcagagaaaagactttgccaagatgagaaaaataaaaaatgagagttttataagagtattttcctccattgggtttttgaccagatacttatcattgtgaaagtgccatggaatgtgtcttatttcattctgtgtcagctggcactaagaccctgaggaaaatatttgctatgcatgccaatgaacagaaagaccaaatttcgcaccttcacacatattcagcata

SEQ ID NO: 42834 - DNA, 995 bp, Homo sapiens
aacatggcagctcctgagttgtaaaaatattctggacaatcagcaaaggaaaagattatttcctaatatacaaagaaattggagattaaagggaaagtttcaatattaaggattttaaatccaaaggaaatgttttctctgagacagttctcacatcctaattgtgttactgctccctgccaattcctttgcttattatgcaaggatatagaggaaaaggcaaactatttcccctcaggtatgttagtgtagtggaaaaagcattgaagcaggagttgtgaaacctggttatttgttaactgtggcactaactagccgtgtgagtgaccttatacaaatcatatttttctctgggtttcacttcccttatctacaaaatgggttcacccggctaaattatatttaaggtcctgatgagctttctatgattcctatttcttattttgttttgttttgtttctaaatgctcaaatactacattatttaaggtatatttccttgtaggttttttttcccctctctgtctctttcttcaatatatgggatgggaggatactgactaagtctgagaaggaggagaaagaaaattagctacaggaagagtttatatccccttctacaagaaaacttaaatatagctaccaccgctttgaaaggaatggtttgtgtccaaacagcattttccagacaagctctgtacttttttgccaaaagaattaactttaaactgaaggcagtggacagttaaacaagagtcggcactgggaacagctgtgcgtagaccagaccagtgacttataaggtactgtttttactcatttaaatcttcagggttcatttgttttggggacaagtatttagtggtcatttgacctttttttcctccctcttcacctctattttgagagaaaatatacccttgaaaatattttagctttttaactgtattattttctggctgttgatatttgaaactactcggattttgctttgtt

SEQ ID NO: 42835 - DNA, 1021 bp, Homo sapiens
catgatattgtggcagttttataatatgaagtactgtatctcttatgaacacacacacacagagatattgggggaaattgtttgggacaacaaacccaattagagtaaatgttgaatgcttcccttcttccttcccctcaggcttgtcactaactctgcccactttctcatatacatggctggcttcagcatttctgtactttctcacctttgtatggtttgccacatgcaggtggtttttcagcccagagaagttttcccagttcttgtttttctggaatcattacttctgaatcactttacttcatccctcctctttcaaaactttgctgtgactttcagcacttcacattttgacttcttactaaccagtccattcaagctcagctggactgtaagctctttgagggcaggggctttgtcttacatatttgtctgagcacagtgtttcacccacaaatcccaaattttggggtccagtattgctctggtcttgttacaaatgtggacatatcctctgtgagaatgtgctgacagattgcccggcctgtcgcagtggacatttaattaagtgactggaaagttaaaagacactaacaagaggatatgagcttgcttttcttcccttttggtaaaatattccaggcctttgctctccatatatttcatttcttatttgctcagatttcataataaagcagatgaccattcaggtgactcattcaactttgtttatcttagattcttcaccatttgttggagtttcagcagttgtgcttcacatgatggggacttagactcaatgctgacatttgagagatattttgagatgttagctcgtggtctacctccttgcatttggctttgctccaatcccatttattttgtgacaaatattgcctaagaaaagggataattcaaaaaaaagtgttttggattttttgtttgtaacagcttttgagtttcaaaaaaatctaactccataaggactcagggttcaaattttaaattataatgacaa

SEQ ID NO: 42836 - DNA, 694 bp, Homo sapiens
taaagttcccagctcccagccctgtgtgtctcataagacgggtggccacattttcagttcctttcctgttctccacctgtctccctccctctgttccccgcccctctccacaactcgacctctaaaaaatgcttaagtaattgtagagaaattagcatgaatgcccagatgcatttgttactgaataactcagcagtgaacttggcattccatagctaacctttccccttcattaatccccttctccatccccctcaaacacaggagtacaacaggatgccaggcgaactatgtaaccaaccatgcacgtgagcattttctcccagaattttgactagtcttgttctgcctcaaacactagacggggctcatgctgctcacaattaactgactctggccatgtggtggctgccctcaagatctgccacaaagagaacagcagttcaataaaatctcgaactctatttatagcccacttgaaacaagcagtttccttgaagcccaagaagccctccttgagaatgcagcaagtaatttactagtcccagtactcactggggaaataagagggaggaaatgcagcaagtgcattttttcaagtactgcacatatagaaagcattttgtcctacactctgtcccatttcaccctgatgtcaccagccaaggaagtagacaaaacaggcactagtaag

SEQ ID NO: 42837 - DNA, 1695 bp, Homo sapiens
ctgaaataaatacatctttactatattttaatatggaagtttgcataattccagtatgtatgcaaaatgcaagactttattatatgagtttatgggccagaaatcattttgctcttagaattaatttgattttggcaaatacttcaattttctaagatccttctttaagccctgttacctggaaacctgaaaaaaataaacaacttttgggcttgagagggatgtctgggcaattagaatagctacactgaagtctgcccgtgtgtgtgtgtgtgtgtgtgtgtgtgtgtgtgtgtgtgtgtgtgtgtgtgtgtgtttagagagagagagagattattgcttaaacagtgcccctgggttggttgcttggcttggtgccatttgggattctcagattttattgtcccagctctgatttacggagttcagaatctcgaaaggcaaggtgtctggagtttagggtctttccatgacagcccctcctcttccctgtacactccttttgcttgtggtcaccttgtggtgaccttgcaggactcagcgtttttacctgagctcagtagctggggagcccactagtgctggggagcgagccgtggtttccattcctgggtgatggagtcatgggagaaactgcagtgagcaaacacagtaggacctgagttgggctcgaatgtgctttaagcgactcaggacagagcagctgctctgtctcccagcttgcaagtgcagcctgcatttgtcactgaccactgaagtgtatgtttgtgcaaggtgagagctgggtgctttgttcttaatttggagacaaattgccaggtattgttgttgattgtgtttaataatttggggatatttatatcaccacaaattcaggacctagactgtgtgcggttttatttatacccttgttttctgtcatgatccattcagctctccacggtgtctacattgtggcaacagattggacatagtgctgttcttccacgctgaaatgtgatcgttatagtgcagtgtttcttggattctttcgttaatcgctgctgccacatgatgtatctgttcatatacagaattccagtgctaatttgaaggaatataaaaactgcttccgataaaaatctaaattgctatatttgtttagtgcttgctgtggtgtattctttgctttacccacattttagtggttgaaactttgagagagtagagtgccttaggatttgatctgttgacaaaagcagtgggagttttttgtgtaattgcttgtcaaaatgaaaacaactacttggccatttgtgtgtgtctgcgtgtgtgtttttttttttttaaaaaaagccaaaagaaaaccaaataatacgtgctatcttttgatgtacttacaattaacttaatcaacctataaagcttttgttatccgcatatttgaattttgtaaccttacattctgtgtacacaggacaatacaactgctatgtaagcttgtagaagtacatgggaacgcagagtattactcactatgagtctgttacaataggaattaaaatcatgctcttgggttaacagaccttaatcgtgggtcagttttgtatgttggctacttaagtgaacccataaactataaaaaggagatactttttaaatatctaaataaatatataggaggtttgtatttctgagactcgtatttgagaaaag

SEQ ID NO: 42838 - DNA, 1894 bp, Homo sapiens
taggtgtgagccattgtgcccagcccaatagttcttgtagctctgattgcttagcctaatgttagctactgccaaaatcaggtctttcctgtatatttctgcctcctaatgaaaagagttgattcagagacccagcaaggcagtaagaatactatttgtgaataatccttacaatgagtaattggtatgcaggcagacagaggttaattaagaggcaacgtggtcaggcaacgtgcacagaccaagtgcacaatcttggatatgtagttttacttcccttgcctttggttttactcacttgtgaaataagaaaattagaagaaaaaaatgctttcacttcctgtgaaaatcctgtgattacaggagttccctgtagatcagtgttcaggtcagtggatttttctattggctgaagtgcttgaagggcagcactgtctctgtcttcgtggtgctgagttacactttgtggttctttattttcttagcagcgtgctgtgacacagaaggtaaaataccatttgaaccacagggcagaactaaataataataatcctttcaatgacaaaagattacctacatgggcatgctagtcagagtaatgatgtttttaatggaaagacctttttaatactcctcatggtcttgtaaagcttctgccaaatggctgggaaggaacacagaggccttgggggtcagttggggttaaggcactagcattccaaatcagttcatggaacaaccaggtggatgaatgattaacccagcaagtaaattgttcagtgagtaggactgagagacttagtggacatgggggctggggtgcagaaagtacgggcaagagcatggaagaatgttgaaaacagaattggtttgcaaaccatgcctagagaaacatatatgtgtgtgtaaatacacatacaaatatgtgttgatgtgtttgcagctttacccacagactctttgccactggattttaaacatttttctgttttacagacacacacatacacatgtataaatatgttttcagggtatgcatgttaaatcagtgctcacaaatgaattcaattacaaatcatttgaaagaaagtaaaacttgtatgggaggggaataaatgcaggtatgaaggggcaaaaagtttaccccctgggggttggtttggtgccctgtgatttctggaggggctgagccagccagctgtaaaagtgctacacaagacaagagctgggaagtcaacacaaagtcaaaagaaaaagaaaggagtttgtaccgtagcgtggcattctccctcctcccctcatcctgttgtgactgcacctgctgaatgtgaccggcgggcactggaagcagccgcagccacagccttggtgaggagcaaccgcagccctgccagctccctcccagttctcattgagaaaaggggagacggagcaggaggagggggaggagatgctccctgcaaagctgcctccccccacagatccaaagagcctcttggaatgggcactcgactgttctgacgttgtgattctctcgggagtttgaagacagaaaggaaaggggagaaacctgcagagagcatcaaaggatggggggtgctataaaagaagcaggggggtcctttgaaagaaatctatcatgcactgaaatgctttctggagaaggtgccattattttcctcccctcttgctcagatgaaaggagccagcaaggacagtcctgaaatattcctcaggggactttttgtcattgttcctctttcctcttgcacagagctatttgctgacctttccagaggaatctcagtccagctgagaagacagttcttaataaaaacaaaaaaatgcaaaaaccaattcctgctgtttgaatgggaatggtagcttgcttgct

SEQ ID NO: 42839 - DNA, 1683 bp, Homo sapiens
acacctcaaaatacttcacatagcccagtatctcatggggagcacagagtgtccagtccttttatttaacaaagacactccccaccgcagtcaatgcttaccctgatttaaaaaaaaaaaatagtacttacacattataacaactgccccgcaaaatggttttcactgtgttctttcttggcactccatacgccatggtgagttattacggtatgatttcgttacataggtgcctgatggaatgtcacagataactctgttcactttacctgaaatgatggcaacgcacctaattaatgcctctcacgtgaatattttgtagccaaataatagaaaaaaattctgaatgtcagaaagtccttaataagtgttcattgaactggaaccccaagtgtaaaaccgtgttctctttcatttttccatgaactcattttttcattttttgccaccgaataaggagaaaatgccaggtaagtttcgtcatcctgagacaaagtttcggtgtcgcactctctgcccttgcctgagcctgccaaaccagctccaacaccgctgcgccaaaatgtgtctgatcgtggcagtgctgagcgaccaaaggctctgcctgcacaggaaccacccgccccggcccgggcactttgagcagagcaatccttcccaggttttccctcattcaaaacactcagcaccactcccgcgtccccgcccttgcacgccgattcggggcgagtcccctacccttccccggacggacgcgcagggcccgggaggaactggttcccgggacgggtgggggcctcggccgcccacagagcccgcggagaagggaacggcctcagcctcggctccttcccacacctgggccccaccctgcctccgactcgccaggaatgcgctgtgtgcgcggggcttccagggtggcgggtccccgcgagccggcgccggcggcctggttacccgggctccaggggctcggagggtcgcggccggggtactgaggtaagagcgcgctgcgctaagcgcacatggccgcgcacacgcctcggggccgcgccgcaggcacacgcctccttcccgctcgccgcgggcgccgagtctggggctcctcgcgtcacacgggagcctcaacaaagggctttgtggggccctccccacccgccagggaggggacgccgggcccgggagacgcgccccgcggggtccgctctctggtaaccgggccggggcaggccgcgctctcggaatccagccaaccagccagagagggctgtaagccagacctttcctgggaaggacgctttccaatgtagggggctgcatccaagcgatctggacttcgtttgcgggcgccatttaaagaaatgtacccagtcctggctgctgacatctggggaaccgaagccctgttgccagcgttctcacactgcagtgggtgaaggcagtgagctcaaagcccacgtgtgatattttaggtgttcgtgttcagagcaagacagcatcaatttctaaagccgttattacgctgtggtgatttcgtatttcttcatttgaatacatcagatggccaccccttacggtcaaatgaaacgagcttacatttccattttgagtgagggttttgatgtcagaactggtttggaattctagctctgccacttaagatttaaccttaagatttcgcat

SEQ ID NO: 42840 - DNA, 800 bp, Homo sapiens
tttgttctcaagggagaaatgtttccattagaaatacaactatgtgtctagtccactacattggaagatgaggataacacctgaccatcttgggctgcttatgtcacaaatcaacaggtagaataagtggtttctatactgctagtgattgatcccaactaccaaaggggaacttaggttactgctaaaccacgaggacaaacagaactatgtatggaacccaggggatttcctgggacatctcttaatacttccatgcctgtattagtcagggttctccagagagacagaaccaactgtgtgttgtgtgtgcgtgtgtgtgtgtgtgtgtgtgtgtgcacgtgatatggggagatttattagaggaattggctcacatgattatggagactgagaaatcccatgacaggccatctgcaagctggagaccctgagatgctggtagtgtgactcagtccaagttcaaaatcctcagagccagggaagctgatggtgtaatactcagtccaaggccaaaggcctgagaacctgggggcattggtgtaagtcctggagtcccatagtcagagagcctggaattctgatgtccaaggacaggaggaggagagtatcccagctccaggagagagagagagagagagagagagagagaaatccttttctctccttttttattctatacgtactaaactccttagcaaaaatggtcacttggccatatccttagtattctctcttgaactcttgaacacactttttcattttttacatgaccaggctgaaaattttcaaatctttcc

SEQ ID NO: 42841 - DNA, 978 bp, Homo sapiens
ctcactgcaacctctgcctcctgggttcaagcgattctcctccctcagcctcacaagtagctgggattacagacgtgcatcggcacacctggctaattttttgtatttttagtacagatggggtttcaccatgttggccaggctgattttgaactcctatcctcaagtgatccacccccctcggcctctcaaagtgctaggattacaggcgtgagccaccacaccagggccatggctaatttttttattttttatagagacaagggctcactatgttgcccaggctggtcttgaactcctgggctcaaacgatcctcctgccttggcttcccaaagtgctggcattataggcatgggccaccacacccagcctctgatatctcttaaagcagtatgaatttctgcttctcttataatgtgggtccttgtgtgacaaattttctgtgaacttgtatgcttgaggcttaatgtcagctttactatgcttttatatttgaatgataatttaagtggtaacatatttgtgtgctagcacattctcacattgctataaaaaatacctgagattgggtaacttatttaaaaaagaggtttaatttactcatggttctgccagcttacaggaagcatggtgctggcatcggcttatcttcttgggaggcctcaggaaactctgaattatggcagtaggcaaagggggagcaggcacgtcacatacccagagcaggagcaagagagaaagagaggaagtgccacacatttttaaatgatgagttctctcaagaactcactcactgtcatgaggacaaaccaggaagatggtgttaaaccattcatggaaatctgcccccatgatccaaccacctcccaccaggccccacctccaacattgcagattacagttcaacatgagactggggcagggacatatatccaaactgtatcaatttgtcagtctcatatatatatgagaccgag

SEQ ID NO: 42842 - DNA, 3110 bp, Homo sapiens
ttttcacttaacacacttcccctagcaacctccacctggcaatgttcatttaacccaaaacaaaagagggcctccatcccctgtacagcctgcattccagggaataggctgcaggttatggtcctcatagataaggaatgaatctccgggttggccactcctagattccttagcttggaactccaaacacacattcttcttagacgatagggtcattctcagggtatgcttacgttattgctgtcaggtgagtctgccatacagggtcattctctgggtatacttacgttattgctgtcaggtgcatctgccataccgggtcattctcagggtatgtttatgttattgttgtcacatgtgcctgccgtacaatcctccatatttctttgatatgttttatgcattatcatttcctgctggcttttccatctgtttagctgtgagtttttagaggagggcctcaacaaaccatgggaaactacaacctaacacccacttttgtaaataaagttttgttggaataatcatattcattctctatgtactgcctatggctgcctttgtgctataatagcagagttgagtagttgtgacagagaccatgtggcccataaaacttaaaatgtttactatctggccctttacagaaaaagtatgcccacccccattctagaagataggagtcatcttgttctattttccctcctaagggcctagaatgtaccctgcccaggcttgttgaatgaatgaatacatgaataaataagcttcaaaggacagatatatcaaaaggtggaggccgggcatggtgactcatgtgtgtaatctcagcacttttgggaggctgaggtgggagaattgcttgaacccagcatgggccacatagcaagatccagtcatgtgtttttgtttttgtttttgtttttattacaggtagaactagagcattctagctaaagggaacagaaatagaataagtaaatacgtacaagtgaaaatcaagggcagctttccagtagagcaaaatgtctagcaaaagtgaagtcagaaagactggtttaagaaatattctggggccaggcatggtgactcatgcctgtaatcccagcactttgggaggccgaggcgggtggatcatgaggtcagcatttcaagaccagcctggccaaaatgcaaaatggtgaaaccctgtctctactaaaaacacaaaaattagccaggcgtggtggtgggcgcctgcaatcccagctactcaggaggctgaggtagagaattgcttgaacccgggaggtggaggttgcagtgtgccgagatcacgccactgcactccagcctgggcaacaagagcgaggctccatttcaaaaaaaaaaaaaaattctggaaagcctggagtctagaatgaggagttgatactgaattccctttgcaattgccacatatatcacatgaccagaggtataattaaggaagattcatctgagagtggaggttgctgtaatggtgaagttctaaagagctgactcagaatggtgatggaaagtttctgagagacaatgcagctgggtggaaagagatgggcttcacagccaaacatctacaacccagccccacaacatcccaactgtgtgacgttaggcagttgctcaatctttctgattcgtagctatttgtcaaacatggtgattcagtgaggatccagttacaaaaataacactcatgccaggtagttcagtggagaaaatttaatactgaaagacccaaaaggggaaggtgagactattcaggcattaagcaactgccaccctaaggtggggactaagggagaacttagtgttacaggagctcaggaggcagggctgttcattgggatctgtagaagctggggctatgggggaggtgctgccactgggccagagccattgcccagagcagagaaagaagagaaatgcccaggagttgcctctcttcctgcccttctatctcctcccagtgccttccattggccaaacccacccagaagccagtttcccagcaaagaagccctgaaaaggtggtttgggagaatctaccccgtgactgaaggcagagtagaggaagggcacctagactagactagactagatttgaggcaaacgagcagatgacctgtgccatctatctctgacttggggttgtgttgaagcaggctgagctgacactgtgggcttccacgtagtatacaatcagtaaatggtaaatgttctttttttctttttacatctccatcctcattttttaccattcgtccccaaattcagacatattgatgtctttttagtttctaaaggtcactatgaactctatgactttgggacctgtggatatttaactccctctgcccacgaagtttcatgtccccgtttgatcacacacattttccccaacttcctcttttcttttcttctttcaaaaattttttttcttcctccttccctctccttctctcttctccctcttttgttttagaattcatcttagttactacctctgccaggatgccttccccaagtcctttagtgtttgttggatgtccctgtctgtgctctgataacctcctatgctctatcatgtgtgcctctagcctagcactgagcaagacatagatttattttttctttccgtatgagttttctgtcgctgcataacaaattaccacaaactcagcagtctaaaacaacactcattcattacctgacaatttccataggttggacttgcggcatgttttacctgggtcctctgctcgggatctcactaggctgaaatcaaggtgtagccagatgtatcttcatctggaggcttgactagggaaagttcattttcaagttcccttggcacaatccatttcttatgactgtggcctttttttattttattttttatttttactagctgttggccagaggccaccctcagctcccagaggatgctttcaagtccttgctatatggcctctatacagcatggtaatttgctcctttagggccaacagaagagaagctgctgcagctttggatctctctgacttactccttctttggctcctagatcctcttttcaaaaaagagct

SEQ ID NO: 42843 - DNA, 3913 bp, Homo sapiens
gaaaacaatccatgggaaattaagtcaagtagccaaaggtttaatttggaaatgcaaatatccatcaattaggttttcaattatgtggacaataaaagagttgagcagagcagtagagacaaacaaaattaaaaagagaaaaggcagagaaggcagggaggggcttattttcacacattataccaatttacattacacatcatattaaatttaagtaaggcgcttttcttcatccaaataatttcacccattttaaaccataaaatactgtcggcgaaatctcatctgggccatttgatgtaatctttctgcgtccctttcaggaaggaaggtgcgacaacacaatgaagacagcctgttgctttccttggtatgtttacagcaggaatcgggcagcgacttaactagacataagtttccccttcttcccatgggtctatttgccaaagccccctgcacctattagaattttctgaggttgggctggtggagagcagaaacccggaggctagattcaggagacctggtttcccatgccacttagtagcctgtgacattgagcacaatacttacttttcggcgcttccgtttcattatttgggaaatgggaacaatatatctgttttataagattgttgtgaagatgaaacaggcctgtgtgtgaaaggccttttctaaattgtaaagcgctccccagatgttagttattatctcctttaaagggcacagaatctgtttcaatattataggaggttgcaaaaaggctccttgacactttttgctcagaacttgaccctgagcttaatctcgccgtaaagtgaaagggttcttgcgcccccacagcagcccggggcagggtcaccctcgcgaccggggcggtcattgccgtattccgtcctgagctgccgctcccccacgatcctcccaccaatcccgggagggccgcgacgtcccttgccgcttgggtggcgccagctagagggcgcgggccggggcggaacccggtaccgcagctcgggaggtgggggtgggggcggggcctcgcgcggagggcgtggcctcggggcgtcccgggcagccggcgtgctgagcttgccagccagctagcgagcgacgggcgcgcgcggcccctgcgcactcggccgccgcctgcgcgcgttgcggccgcagctgcacctttgcctccgcggttccgcagccgagccccgggaggaggcgctcccctgcgtcgtccgcacttgcgccctttcccaccgcaacaggtcaggggagggcggaggtgacgagggcgcccgacccgggactagaggacggaagggtctggaaggtgagcgcagccctgcgccacccagggctgggggtcgatccgcccggcccccgacgccgccgccgcggacttctcggaagccgaggctctccccgcctctctgccggcttcccagcacgctgactcaagtcgctggcgttcccacttttccggtgggagccctcggggagaacgggctagggctcagagctctcaccgccctacttgcgatcccgcggcaggtagcgcgtagaaaaacaggggacggggacatgggaagagacccatgctcctccctcacgcgcagcccccaagtcagacgtttgcctgtgcaccccgcgttttgcggagagctgtcccgttgttgggacctgctacttgagttgcgtaatgagtcccagaagtttctcggggggagggggcggggaaaagtggggttcttctctcctgcaccccgggacccttccctgtgcctgtcgtggagagagatgagggcttcccgccgcgtctcgctgagagcaggagggaggcgtgtgtcggtggtccgtagcctccggggaggagttggagccaccttctgagacttaacttcagggacagagggagaggcgtctttagtatgggactggttaatttctcttgataatgcttttttccctcgggtgtcccatcctctgtggccgtcgcaaccccaccctccgacggtgcgagcgccggagccagcgaatgagaggggagagaaggtggagagtgtgaatcacacgttaccttagtgtaatggtagttgcattaatggagctgcgacgggcctgcgggcggttcgataccgtccggctagttttctcttcccggagcttctccaccaccagcacccgcaaattgttatgcagatcatcccgggaaggcacttggctttggaggtggagatgtgtccgaatctcccttgaaccagtctctgttagggggaaaggccttgcagccaagtgatttgttttaagggtggagccggagataattttaaacaccctcccccttggtgcacgttgcggggtgtgactcaccacggggaaatcagactgatttaaaaccttcagtgcaaacttgtaaattaaggcgaagacccagtgttccctgggacagttgcaaagtgagaagagctcagaaactgaagcacagaaacgttaggtaggagtctgagaggcgtggagaattttgcttgtgcaagattatttcagagcaaggtcgtgcggtgtgtgtagaaggtaggtggccgtgggttacctctctcagacctgcgtggtgttggcctctgggtggggataaaagtcacgaaaaagacctttggacccagagtctagttttttttctttggggccgaagaatacctaggcatggccctgtttcagtgtttacttcctctgtctaatgtatttccttagctcgcctttcatctttagtgggaaggattacttgagtggatattccggaagtagattcacaggagaatggaaaattctggatggtttgcttgctttaatttcaaggtgttgtctcttgtggatgttgggaagtattgtacttgaatatttgaagataaatatggagaaaagcagtggtgagaactaaaggaaaatgatccaaggggagatgagagaaagcaacaaaatacataagtagtacgtaaaactagagaaactcactggaattaagccatttttatggagagaaagaaccaaggaaataatttgggatagatttggtcactttgagacaaatagagattgaagagtgggacttttggggaaaatgagtttagatattggagacttttcttttttcaaatataacttacaaggatgttgaggctggagatgtgagacttgcaggtatgttgctgtgaattctttgcttttcacctgcaagaaaatgaactgttaaatattaatctgccttattcactgtaacaattgaatttgtggctttggcatttgcttaactcttcaactttgcaaaactataattttgaagaatcacagtgtgttaaattagaatacaaagatcatttagagattgaaaatttatgacaaaagtccaggccattgtaaacattgctttctcctacatgcgtaacaggcatgcattttttgccaccagaatcactaatctactatagggtaataagactatatcaaaactagctgtctcttctgtttcctctccggtttaactgaattttgcagagctggttgaggtgaaagttacttttttaattgactgagaacttgcttaattaggttttggattaaatttggaagagactattcaattaaaatacatatatatttatcaggcacctttacaagtcactttatttatttttgagacaggttctcactctgtcacttaggctggagtgcggtggcacgatcatagctcactgcaacctccaactcctgggctcatgggatcctccctcctcagcctcccaaatagctgggattacaagcatatgccaccatgcccggctaatttaaaaaatcttttggtagagatggcttggggtgggggtgggggtggggggctccctatgttacccaggtgggtctt

SEQ ID NO: 42844 - DNA, 1185 bp, Homo sapiens
cattgcactccagcgtgggcaatagagcaagactctgtctcataaataaataaataaataaataaataaaataaaaaatagccaggcatggtgttgcatgcctgtggtcccagctacccaggagactgaggtgggaagattgcttgagccttgacctaggctgtggtgagctgagatcctgccactgtactctagcctgggcaacagagcaagaccctgtctcgaaaaagataatctgaaacaaaaagacaattgatgcctctgcttgtaaaaatatgcacaaataccacagacccatggagaaattgtctccgaacacctttccaatcctccgttttttttttttccttataaattggagtgagcaatatagcaatatcttctttattgagtagttgaacagagtaaaggtactaagatttggcaagttcttggagcagagcatagtaagtgctacataaatgtttgctattattactcctgaaggaagagattgtgttctcagtctttttttcttttttatggtaaatattgtctcataagatgaagtaattggtttactttgaataaatggcaaactttgagtttgttccaagaaacttttgtaagggtccaaattctgaaatgaggacaatgccttgtacgatattttaccagcccacagggaatgaggtagagacattttctaccaatatccatgtgcttttctgtgtttcctagcttctttatggttacacagaatcaggtgactcatctgtccagataagcagtgagtcacagataagcaataaacatttatttatttagcataagttaactccagatagtaagtagtaagtactatgaaaaaatagaagtgtggccagcactgctattttcctactcagtagccattcctgtttgttcttgttgtcactaaaagaactttaattgctaagagactacatttgtccagtcttaggtaatagatcatgtttgttctcagccagtggtgacagtttgtatcttgatttacctgcttcctttaaagctagaagaacctgggtgacctagttctggttttttgatggtaaagatttttggcaaaaatagacaaatatgtcaggcaaagccacaccttcctcttctcctcctcttcgtgccttgaatatgaatgagatctctcgttcataagatggaccatgg

SEQ ID NO: 42845 - DNA, 496 bp, Homo sapiens
tcctagtccagtattgtattttaaccttataaagatcttatagggtaggtcaggcagatagttccatttgaagtttaaaggggttaagtggtttgccaatgatctcagggttaataatgaaactgttttctcaacctggaatgagttttctctccctttcccagctcctcagtctattgatatcttagtcatcctttaaggttcagctgaaataccaccttttcttttcatttcttttttttttttgagacagtgtctcactctgttgtccaggctggagtgcagcattgcacagtcacggttcactacagcctcaatctcctgggctcaagtgatcttcccaccttggcctcccaaatgctatgattacaggtgtgagtcaccatgactagactggtttttttttttttttttttttagtacaatttttttgtagacctgggatctcaccatgttgcccaagctagttctgaactcctggcctcaagcagtcctc

SEQ ID NO: 42846 - DNA, 446 bp, Homo sapiens
tcctttctcttttctcttttcctttcttttttttcttttcttcctttcttcctttcctttttcctttcccttttcctttcccttttccttcatgccacagatacttattgaagatctgctgtcagatgatgccttaaaatctgatagatcaaagatgacctatgggagagaatacgagaatagaaaaatgggagtccctgttctgtttaacctggcagataagcacacagccagattgtgaaacaatgtgataaacgctctagcagaagagcaaataaagtgttaaaggatcatagaaaacagcaaagtgtcacggatgaaatctttctaatgagaaccctggtaattctttttcttttggggccctttgggtcatgccatcttacttggagcagtgctatggcagaattcaacttatttatttatttatttttgagatggtgctt

SEQ ID NO: 42847 - DNA, 746 bp, Homo sapiens
ggggcttctgtattgttttagagggagtgtgagcatgtgtgttaggagggggctggaattgcatttctgtggattctccaacctcacctttttccctcaccccctgcataattacctgttccttcacctgtgttcccatggtgtcttatctctgctgtggcgttttcctattgtattttatagtctgtgtttctcatactagactgggtcccctcagggtgttaaggactatgtgttactcatctttacatcccattgccaagaatagtacctaacactggcacatactgggcactcaataaatgtttgttgaattgctttgaaaggtttaccagggagttgccctaacataattctggagaaaggtcctcccatagaagagtctgggcacgttgctatgggagagtgttttctttgtttcacacaccaagtatttatcgagtgcctactgcacactgtgctgtgaggggatacatagatgagtcagacgtgtactctgccctgggttgtgttgacttaatcgtgggtggaaggaagatggtaaatggttgctgataggtttaatgagaaataagctatgatgtggtttagttgtatttgggcttttgtttagaagcataattatttcaatcaaagaatgttagaatttttttaaaatgatgtctcattgatggtagcttacttctcttacttctcattacattcacttttttttttttttttttttttttgagatggagtctcgc

SEQ ID NO: 42848 - DNA, 981 bp, Homo sapiens
gcaggagaatcatgtgaacccaggaggtggaggtttgcagtgagctgagatcgtgccatttcactccagcctgggagacagagcgagactccgtcttaaaaaataataatacattaaaaatataaaaatgcagattctgattcaggaaatctgggatgggacctaaaactgcatttcttataggcctctcatgttagagctgctgctctgcagccttactttaagtaacaaggcactaaaacacaggttctaactcaactgcacactaaattgccagaaggcactaaaaaagagtccccctactaaataaactatatttaaacaaacatttgttttcttacttgaattaatcaaaacacacgaagttgctaattcgacttcctgatcactgtgggctcactggtgctggcacactgagttggcataagctccaggaaggcccagagcggagtccttcacacacttctcatggtcaaatatgtggtttcctttggattttttgaaatgttggaaattgttcattgatcctcacttgctccatttgtggatctggatcagagtccactgattgtgtaatgagagaaccccagattatgcaatctgggggcagatctcacctgcaaacacatgtgtaaaaggaaatcttagcagctgcaactgtagcagagttcttcacagttctctgcttcagaaattatcttttggctgcattggttttggctgcctttctgctcaaacaagcaaacactccccttgatccatccagcatcatgacttgatatgcatgagaactaggagcttgtgttaggtagagtgaaggataagctatcagagaaggcttctgagaagagctgcatttgttagagtttagataatggtaaggggtcttcagctggagcagagggaaaggggcattctaatgaagagaaaatactgtctgcaaaggttggtggcattagagaactgtggggctggagggtg

SEQ ID NO: 42849 - DNA, 2230 bp, Homo sapiens
gtttgtatttcacgacgatttagtaatacaatctggactatctctttatgagacgggcaatgttgtcatgattctaggtagaagaacggagagtccacagtgcaggcagttattcagtattcatctaagagtcttcagctcctccggtgtgctggtccctatgagatgctgaagcacaacctccctccatccttgctcatccaagtattttcctgcttttgaggcacggcttaaacgctttccatggtcctctgagtaggaagtgatttcgtttgtgcttcgtataggacttactatattgcatgctcaagttttttgtttgcttcttgtcaatcccttcattgcttaagaccaaaatgaggtactatttttcctgtaatctacgtgtagtccaaaaaaggcgggctgttttgtaaatatttgtctctatgtaaggaaatcaaaactgaaagcggagtaacaccaagtatgcccgtttcttgagctcaagcactggaaggatcaaaagtagcgaacgtggtttactgccgcggtcttgttcctgctcactgccgcctctgggggccccatattcaacaaatattcaaattggagctggagttctgagcggctgggtactgtgtattccagcggtgggtgtctgtacgtagttagaacctggcaagagagcactctcgaggagcccgcaggcggggctcggccggggaccagcagggcttgtcggcgcccaggctctgccccctacccgaccctgcctgccgcttgccgcctgcctttggctagggccgccgagcgccctgcccatttaagtaggcgggccgtaccaccgcaactttcttgacagggggtatcccggcggactcggacaacttcaagtgagcccagaggcaatttcttttcctttctaactgtggcccgcgttgtgctgttgctgggcaggcgttgggcgccggcggtcttcgagcgtgggggcccgctggctttcccttctcagaaactgcgccgggggcgctcgcttgccccggattcggacgcggcgctccccgggctcgtctgaagtgcagatcgccgcagaggccccagtgcccggatgtccatcaggattagcgcgagccaatacgggccgagcccggggctgcgccgaggacgcccggggctcgagagcaggtagtcccgtaacatcggggcgccgcgccgggacgcgtccccgcccggctccgccaaatggtgagcgcggcgctggcagcagggcccgcggggtgaaggcgctcatggacggaagacccctggctctataagctgaattatggcagcccagtcaaggtaagccgtgcaccggagaaacttttcaaacgcgttcgtggcgaggggagctgaaggttgcgggggagggcagggtgcggggaaggagacggacaggaagcagctttgtcattgccttctcatcattcccgaggctgtggcttgactaaatgtcagataaaaagcagtttggagaacatgctggacaatttctgcacagcggagagagggatggagttaaagtgaagattaaagttagatagcccccttcttcccccagaactgttattttccgggacattaagttgatttcacttgtccgcccttgcccaaatttccatttagattctttgtgcgcctacccctcggttttctggatttcttgctgttgtctcgaggggaagtttagaaatacgattaatgtaaaacatagttcaccttggagagggtgggtgagaatttgcctggtgagtgaaaattttactgctagaatgtacgattccacataaaacggccccgcttacgtgaatctgctgagtaggcaaagaccgggaacgcgccggggtggtgaaggggagagaggataatgaactgcagttgctgtcagaggagcgctattgtaagaacctgaagccccgtctttccatggtttgttactgtttttgtaatgagcgttgaagaagagtgatgacaaggcattagtgattattatgagatccaaactgttctgtgcgattttattttagttttgacagcagttggtgctaagggagacttaggagttatatatacattctctttcaactgtgttttgctagaaagcagtttggtctcacatatttaaagtagtagggttcttcaagctgatatttgatgtagaacagtgattttgggaggtctcagaagacttaacacgtctgaagactca

SEQ ID NO: 42850 - DNA, 590 bp, Homo sapiens
agagtgagtacataacttttacgggttaaatgattaccaatcgtttttacttaaatgtaaaaactgggggagctgaagtagtattttctgtctccttcagatggtcctcaattcattttattatgaatataaagtgttcatttgctcatttgctcaaaataacacagcaggtagaatgcacagtgtcttgctcaagtacaaatgtatcagatgaactttagatttacacttcaggagaaaatatgtataacttttggtgctaatgccccagggaactaaaagtaaagattaactttaaaaccatgcaaattgctgactttctgtgtcttggcagtgatcagtgttgagaatccctcccctgtgcaaactttttccttttcttatctgttcacagtgagttaaagcttaacctgatggccacagagccaacagacctggcatcttgaaagtcttgttctctgctgaatgtctgttttcttgtgttagtttattggctttgtttttaatttaaccagattgaactgctatcaagttcttttttttttttttttttttttttttgggagacggagtttcgctcttgttgccca

SEQ ID NO: 42851 - DNA, 1071 bp, Homo sapiens
gtttccttaatatcctgttgttccccactgttcttatcaatacacagacacttttcctttcattttccaagtgtaagccttttcctgttgctttttgctgctggttagcaagtctaaatgctgagcatttgttctggctgaagctgtgcttggtacattggcccagtttcaaaggtttttcttattgtatgtggtgcaattggttctctggaatgtgtgcgttagaagttcagtgactgggagggactcttccttttggaatggtaaatcctgtcctgtgttccaagctgttctatagaatgtacctcattcagtttggtgtatgtttgggattttctggtgcttaaattaagtaacagtatattcacttagtacatttgatctcttatgggctgtagaagttagttgtttcttaaaaccaaatttgctcctgaataatttgagagaagaggtgccttttaaaatcaccttggggacgtttcagcagtttcttcttgaggcaagatgaatttgggaataatttgtttttcttgttttctgtgtgggacttgaaaatttgatgttttaatcagtttagagaatgttcttcataactgcctgtttttttttaaatgttattattaaatggttaacttcaaaatttatttaaaaaaactattgagtctctggatctgtatgtagagttagatgtgcaaaatctcactcaaccaatattcatatgacctgatgggttagtgctgggtaaataggatcaagcgggaaggggtgactgacctgcagccacatgcattcttccttgggatgggtgcagggagtcagatgatgacggaacagatgagtgagtaggcaggatcattttagatggggattgaaaggtgaagtgctggagagcacctctggtggcggggactggctgaggagccgatagttataacctgagatattagtggagagagagcgagtcttcctcagctttaggcacagagcatgcaaacggggattagcgatgcacagcttgacctgctccaggcatgaaaaggcagccagtctggctagtattccagggaggat

SEQ ID NO: 42852 - DNA, 444 bp, Homo sapiens
agctggtctcgaactcctgacctcaagtgatccgcccaccttggcctcccaaattgctgagattacaggcgtgagccaccccacctggccgcaagtcaatctctgagctagctttcgttcagttggaaaatggggttaataatcccactctcacagggttgttgtgaaaattaaatagaaaactgatgtgatagtgccaaaatcagtgttgactaacatgttaagtgatgtcattccttggccaggctgctgctgctgttatcattgcttttgtattttggtaagccccaaaaaggatgtgctgtcttttacccctggagatcccttggaaacttgttcaacatacaagccttggggcccatgtcaggcctactgccttagaaactctgtaggtctctgtgatctgtgttttgacaaaccctccagctaactgactcaggtttg

SEQ ID NO: 42853 - DNA, 2638 bp, Homo sapiens
aggaatatgacatacagtttgtctagccccactatatttgtttgccatgtaattctttttcagcctgagggttaaatctgccctgcagctagtttttgtaaataaagttttattgggacatagctgcacccatttatctagtattctacaaagtatagcacaaaaaacctaaaatatttattgtctggcctctgtagataaaatttgctgttccctgctgtagagatactgaataagatcttgcaaagaagtcataactaaaatttccccaaaatgcagataaataaacccgactatattgctacagtattgtatgagtagctaggtaaaattaactgaaatggatggctgcttgggaagattgggaaatcttttttctccacatcttggcagctagcccagaccagtggagtgtgcacaggtctgaaggcagaacaccagctcagccgtgggtggggttgctatgcaccactctgcccccaccttcggtctgcttgggttgctggtcatgcaggtggcatgtctttcacggggttgctcatggtttgttttattgctaactcatggtttagaaagaacctttagtccattaaaccatttgatttccccttttagcaaaatatagttgaagatgaactgataagcactttcttggccagggatggatcatcctcttgccctatgcagtaatgtgggtcaattccttgttactctgatgagaaattgtccaacattggtgggtctcctggaggtcctggctcaccagctgcttacccccacatcttttatgctgctgtcactttattctgctattccggcagccttatttatctttgtgagaatgtgacctgaaaaagagggatctagtttgttgcatgtaggatgaagaggatggtggggtatggatggatatagctttcagtgaagagaagacaaacatttcttaaagtatgcccagcaagtcaactctgatttcttcaacacttgatcttatggtactggtacataggttttagagtctctggagaggggaggtagggggattttacttggatgccctagtgttatatgtccacaattgcaaaacccagaccctgtggaatttagaacccaggcaagatgatcgtgtggagtccctgtgaatggtctgaagaggaggggcctctgcccctctcgtttggagtcttggtcctagctttctagacagaggggaggccatttgaaaatatcatataagagctgctgccaccatgagggcaaagtgactaattgcaaatatgcaagggtctccacatgacatttgtgggaaatgtcattcagccctgcctaaaaggtacccatgtttctttttcacttccaattctgtttcaggtccctattacctcatgtctagacaaatgcagctgcctccacacgtaacatttcctgctcccttctaagttatgccaggtagcactaccagagtaatccttctgaggaatcactgtgtcatgttcctgtttagatcattgatgtgtctcatagcccagcaaatacagtcataacttcccatcctggccttcagagccctctgaaatctgcttccgcctgtttcagtgctgtccagcacagattctgcacctcagccctgccctttccaaactcagaccctcttcttcttgtttgttcccactgtcctctctctcttgccagcatcactctgccagaatcttggctgtcctttgtgatacaattcattttgttctttctttaatttgctgcctttggtattaccaagagagcaaccattctgtgatttcccagggcagttaatttatgtattgacttgtgtacttaatctcacagtgccttggattatagatatttatggacccgtttcatgtccctcagtcaacagtgagctctctgaggacagggccaaatgccttaaacatgttggtatctatgaggtagtctataaatagctgctgaatgaatgaattgcaggtggggagttgaataatgaagggacaggtgggatggagagcacctaggacagagctgtctaaagagagtgataacaaatcactaatatctttgtaaagtcacatgggacccagggcgctgggagcatagccctggcagagtgcttccatgtgggcctccacccctgtcaaggacagggaggtcttccaacaggtaggtaagttcctggcgtcataggtagggtatgctgcaagcaatgattttcagtgtttttggcctattgagaggtttttgattctgaaccaagcattctctctagaagtaacataaatgtcatcttataatgctaagattgtaccaagtgcagtgtgtttaggtaaaaactggggaccgacataaaagaactcacaactaaggatcttgtaaatatgtgtcattgtgctgctttgatgtttctctcccccacagaacaatatgatacatcttcaaaaactcactcaaattctcagcaaggaacgtcatcgtaagtgaaatgctttttgtgtattaaaattttgtagtatgaaattgtaatgtctcatgtcaatgcattgcttagatttttctgcctttatgtaatgacattaataagactgctgcattctaaagggaagaaagggcccacattaatttt

SEQ ID NO: 42854 - DNA, 801 bp, Homo sapiens
tttatgcatttatctggcaatcagttttcagaggtttttgcttttctattaaactactttgggcctctctcagttggatgacatgatagtttagcagtgtatctaataccaaggcccgcccttttgagtagcaggaaaatgggcaagggagaaagaagaaatccaccttgtatcgtgccttctaattttatcttttggttgctttgcagtgctccacagtcccttccagaaccagtggcatcagcacattccagcagtgcagagtcagaaagcaccagtgactcagacagttcctcagactcagagagcgagagcagttcaagtgacagcgaagaaaatgagcccctagaaaccccagctccggaggtaccgtgttccccctcgagatggccaccttagatggcagcattctgtcctttgaagttagagtcagtgctgtgggccaggactgaccatgagactgagtcattctgtcccatggggcaatgctttcctgctcctatgctgtctagagccatctgtttctatttatttgcttcttaccaaatatttaataaaggagagttgggagagaggtcttctctcccctgttgaaaatgataggtcttctctgtcattgctagtggtgttttgaagatcaactcattaagactgtttgcacaccattttcttttcccttcttttagaaagaaaacttggtttcagtaggctgctattttaatattaatgagaattcttcgtgaaattttagaaatgcatgaattaaagcaaaaggagactgcctgatttagcaaagggcag

SEQ ID NO: 42855 - DNA, 766 bp, Homo sapiens
gtactcacttctgaaaggattacctaccaggtggcaatgttagaacccggaggatcccccagagagctcagtccagttcataccccagtgcaaatctagaagtgcagcttgtggctctagaaagggaaactttcagctctcactgttgactgtgggaactgtgccctctataagccgttcccaggttttggctgagcacctcttgggcagcttatttatctttctgtttagagcatgcagaaatagtgatcccttcatcttaatcgagtgcatgatttctttaaagcgctgtcaagctgctgagagatctggcctggggaacagtctgcctccgtggtactgtcaggattgatgtctgacccactggttccaaaccccggctacacattacattcacctggtagcctttagcactgatgacgggaatccccaacccccattggtattttaaaaattcctctggtaatcctagtgcctatcagggctggaaaccactgaagcagagccgtactgcagggcccaagagcatacaaagctagttatttggatccaaagttggtcaagtgtgcagtgtttagacatcatgatctaggcaaacagaattcctggcctgaaatatgtcactagttagaaacattagaagctttcaggtaaataaatataaaaaaccagtcaaccgtattcttatttcttcgtcagagaatcatgtgtcgtttggtttaacttcctgctggattctggatgggagttgttgaacatattaatc

SEQ ID NO: 42856 - DNA, 2583 bp, Homo sapiens
gatagcttaggctgttctgaatcatgcgttccctcaccaaagagaaaaacaagtggatgaatttcccttttctgtagcactcaccccagtgaacataacctgtctgcacagcaagtccctgggcctgatcttggtacaaacttgaattggtgtcccttgtgtctttttcatattgaatctccttccgaggcgaatcacagggaagtccctgaatttccccaaagactgcttctccagttttctgtgttgcatgtgctaccaagctcatttgcttccttttggaagaggataatagagccttagaatttaggtgcggaaagaaccttagtggtcccttgatcagctgccaccttttatagatgagatccaaaaaggcactaacatggcttgactgctgagtaaaaatagatctgcagctcaggcatgctgcctcctcccagtcccgtgagctttcctctttttcacatgtgttttctccgtacaagtgtctgttgggaggattctcaagaggcgcacaaggtcggcgtactggctctggcgctgccggtgaataaggtggttaccgcgtcagccccggcttggttcctccacggcccccaccactgccactcagtgcccacacacattcctactccactttagctactcctgcagatgctcccatcttccttcacagccaaactcctggttcactacatctttccatctgctagaatctctatggcaccaaataagtgtcagttctggaaaaagccaccttttccctgcttcctacaagtgtctgcttggtgagctggctgcacggcagcgcagcctgccgagaggctttccctgacggaaactgacttggccccttgcaagcccatgtcttccttttatggccttcactcttgccctgtgctccactgtgggtggagcagcatctggcagagatgatcagggctgcctgacccaacaggttaagaaaagcaaacaagtctgtgaggaccaattcgtcagccggcagcctccctttgtggaaggtgaggcaccatccttgagacaactaacctagtagaaaaagaatttctgaaacccagaccttaagccagattccctgaagtggggatgacctggggataaaccacagggcaaagggactcctttttcctcctgaagagagagtatcacctcatctgaatggcttcttgacccagaaaaatctaaagaacagcatgcctcctgttttacggcaggtcttgttcttggaattttggtctgcatttctgctcacccaatattgcatggctcccatgttaatgaccctttcctacatccatccacttaaagttgtaatgcagtcctgcatccagtgccctcagctgtgtccctgagctgttaagctgaatttctgtgccaactgacaaataccgagtgcctactctggggaagcctctgtggctgttccagacagaagatgacaaagttctaagtgcatagtgtacaaaaaaccactaacttcatgcccgctggcttgatctcaacagttaagcaaaatcagcagaaggggacttttgctttatttagtttgatggcttcctttctaccagcttatagaatattatctgcttctaggttgctaaatatcaatataaagcatattattccagtaagtgccaatgcagttgttagatgctggcgctgaagttagtgctcactgcattctctcttgttggctgtctacttgagtcaccgattggcacagccagagctataaccagtctgtgaggattgatttgccctgacttgtatcttcatgtgtggtctataaggtctgccagattggcttatagtcacaaccagcatgtcctaagcaaaatgaaactatatgaacaaaaatcagctctcatttcactgctagactttggtgttttctttaagaagtagccttgttaatgcttagttttgccttgggggccttaatgtgtcattaactgcctggaaatacctttcatttaaaaaagtatactttagtacctaatgttcaatttagtatcgatctggatattttagcaaattttgacttttcaaagacaaagtttctgtcttgtaatgtttcttgggccggctatactgcctttcatctaaaactcactacagttcactgggccgtttggtaacagggtaacctgggcataattaggtgcttgattgacaagagagttaccagtaccagaagtcaggttctattttaaccccatcatttccaattgattgtttttctctccaccattattcactgtctctcaagtgttagcactctgagttgttgaacggaggtttgtatgctgcgcagagccctgtcgcaatgccccagcaagcttcttgttggcatgtggccactctaaattgtgctccaggatctgctatgggtccatgcttgcaggagaaacagctgtgtagaatttcctattgcatttcatttgtgggtttagaactcggttgcttatttcatattgtctcccttttcagtccttcaaggtacatttttccaacttctctaatgaattattacatttctgagtagctgatatgtttttatct

SEQ ID NO: 42857 - DNA, 830 bp, Homo sapiens
tagtcttctttttcactagttccctatcatttccccagataatgcataaaaatgtattataacaaagaattcaaaccagggatagaaaaagcaaaatgcaattaggatgttagacatgcccacaccttcaattttttcttattcaaatcagttgtacctgttttaagtagaacctgaatgaccaagaagatttttttaatgttcaacctgaatcattcttatttttaccatgtctattctaattataagggtccaaaagatttaaaaagtaacagcaacaatgttattcctgtcgacatataacacatgtcaatgcctgtggtagacagggagctgtgagaggtagcaatgatgtaacataagaactttggattcacagatccaagttcaaattccagctttgccacttatttatgcatgtgaacatgagtaaattattcattctctctgagtctcttgactacattacagagctgttgtgataatcaggcaagatgtagaggtaaattatgttacttcccctcttctttaatacacatgagcactgaaagattcagcattacttctgctacttataagagaatgctgtattgttagcatataaatatctataagaaatatgttaagtaacacaaacaatttacatcaacatatataagcaaatgtgacctttgctagtgacaacctctctgaattcatttcctcctctataaaggaaggtattactaatcacaatatagctaatcatgtactggggaactacaaagtgccggaaacactttgagatgcttaacatgtattatctcttattcttaaaatgattctgaaag

SEQ ID NO: 42858 - DNA, 1442 bp, Homo sapiens
atgtagactataacataaagcttggcatgttttcaaattcacgtcagctctaaaatgggatctgaaatctgatactaaataacttttaaatagcctaagcatatcctttaaaaaattatttccacatgccaccactgggattcagtttctatgcaaatatttgtaagtctcacatgacttaaacctgctccattaaataacttgccaacactctcttacataatagtatcataaaatagggttctacaatttctagataaccattattttaacacttgccatccaagctgtacaaatcaatggccggcaagtcattttcatgttgtttttaataagattctgtccctttacaattccatttgagtcttgattcaaacaaactaaaatgtggctatttaacacatacacccctatgtacccttttagaataaatatccatctttattttataaagatctttaagccacatgtataaataggaacagccaaaaatttggctttttaatgcactgattctcctttgatgttatatagttaattacattcctgaaagtttatttgtacattttctttctctggtacaaaaaaataattaccaattaccaaaatcatttcattagaaatttgaaaatgaaaggaatcaaagtctaaagacctgatgtttaaaattggatgaaaaacacacaagctacataatattagacattaccgtgtatttagaattatataaatactatatgtccctgatactacttaattttctaatttacattctttctttgttagatcagtgaacgtgtgactaattcaagatagtattacgaaagaaaaaccttagacaattaaatttaacggagtttaactgagcaaagacggattcaagaattgggcagtcctggaacaagaataggttcaaagacactggtgctggtgcatagtcgaaaattatttacggacagaaaaaggaaggtgacacacagaaaacggaagtgaggtacagaaacagacgggtcagttacagctcagggtcagccttacttgaacacaggttgaacaactggttgcctttaattggctgaacctcagtgattagcacaagagtaggttgcagtctgtttacacaaccagttaggttacagtttactgtgtacagagaaacttttaggccaagtttaaaatacataaggtgggagcttcaggctaaacttaacagtactcagggaaaaatcatgtcacacttcagtattaaaatatgtagaatatcaacattcattaaatgattccttagacttttgtttaaaaagcttgaaataccaactattaataaaaactttgagtaattttccagagattagccaatatgaatggaaatacaatgaaaataaggcttttggattagtaaagcacttgactatcaacatacaaagcattcctaactccac

SEQ ID NO: 42859 - DNA, 1688 bp, Homo sapiens
tttcccaaagtatccctctaaactggtaacattagcttagggcagagtcaagaagaaagttatgccattaacacagatgaaaatactgaacgttttctatgaaaagtcacccgattaaacactgccaagagggaaaaacagtgcaagtccagtaaagcacgagacacgtagaaaattcaagctatgtagccaaatcgctctctctgaagaaaacagcaagccaactgaacccagcacggagtggaaggcgtaaagagctgtcatcgtggcggtaacaactccaccgggcggctgagcgtctagaaagaggctgcggttcctggttccacatcaggaggcactctccacaaggtctacaccgccgctcccgggaaggcacctccagggcggccagcaagccccccgagtggggacaggcagtgccttcctcgcctcgtccccgcgcggcgtggcccggaggtggcccactcgccccgcccccgcaggccgcggctccagggggcgtccggccgccctcccggggccccgaacccgcgccagccgcaccgcgcctgccctcttcctggaccccgcgaagcacctgcctgggcccctcttcgaaagactgggaggaaggagtcaaggagctgccggggaggctgacagagccagaggctggagctcccctacgggagccgggagcataaccctgctcctcccgccaatgggggcgacaaaagccgtggaaggttgctcaggggctggatctcctgctgtccgggccccaagccctctcagctgtggagtttcggttggtgcacgagggctcgaatttcctccgcacaccggagacccaagacgggacggtgttgcgacttgggggctggggtgagggagggctcggcgcgagcggacggcaccgcacaaaggaagaggggactgaggggagacgaggggactgaggggagacgagcgtcccgttacctcgatcctcgaccctgttcttcctgatgtcgctaaggttgcagccacgttaccacgctcccagagccccggccgccctcagcggaacctcaccaaccccgcgcgagcacccggcggacgcgcgctctcctgcgcggccccgcggagccccggcgggcgcttggcgtcctctcgcctcagcccccgcgagccgcggcctctgggggcggggcgggctgggcggggctgcgcacggcactctgggaagtgtggttctcgggacctcctccccgaggccacccccacggcctcgcccccgcggctccctagtgggcggccgggtctcagggactgggcagtgttgcccggcctggtgaaggcggaccagggcgtggcggaggtccccataacaaatcttgaaataaaacactgcctaaatacctttgagcttatccatgcttcacttctgcggcggtacaaaatttagtttctttgtatgtccatcaaatccccttctgcggttgtgagtgttcctgggatttatgtctttgaaaaaagaaggggaaaaaaaggtttgcatttattcctgtgtcactttcaccacgtgctctacaaaggatatacaaaacaactgtgtttataaatacacacccacagtttgtaaacctaaggaagcagttgattgacctgagagctcgctgctaaaaagcagtgcaagtggccatgcgcggtggctcacgcctgta

SEQ ID NO: 42860 - DNA, 1451 bp, Homo sapiens
tcactccctgactcacccagagcaacttccagtcctgcatgctccattgagggtaagtgccctatacaagtatcattttttatcttttataccgtatttttagtgtacctttcctacgtttaggtacacaaataccaccgtattctagttgcctacagtattcagtccagtaacatgccatgtgggtttgtagcctaggagcagtaggctagaccatatagcctaggtgtgtagtaggctataccatctaggcttgtataagcacattccctgatgttcacaagacaaagtgatgcatttctcagaatcttgttaagtaacacatggctgtatttgaggtgccaaatgaagaaagtataaaaatatccctttgtcatcatttgagatgaattgaataaactacactttggggggcagggtggagaaaaagcataattgttatcatttaatcgtcacctagcatgatctctatagctaatcaagcattgaaaattatcctctatatttcatatttaaatatgacctgctgaattgaatatggagaggtgtgataaaatgcagaatatctctcaaaccctatcagctcctaatacaacccgaggggtaaacaggacctttcaatgacttggcaccagaaggattaggccaaaacacaagtctttgggatgagagcggagaggttgcgggccgcggggcgggtcggtggggaggagggtgcgggggaagggggaatcgaaggcgccattggaaacgttgtaaaatgcttggagcgccctctgctggaatatattggtaaaacagcagtagtgacgaagcgctctgcctccaagttggtagaaatagaaaccaaaaaaagcgaatgaaatggctctttcttaaagtaagccttgacacgaggttcaaacaacagtagcctttcttctagagttttatgtaagatttgtcacttttccttctaccttaaaatatctgccttataccaggaaaaagtatgaatttgatttctttttccttttccttttttttttttttttgagacggagtctcgctctgtagcccaggctggagtgcagtggggcgatctcggctcaccgcaacctccgcctcccaggttcaagtgattctcctgcctcagcctcctgagtagctgggactacaggggcgcaccaccatgcccggcaaatttttgtatttttggtagagacgggatttcactatgttggccacactggtcttgaactcctgaccttatgatctgcccgcctcggccttccaaagtgctgagattgcaggcgtgagccactgtgccggcctatgaatttgatttcttaatagacaccttaagggaggcaacctcaaggaagggcataacatcactttagaacactaaggactgaaaatttcattacagcccagacttttattcattgcgtaccttttgaaaagtcatt

SEQ ID NO: 42861 - DNA, 824 bp, Homo sapiens
gccactgtaccccaaaggctactcacgctttacttaacttggcaaaacattttttgtcacctgatccaacaaagtgattattctctctctttatcccacaacaatttctctgcttctagaaaaccactgttctgtaaaaataaataaaacaaacaatattgaggggtcttttccttttcccatgcatcctgccatgaaaataatatgatttcttttccagaacctactctgatgagctcatttcccactctgtctgaactaagaaaagatattcctttgtgtgaacccagatgacacctctgtccaatgtgttttgattttactgaaagggatcaaagttcttcacaccgaaatcaccagactcccacatgggcaggggcttgggcaaataaagagctgctgctgccattggattttgcactgcccccacatgggttttgtttgtttttgtttgagctttgccagcaaagatttataatccttacctttctgctgtttagcaaggttctgaaaaaagaggacagcacctcctatgaagagcatggagaccctaacgagatgcagccacctctggtgatacgttatgtaagcatgaataagcacacttaaggtcttatgctgacaggatagactacagagtaaccttgccttctccaaatttgcaagacttcaggagtttgagagatctccagtctatttcctttccctcagatctattttcaaatcatttcttatttttcttttcttttctttctttctttgtttcatttttttctttcttttcttttttttttttggcaggggtctcactctgttgcctacat

SEQ ID NO: 42862 - DNA, 918 bp, Homo sapiens
tgtcttggtaatctcttcatccttggtgctgagaagatcggctggatatactgtcccagcattattcaccacgattgttacatcacccacttctttcttcaccttttgaaattgaaagaacactttcactgggtgtattattcaaactcaaagttttgggaccaatataatccaaagatgagagtctttcttctattgtatgaggtctctcagagttcaggcaagacagactgttgagctcaaatcgtggaggccaagggaacactgtcataaaggtgggataaactgttcttttaacatctaaatttcagtacccagcacatcatgttttgcaagtttatcagtaaagtgaaattaacatttatgttgataaattcctatataaattctgaccaaatatttttaaagtgttcattttttaaaaatgtgtttttctttaaacttttttttttttttttttttttttttttagagatagggtctcactatgttgcctgggctggtcttgaactcttggtctcatgtgatccttccaccttggcctcacaaagtgctgggattacatgtgtgaaccaccgcacctggtctaaagtgctggttgagaaatcctggtttcataacctaataactacatgacctgggtctggcttaacctctctgagtcataatttgcttatctgtaaaatgaagtttacagagttattgtagggattgaattaaaaaatgtaaagtttgttagagtgcttagttcattgtgattatttggtatttactcttttaaaataattgtgataataattattaatattacattttctacagaagactacattaacaccaaaataaaatctcacaagggaaataattaaagagaagctggaattactgcaaagttaataggactaaaacaaaactagg

SEQ ID NO: 42863 - DNA, 1298 bp, Homo sapiens
attggaatttaaacaaataagtatgcatcatgtttacaaagacattaaagctatttctaaagagagaaaacattaaaaattatcttcaaattaatcctttataattttattttttaaccaagtaaagagtatgatctggtactcctttcggaggctaatctctagattacctccaagggaagtgtttttcacatgtggtcttgggttatctctatcagaatcacctatgataatcaccttttttaaatgtagagttccaggctcccttccctgccactaccctaccccaaccaaacccagtaagtcaacatatctgagggtgaagccccaacatagttcccaagcacacctggtgacatgtatgcatatttaagcctgtgaatcattactcaggagaagaaaaaaggaagagttagcaagtttaccaatgtcattcatatttacttttttagtcacgctcccttgctttctctctttttggctttccacctgttttcccacaatctgcagaaactgaaatcaaaatgaactaagagctttaactatcaggtgttttcaggattaaaacatttaggaaaacccacagaatggctggtattcatagcaaccaccaatccttttgtctcaatttctcaacttaccttgtacttggatttttgatgaagccagtgtttacgaaattaggacacagacatgttgttttgactccagttatttgtaaggcagccagttcatctgtcaaagttttatgaaatccaacagcagcaaacttgcttgaactgaaaatagagagtttacaaaataattcaagaattctgaaatgtctgcctgttttcctcagttcagcatggtcctctgcagagcaatgtgggcattccctgagtctcaggccccagcccagagctactgcatcagagcccacatcttacaagattctcaggtaaatctgtaggcacattaaggtccaagaagccctgacatagaagatttactgcatcttagcatcacttacggaataagaacatttccttaaaaagccttttaaagaaaattagtagagtatttgtttttgttgttgttccacaaaattcagtgtcactataagctgttccttatttactttaagatgtccatagaatttgctgaaaacttttcctggataaatcctattcttcctttaagtcacagcttcacttcctcaaagaggcctttcctaacccccagtctaaattattttctcattatatagtaattttcagttttctatgatagtatctatctcagatttgtaactgaac

SEQ ID NO: 42864 - DNA, 2825 bp, Homo sapiens
ttttttgtatttttggtagaaatggggtttcaccatgttagccaggctggtcttgaactcctgacctcaggtcatctgcccgcctcggcctccaaaagtgctgggattacaagtgtgagccaccgcatccagcctgcacttgtaattacttaatgtccattttccctactagactgaggtcatggaaccttattttctgtttgtcaccctatccctaatgtctaagcagcagacagtcattatttgttgattgctgtcttcatcagccactcactgggttaaccctcatttaacttcacatcctttgaattattgtttacagcattgcatgtcaactagtgtgtaatggataatgtttcaggccatcaggtatcttctagaaacccctttgttcatctaccaaaggtcaaataaaaggttggattctaggtcctcttctcctccctaagccacacctacacttgtcctaggtaaaaaattacactgaaagtttttttcccttttattgtttttactaaaagatgctttcccgccactccttcagtatcacaggtcaaacgtggtaaaaaatgttttttaaaaaaatttgagacagggtctcactctgtcacccaggctggagtgcagtggggcgtttacagctcactgcagtctccacctcccaggctcaagcaaccccccacctcagcctcccggaaaagatgctttttaaaattactcttggcaataactatggcaatgtagcattggtttctgttgagtataatctttttgtttgttttttgagacggagtctagctctgtcgcccaggctgaagtgcagtggcgccatcttggctcactgcaacctccgccccgcggggttcccgccattctcctgcctcagcctccccaatagctgggactacagacgcccgccaccacgcccggctaatttttttttggtatttttagtagagacggggtttcagtgtgttaggatggtctcgatctcctgacctcgcgatccgcctgccttggactcccaaagtgctgggattacaggcgtgagccaacggcgagtataatctttcaaaccacttttctcattaacagtaagtaggactttctcttaataggtacaagcttcttactcttttaatatatagctaaaacgattgttttttccctatttttaaaatagagggatcaatgaaatcaggttcaggaaaaaattatgagttatccttagggcaaaaatggggatcaatttacaaatggggcagtaactgggactattataacctctaggtctgtttatcatgtgatcatacaacatattaattcatgccctcccatctgcaaaatggcaatactaatttttttttcctccctgctttgcagagatgaggtaaagggtggttgccagcaaaatgcagacacatccacaaattaaaggtaccagaaagtaaaacatagtaaacactgttaccttatttatatcccagagaaccagcttgcttttaagtttagcaaattcataggcagtcagtctcccaattccatgcccagctcctgtaatcagcacgatttcgccggtgactgattttctcctcttaggaataaaaagcttcacgaaggactctagggagcagacgatcagtaacgggagaagcaggaggatgtccagaagaaatttcatcccttttgtggctgcgagcgtttggtgtgtttttttttttttttaccactctaaactgcttttagagggtagctcgatctaacaccagaaagagtaggggcgagagcaaggaggaactcccgtatcaaagaaaaacaactccgaaaccgttccttccgctgggctgggctttgttggtctttcgcaattggctcgggctgcagtgcttgctagctcagagatctgggagggacgaagtccagaccggagcaaagcttcctagttctgctttgcgcagcccccacgcggtgtgtggccgcgattgtcttttacaccactttctcccggtgtcgtgagccggccttggagggttagttgctcacttgttttcctaaattggataagttccaaggataaccgacagtgtccacaggccagatgcttctttcatagttgaaggttgcttatcactagatagggggtgccgctgggcgcggcggctctcgcctgtgatcctggcactttgagaagccctggcgggaggatcgcttgaccccaggagttcgagatcagcctgaacaacatagggagacccccggtctctttttttttttttttaattagccaggcgtagtggcgtgtgcctgtagttccagctactcgagagactgaggcacgggaattgcttgagtccaggaggtggaggctacagtgagtgaagatcgcgccactgcactccagcctggacgaaaaggccagactttgtcctaaaaaacaaaaactagatagaggatgcaaatgtagattcctatcttaaaggatcctgaaaagaccaatcgttctgcttccagctgagaaattgcgctacatcacattttagtttgaactaagcacgatttctggaagacaggggaaattttgtctgttcaaggacagcttcaatcaagcgccagaaaaaattgttatcgtattaaagggattgtttccacaagaaagaagagtatatttgaataatcatttttcacttgacctattagagtttgaaaataaaaaatatatgttgtactttaggaattttatctttattcaagtgaataaatagcaaatcatttagcctaaagattacctatgtaacatttggttttgtagcctatataaatgggta

SEQ ID NO: 42865 - DNA, 1489 bp, Homo sapiens
gaaacaggtcgtgagaatgtgggggtcgaaagggcaggtgcatgatctacagctgtgatggtttagcatttatatggaacatcttctgctacttgagataatgggaatacaatcgatctaggagcctaggagggctagaagcaaggagccagcaagtctagacacattccagaggacattatgtcagacatgcaagccctgcctcagtttttttcccaacactcagctttttcccaacaagtagtggaaagtttcagaaaactatgatcgataaattcaatgaccaataaggaaacaccttattagaaaattatctaagtttatactctaagaaaataaatttatgaatgagatcataaaattgtcaaactagcattcgagtaggtatatacagttacatttttttctgcctcataagtgagactagaatttaaacctgaatatcttatctaataattttgctatgtagaatgtccaaactatacaatttttaatctgagatttgaaagagattgaaattaaactctgcacctgaactcagtgctgcttccctctaatttatttgcagttttctgttatttggtgcctcaggttaaacctactgggagaaagtggttctgaacccttcatatactatccacttttgttttgttatccttgctttcctcttcaaggctactgtggatattcattctagcttgatttacttcatgtaaaaatattcccttttgtggagataaaggagtaaataaaagggtatgcagatttatttgtccttgacttataaccccgaagaattagggtgaatgtgcttaacccagttcctttttcctactattgagtttccttcatcatgagttgaaaccactcaacactcctccttttttgccacctttattgtttgcagccttacaagtcacatttagcctcttgatttccctggagttttataatgctcccagaacactttgtcctatgatcactcccatgtgaattataggtctatttactgtgcgttaaccatctacctaccagtgataacctctgagttcactgctctttcataaacaggaagataagtcctccgagaactgccaagtttattgttatcgtgcaatggtaaaatagttacatattggagaccaatgtgcagagaagagactagataaggccaaaaattgcttgtttgacttggcttttactcagttgtctttatcactcattcctgtggctatattcatgactttgatatcctcagttctgcacagcatcccaatctcagcttggaacctccccctctctcacaccccacccctcccccactagccttccagcccactcacttgagtgcacccactagagcaactacttgactggtgtcctccaatcaactaacttctactttccactacagattacctgactcagttcctcccttctccccttactcagcttagaacccatcgcccttcattagaatcattctcct

SEQ ID NO: 42866 - DNA, 1047 bp, Homo sapiens
tattatttttatttctttcctacctcagatctttttttcaaggtacagtcttatctgccttgaatgctcttttcctagctttttcaatgactggcagcttcatgtccttaggtctctgcacaaaagtgacctcatcagaaaagacatccttcccctgcaatctaaagtagtcacttctccctcaactatcctgtccctcagcagttatctatttccttcacaacaattttcctaatctggaattcctagtttattggtttacttattaatgtttatttccctctcatataaagtaagcttcatgagagtaagaccttgtccattttgttcacaactgtattcatggcacctggggtggtatgcttggtaaatagtattattcgtcattatggtataatgtgaataaatgcaaacctgaaagaggaaatcctttaagatggatcccacgtggctaacaaattttaaacagagccaagtggccatttgcctactaaaggtcacccacatactctgagttcactgaaaactcacacctctattgaactttgggatttacagagctcacctgaaccaaccaataagctcagctgtgccaaccaatcagaattaagctagcttgaatccctcatttgtgtaaacagacctagttagtaatctgggtggcaattttggttataaaatccaaaccgtctctctgttctctggagcacacttctgttttataccaaaggctgtgtttccctggtttgcaaactgttcactggaataaagtctctttcctccaaattccttttcagagaatgtttgtttacaatgactaaataaatgcagaaaaaaaaaagagaatgtgttaggccattcttgcattgctataaagaactacttgaggccgggcacggtagctcaaacatgtaatcccagcactttgggaggacaaggagggcagatcacgaggtcaagagatcaagatcatcctggccaacatggtgaaactccatctctactaaaaatacaaaaaattagctgggcatggtggcatgggccaag

SEQ ID NO: 42867 - DNA, 5161 bp, Homo sapiens
tgtacaggaagcatggtgctgggcatctgcttggctcctggtgaggcctgagaaagcctacaatcatggtggaaggcaaaggggagctgacattttggcgagagtgggagcaagaaagaggtggacaaggtgtcatacatctttaaacaaccagatcttgcatgaactcactatcacaaggatagcactatcacaagggatccaccctcatgacccaaacacctcccaccagacctcacctccaacactggggaatacatttcaacatgagattggaggggagaaatatccaaactatatcagggaaatagttgggattctgaattactcttacttttaacatactcatcaattctaataatcacatatgtcactttcctatttaaaaattctcatttctcagtgttcttggtctgtctcaccaactattgcaagatgcccttgaagttggtatatgcttcataaatttttaaaaagtccttacttctccttaaattctgatgacatctgtttaactaatttaggatgtgggtaatttgatgaggagatgttttgtttctacccaagagcaggttgcagaacatgcactcactacacctgagcagatgtgcagtatgcatccctgaagggaggaacccaggagatctggctgtcccagctaattgcagttttgtttcagtgccatggaattggttttgtttgtacagttgtttgcacaggttcatcaaactaagttcacgctagcctccccttagggaatatggagttataagactagggtctgaggagcttcctgtgagaactactttctgttgctccctttctttgattgttgactttgtaactcactgcttttctcctgtcttctctagtgactaatttgtcaacagactttggacacgctgaacttgatgaacagagccggtctaatacatttccagtttaagcagtgattaacaacactgagagcaaagtttatctgaccagaggaagccgagtactgatatttatctttaaaatgcacatttcaataatagtacttctcaacctgagaaagcagtcaaaataaacaaagctggacactagttaaagcagtaaggacagactttattcagtgatgctagtccaatagggaaaagagtgtaatacaaactaatcccacacttccctgaaacaaaaggctgtggtatgcaaaaaggaaaggcacaaaaggatcttaagttttggggggtggcaggggggcacggtggtttgttgattgatgtgattaggccatttgggtttgttaactggctcttatccagaggagaaacaaacttctatctttatgataggaggcagtggtgctagctaaagcaaggtaccggtcttgtacagggactaggagctagggtgagttatctttctgaatatttgcatttcaaagagatggctcccaagtctttgaggaaactgtgttgggtggtagacttacatcaccaagggtagagaaacaagctttctaaagtgactgctctaagaaggggttcagggacctatctgcctatcatcaagttttggctggaacaaacagtaaattctccaggcattgagttttgatttcagggaagcattttaacgggatctggggtcagcctagggacaaggccttaagctactggaagctatgctagagtataatcaaatctctcagtgccgagaaaagaacttttatatgaggaaggtaaatccttttaaattaccaggcccagagagacattaaaatgagacagcaattacatcctactccccactttgttatgcattcatctctttaaactgcttactatagccacaagtagctaaaaattaacctaataatggtacactggacactgtaactcgcaccctatagcttaacgtatagccaaccactaaccaatactatttctacaaaccagtaattctttacaactttgtatcagtcaactccctgtcccctttttgcctttaaaaacctgattgtaacaaaggtggacaggagttcacatttaaggttacttgggtctgggtcttctgggcagctgtcctcactttggctaaagtaaatgctttaagttctatctcgtgcctcagcgtctaggttgacagtgtagtttgaacagtcaatacctgtcgagagttctgcagttttcagaacaatggttgttaaaattcgattaatctggcttttaagatggtcaaagttttgtaacgtcggtgtattggaaccacaccacagaaacagcggatcatgtaagtaaaagtcaaatagttgccacatcaataagctaatataaatgaagtaagcctgattacaagctgctttggacagtctgggtttccaactttgtttgtcggtttgtttaatttttgcctctcaagtttattatccagtattatgtgtgttgccctctgttcctcctccagcatgtgtgcctattttcacagcttttctcctccacgagtttccaagggccacaactggtcctagcaaagccttgtgaatgaaatccagcaattggagcagacaacttggttaagaaaacaaaaacaaaaaaccaagaaacccttcaagatacgagggctgagtctctggactatctcctcttgctgtaaccgcccaaggggttcacctttcccgcttcctagacagagctgattcatcaagacaggggaattgcaatagagaaagagtaattcatgcagagccagctgtgtgagaccggagttctattattactcaaatcagtctccctgagcattcagggagcagaggttttttctttttttttttgatacgtagtttcactcttgtcgcccagggtggagtgcagtggtgcgacgttggctcactgcaacctccacctcccgggttcaagcgattctcctgcttcatcctcctgagcagctgggactacaggcgcgtttaccaccatgcccagctaatttttgtatttttagtagagacgaggtttcaccacgttggccaggctggtcttgaactcctgactgcaagtgatcccgcctcggcctcccaaatcagtcataattttgcaaaggcggtttcattcccataacgaagtattattcaaaaatatggctaagacctgcgtccttccgcaacaacttactccctaaaaaaaccagagcagggccaggcgcgttggctgaggcctgtaacctcagcactgtgggaggcccaaacagttggattatttgagcttgagagttggagaccagcctgggcaacatggcaaaaatctgtcgctacaaaacatacaaaaattagccaggtatggcggtgtgtgcctgtagtcccagctacgtcgggggctgagacaagagactcgcttaagcccaggaggttgaggcggcaatgagctgaaatcgcgcccctgcactgcagcctgggcgacagagccagactcttgtctcaaaaaacaaaaaccaaaaacccagggcagcaagtctctctcaaaccccttggcttctttcccacttattcccgttccagttcctcgtctgtttcacctttcctttcctctgacactttcttggtagttccctgcgtccccaagtaagcctgcgcagactgggaagtctgggaagtcggagaaggaaggcgctaccaagccggcaacgcacgacctttgctttgcggcgcggccgtaaagcgccattacgcagagagaaagttacgaggttcgtggccgcggtttccccaggcagctggcgctggaggcttcggcgtcacgtgctggtctggatttttctcgatgcactggggaaagcggtggactcttatcgtgggagggctcttgatctgtgatttatagataggcacagctactcccgttcgggaacccaacggcagacaggtcctagtgcccatcagatacccgcggccgggactcggagctgtggggtgtggggaggcggaggcaccaactaagagcgacctagcatcgcaaagccgccctcggggcgctcatggcgggacgcctcctgggaaaggctttagccgcggtgtctctctctctggccttggcctctgtgactatcaggtcctcgcgctgccgcggcatccaggcgttcaggtattccaccctcctactaccggctcctttgccctagaccttgagttgggggtgggaagcagcttttttttctggcgtattctgtaggctttgctttgcctctcgggtttttatagtcatatacaagttttcaaaaaggctctaaaatattttatctgccttttgaggaaaacgagtggcagggacccttcttgacttctgattttgaaatttgccattctctgtaaatcattgttagtatcacgagagagtttaaatagcaattgtttggggtggtggtgtcccgtgccatttttttatggttaatacttaaaacattattattagtattaatacatgtacatagttaaaacaacttgaaaatgtaaaatgaaaagtaaaatcactattccccctgtcccctttccagggtggacaatatattatatttactatctacctccttttttttaataatttgtctattgtggttaaatttagggatttatggtgtcttacactgcctccttctgttcttcccttctccagtttttattctttgagttagtaaacacagggtcctaggtgcagcagccttttcttattttatagatattaaaagtcttgaatctacaaagatgataattagaaaaatctatttcctaaataatttacttactgttggtcaattgttctgtgtctttttggtcctgtttccttctgttgctttttctcgaacatgtgatgggcactggttatctgtctatattttgattaatatgagtaataggtcttgttttcagtacatgggtcgctaattgacttttggctctgtaccaggttgcctagataggaaggtttcagttgagggcatgtgagcaggtaccagatgggtagactgggaacctgccttttgcttcaggctttgcagtagtggtggagcaacttctctgctgagtatagctgtttatttcctccgtgtgaactgtaaaattattaagcctaagtttctgctgtgtactcttaacaccagtattcacagtaggggtcctaccccttcattt

SEQ ID NO: 42868 - DNA, 754 bp, Homo sapiens
ggatcctggcagacacagtgaggttttccctgttggtctgccttacagatgtggcctcttttacactggaagctcatgcaagaatctaacagaaaagattgggcaggaagcatggacaaagttaaattgagtatgtaaatacaaattcactcaactagtttcattttcactaatgaaggggaaattttgaagtccttgaaatttgcaaatttggaagtgggaagacattggaatcctctttaattgatgtgttaatgtcagatggaaccttctattttacatgataattttactgattattttacatgataatctagatttcctcttgcagcagtttggattggagatgtgcaaagaacagacagctcttctatgcctgagatggtcatagtctgaagtccttagtgcaacgttgtgcaagctggtcagaagtgaaataaggctgaaattcaaaatgtttgtgatagggggaggaataaggtcctttatcaagtatgggatataaattcatcagcaagttacagatttgagaataaataagatagaattaagtcttttcagaagcaaaaggatttaaggaagaactctagccctttcactaatatctcaacagggcttccagtttgcaaacacatttacccattgttgtatatcaagtatgcacaagaaaatgtcaacaatttatgggagcatttccttggggaggactggggagagaaaaaattctgtgcagcattcacaaaggatggaggga

SEQ ID NO: 42869 - DNA, 1032 bp, Homo sapiens
aagggaaatcagtcacaactgtggaggtagacagtaacccttggagaacaggacccatttctatctttatcagtgagatttagtgcgttatctctggggattactcaataagacttggagtctcctctttggatttgagaaaacactagaaatgtagtattatcttgtgattttgtagttaagccagagttacattggaaatctctctgaatttgttggtaaagctttcataccaggcttttaaggtataagaaaactcctacgttagagtggcagcagagttctcagtaactgaggttaccattgaccttgtgtaccaaaatctgtgccaagtcctgctggcacaggactttgtggctgccaggattttgaatgaaagctccaaatatgcttcctccctgccccgatcctgctgtagtttccagattatcattttggtatgtgtttgcttaataaagtaggaccttaatctttataactaattcaacaaacattgttggctcttttgttatgtcagagacattttgttggacactggtgattcaactcgaaaacaatatggcatctgctttcaaggcattagagcagcagttgccagtatctcctatccttcagatctgtcataatttatcattccagctagttccagggactttcaatggccaatatctgcatttccgtgcctgaaaaatcatggaaattgacctggctcactcaagggacaggctggaaatgctgggaaattaatacccctctagcaatcctcagccaaaagaagtaccctagctccttcagtcgccaaatggaatacttctgagaaaatgtctttacatggcttgaatgatgttccttttattagcttcctttccttcttgtgttacttctgcactcctctttgttccctgtgcttcttaaataaacaacactcaaatccaagatctgcatctacgggaactcaaataaaacaggcattctcagcctaatgatagagatagacctaaaaagaaataactgtaatatattttagtaatg

SEQ ID NO: 42870 - DNA, 785 bp, Homo sapiens
tacaatcagcattaaaaagagaaacataatataaattatcaatgtgtgtcacacagtaatggtattacatttcatgaaaattgttgctgatgcacacacacagacacacacacagagttgattcttgttactaagaaattatggtccgtaaagttgccttgaacactgaattaactaataccgaggaaatacagagttagggtcctacaagcctctagttatgacatttgtgtaagttagaaaccatccttataaactttataaaattaatcagggaagaagagagtgggaaatgaaaataagctaagcttgcagcacattcagcattaaccatgaggtcatcttgctctctgatctatttttcatttgagttattcttccagtcctgcataccaatgaaactactgatgtcagctggtctgaaggactccacagaagctgactcagtaaagaatgtgatttccacatactgatgatttcatcccccttaccccaaccaatcaatgaccccaattttccttccacaatctctttaaaaatcctagcccagaactcctcagggagatgaatttcagggtctcattccatctccacattcagcaccctgtgatcattgaactctttctctgctgcagatgctgctgtctcagtgtaacttgtctgttactcagtgtaattggtctgttgctgtcacagggggcatgtgaacctattggtcttatagtaaattggtcagtatataatcttgttttatgtctgttctttttaaagacaccttatttaat

SEQ ID NO: 42871 - DNA, 2188 bp, Homo sapiens
ctttgagatacttttggaagttctcgaaagagcttcaaaataaaacaaactttattttaattgatattaactactcaacagtattaggagaaagtggggatactatgaaatcaagttttaagatatgaagtattctttttacttccataaaatccttccatcactactccagtcatgttgataccatctgaattcaggttgtaccaactatattttgctttagtcattgctgtttccctcccagtaaatatcattctctattgattaaacctaagtatatcaaatgaaattgatataatacaatgaaatttcagaatgaccctgaggaagaaacccttagacaaatgagttgaactttccaagaagttcctcagacaggggagaaaaaagacagcaaactggtaaaggaagaaattagaaccgtaaggactaaattttccccaaagtgagcttgaggtaaaaggttttccagtcacaatgaaaacagaatttgccaacaaggtcatgatcacgtcagacaacttacaatggggaaaaagaaatttacagaaagccttgtttatttttaaccacaaaatttggactatttccaaactacctctgggaagtgcctgtctgcccttgaccgtgatgttgttcctttttctctcttctctccctcaaaccttcccagcactcagatgccaacttaagggtagcagggaagcactcaattgcatttgaaagttctaatcatgttttgttcctttaacttacataattgattctggtgatttgggcatttatcattggtaagggattgcttattaaatgaatgggaatacttgtgctcctaatttaatgcaaaagctctatgcctttctgacctatgcggtctgcattatttttgaaaagtataacttagttatttgtattgtaatccatttaacaaacaacctcactgtcgttggtacagtgtaataaactttctctggcagccaaaagactttatgcacaatacaatgagtgatttttgaggacatccttgacagtgggaaatggaccatattgttgttcatttcagggagaatcctgtggaagaaaaataaaaatctgaggaccccaaactcactatgccaaaaggaaaagtcaaccttgggaactgaaccacacagaactgcctcccattttatccctaaatagcaacaaagatagaaggccacctacttccccaggaggcctcccacacaatttcctcatgaaggaatttcctgtgggcctcaagatctttaccctaaaacagttctgttgaatttcaccctgacaatgtgaaactaacaggttatcttcacaggtaagggtcaaagaacaggactgcaagtgatccctccccttgcctgagacaaatagtatttgatttcttcctctgtgtttactttacctcatgtaaaaatgcagagtcactgagcaatgcacaattgactatttctctaacccctcctttcacatgtaacatgtggattcagtgactgatgatcaaagcctcaaaagaatgcaacagcttgccccttttatctattccccctgacaccctcccccccggctgcctttttcctttctcttttccctactgcccattctttcccctttaaatattgaagtcccaaacctccttggaaaaagcatggatcacagatgatcctgtgattttgtgttccttttcttgtcctcaaccttggcaaagtaaacctctaaaatgattgagactcacctcagccattttctctgatttatattcctgctatttcaagccggtgaatggaacaaggtagacctcatctatttcccaagaatgatattaatttgcagcatgatatctgaaaaatcatttctctactctccatcattagaagatatagctcctttggaaggccaatgaaatatgtaggatgcctggttcctttgtagatattctgacacaagtctttggacttttctagactggtggcattcatgtaggtgggtgttcaaagatgcacaaaggacaatgttaatattcttttgaggcagctcttaagaactgaaacactccctatagaccagtcagcttagatgtcttctagagcaattaataaactccataacccaaataaagtccagggttcatgaagcccagtgtctagatgctgctttcaaaggaacacaatca

SEQ ID NO: 42872 - DNA, 1504 bp, Homo sapiens
tctctgttagcaggattatctcctttttataagaacatttatgtttacagagaagcccacccagataatccagaacactctgtctcaagatcttaatttaatcacatttgcaaaatcccttttgcgatataagataacattcacaggctctaatgattagtccctgcttattttcgggagccattattctgcctagcatacctatctttttctacctcagcctttcagatgcagcttaaacatttcttcttttctgggaaattttctaacatcctattccctccccaatcccattacttcctccagcaattcccactgagtacctcactaatacaactgtctgggtttgcttgggactaagggggttcccagaacacaagactttcagtgttaaaaccagaaaactgccagacaaaccaggatgagttagttaccctaagtcctcacctttctttccacatcaccctctttgtagcactcagcacgtgggattgtaagttagaattctcagttctcttgcctttctcctctgcaaggctatgggtgggaatgtttcttttgtgtttctgatgctcatgccttcgtttctggcatgtggcagatgctccgtaaagtgaatggagtttgtggagcagccctgcaacagcagacaatctaggcaaagtggaaattttccgccctgtgactagaacaaaaaaccaaaatgaaacagaacattaaacaccggtatgatgtgctatgttctcttgggcacttttttctttgattttctcatctatacttgcaaatttgagtaaaattagacacagttctttgcaagaacccaaatattcgcagtccttgacagaacacactgtcttcaaacaaacagaggctctactatttatagctgattgcttcaccgcttgtcttgcctgttttttagaatgccctttgccacgaacaaagcagattgaaaatagatgtggggccaggttctgggagtcttctaacatttctttattctcttaaacactgataaaattgacccattcttggaatttgcctcctgaatgctgcagcagctggagcaccagacatgtgactctctttgatatcacttctgtctgtgtgccctccagccaactttgtttacctctacaaaagtgcccttgaacaaaggtgccctgcaacttagagttaatggaaaagcaactgaggtaaacattaaaaagtgagactcagacaaagacatcatttaaccagagccatcgattccacagtcccagttcagagaaaaatcatttctattgttgagtagggaataaatttatgcccaaaagccaagtgtgcctataatgcttatgaacaaccacatgaatggaaaccctggacagaatgagggaccagaaggaattaaattcacatcttctgtcgcccacatttaaaaagagagaaactaggaaattgaaacctatttatgttatgcatctgcaaaaacagaagctgtgtaagaagttactcc

SEQ ID NO: 42873 - DNA, 1287 bp, Homo sapiens
tatgccttccatacagaattgaatcacatcaatcaaagtgaagaactcagcacaaaagcaattagagggaaatatttggaagactacaaaaacatagtgttgtagataaaagtaaatatattattttggtttggaaaaatatttcaaactctacttaaggtttataaatcctttctgtaattcatgataaagggggaagctcttgattattatcctcaagacatacacatatcatgtctacgtgaatgaatctgaaaactgtctgaatgaggataactccagaggtcacgacagatgaatgactcatctacccaaatgcagccaccagagccctgatttgaaccctgggcatacagctttttaaacacaccccagcatttgcctgcaaatgtgtcctcacagctataatttcacttccaaactcactaaagagtcatctatcaatgcactactgactggtttttacacatactgagttgcaaagcagtattttaaaaccagctatgtaagaaaacccatatttccctagctttatgtgctctagagctataaggacataaagctaatggaaataagaaggaaaagcaaacgtccccttcctccttccatcggatctggctttctggtcaccgtgttttatcagattaaaatgtaaaatgagactagtaaagctgatttaaataatctctctctatctaaccatgagaaaaattggaaggcccaactaaggtcgtgttaaatgttaacctctgccaggaattgaggctgaagtttcaccagcagaacaggaagttgcattctataactgcagtcaacttgcctctattgtctttacagagcaccagataacgttaaaaattcaaaattgctaaaacaccacaaataacttctttctctgtcttcatgacatattttatgttttctttttattttttgtctttctgaccctctaactaagttgatattttacttctcgagtccctaagaccttactttatagcttcagaattttagagtcagaaggggtcataatctaaggttcctgagaaggctataaccttagggggtgaaaaagagagaaaatatatttaaataagttttgttatctgataaacttactgacttgttttcccttttatcacagactggatagaactttgtctaaaatgaacactgatccacagactatagcttgggaacccctgatctaatttcatcccctaactgtcagctaaagaaattaaaactcagggtcacttggccaagatcacagagttcattgctttt

SEQ ID NO: 42874 - DNA, 904 bp, Homo sapiens
caaatttttaaaggaccatgcatattaaagatactgatattattcttattacaattcaaagatttacaaatgattctaagatctttgattagtgaaagtgagaacatgagaccagcctgggcaacatagtcagacctcatctctaccaaaaaaaaaaaaaaattagctgggcaaggtggcacatggcctgtagttccagctactcaggtagctgaggtgggagaatctcttgagcctaggaggtcaaggcagcagtgagtcatgactgggccactgcactccagcctggatgactaagcaagaccgtgtctcaaaaaaaaattttttttttaaagaaagtgaggacaacagggataactacagaactatccataagagactgtaaagaaaaggcaaaaaaattaacaggtaagtaaaagacaagtgtcagataagttacatgtcaaatgcaagtaggattatttatacctggtacaaattcaaagtacaagattttgtaaaaggaactgttacttattaccagaaagggatcaaaagatcattaaatacttatccctaatatcattgattcagtgacccatgccgaccataacgcaaggcattatcaggatgcatgaaaacaaaagagaaagcattgtattgaatggttcagagctatgctcatgcatctgacacagtatatcgaacacagtccattgcacctcaaaactgacttgatgtaactagaaatgacagggtagggatgagggtgaaggattcactcatatacttgagctaaagaatagactaaaattaaaaagatatttcatctggaatagaggtgagcaaactttttctgtcagagagcaaatattttaggctttgcaggccatatggtctctatcacaactatgcaactttactg

SEQ ID NO: 42875 - DNA, 651 bp, Homo sapiens
taataacctgttcttttaaaggacattacaattcgtgactgcctgcccctcttaaaaatttcataatagttaacacacatatagtccttaagatacgcagagcatttgcatctaatatgtgctaagcattgctagtttaacatactaattcatttaaacccctcaaaaaccccatgacctaggtaatagtattgcatttcatggatgagggaacaaggataggtaggctgggcgatttgcccaaggttgcacaggtcagcagtgacacagcggaattcagaaccacggtctggctcctgaagcagccctctcaagcagtcatcctgctctcagtcagaaactgctttacttctgcaacatctagaataaattaccattcttctatttcatatagaattttatattttaatgtcactagtgccatttgtctaagtaacaagctactgcatactcgaaatcacaaagctaagcttgagtagtaaaggacagaggcaagttttctgaactccttgcaggcttgaacaatagccttctggctcttcaataagtacaatcatacaggcaagagtggttgcagatattacctttatgttacttaaaccgaaagaaacaaaaatccattctatttaattttacattaatgtttttccc

SEQ ID NO: 42876 - DNA, 1302 bp, Homo sapiens
ggcgggtgagcgattccctcccttcccaggccttcccgggaatggaacgtgggcgcccgcgcccgggctccggttccacttggaacgcggactcgggagccgccgggcgagcgcgcagaccgcgggggcggctccctcgcacctccccgctcagcgcgccgcggcggatgggcgaggcggggcgaggccagagggaggcgggccaaaggggcgggcgagaggacgcgggaccgcggggaggtcgggggcggggagcaggcggcggcgggcgccgggaagaaaggaacatggctcctgaggcgcacagcgccgagcgcggcgccgcgcacccgcgcgccggacgccagtgaccgcgatggtgaactccagtcgcgtgcagcctcagcagcccggggacgccaagcggccgcccgcgccccgcgcgccggacccgggccggctgatggctggctgcgcggccgtgggcgccagcctcgccgccccgggcggcctctgcgagcagcggggcctggagatcgagatgcagcgcatccggcaggcggccgcgcgggaccccccggccggagccgcggcctccccttctcctccgctctcgtcgtgctcccggcaggcgtggagccgcgataaccccggcttcgaggccgaggaggaggaggaggaggtggaaggggaagaaggcggaatggtggtggagatggacgtagagtggcgcccgggcagccggaggtcggccgcctcctcggccgtgagctccgtgggcgcgcggagccgggggcttgggggctaccacggcgcgggccacccgagcgggaggcggcgccggcgagaggaccagggcccgccgtgccccagcccagtcggcggcggggacccgctgcatcgccacctccccctggaagggcagccgccccgagtggcctgggcggagaggctggttcgcgggctgcgaggtaagagcgcgcgacccgcagcggcagatgcacgaaccagaacggccggcgccggccggggccatcgcccgctgcggcagctccccgggctccatctcgcatcccctctgcgttccgcctcccttggaagcgcattccccacctccgctagtgctgccctatttccggtacccagcgcggaattccactgctcttttgttggtgcatatttattggatacctccttcttcaggatatgtcaccatagtcttttttactgaaaattagtgaaagcctaattagagtgaaagagtacatctgggttttgtttttttttttcttgtagaggaaaaaatgaacattacttgtgtaa

SEQ ID NO: 42877 - DNA, 511 bp, Homo sapiens
tgttccttagtgcctagttgtttataaaccatgggaaagaatgaaatcattgaccaaatgagacagggtaacagtcttccctgggagtaaagagactagcagtctctattgacatatattttaggcctggcctccaaaataaatttacccaaagaagtgatgtatttgtgtccagggctaccgagcctaatctttggctgcctctgtgttattctaagttgtaattttccatgtcatctaaatttgtaataattctttaatatgatagtgtttcagtgaacaaacattctgcttgctgcatttcttctgagtgagtaattccctgacaactaccagatcttggcagaagcaaagttggtcataagttatgctccactctcagtgctggtgaaacgtatgatgcgtaacacagtgtttttgaattcagtgctgattttcctaaaggacatttggaaggaaaaaagaaaaggaaaggaaatacccaaattcaggaatagaacttacatattat

SEQ ID NO: 42878 - DNA, 743 bp, Homo sapiens
agggcaggacaggaaagttgggcctctttgttcttctcaatgtaacttctttatttggtttaaagtataaaatgtatacaacaacaaataaccacatttaaaatacacagtttgtttcccaacatcattttgctaagtcatagtggctccttaactgtaatttttttttttattagtccaagccttaggattatgttatctgtgatatatgttataatagaaaacttaagcctcttaaaacaaagtccttgggatgggacctaagattcacattatcttgattccgcataacagttgcttacattttagcaaatctccagtgtgtatgcaagcactcctcacttggcacaattctgatacacacaaactttggttaccccagttttgttatgtaacaccaccttcaacaacacagttcaaatttcagttatcatagtatattaactctgagtaacagcacaaagtacaaactccactgctagctcttcagtgtatagatcagttacctgagtaacagatgtgcaggctgagcaggctcactggtcagtcatgacactattttcagtctgttactaattggtcactgagcatctgctatccaattcacaaacaaagaaagcatgtagtgttgcttccttgtgttccagtaataagcccatgtgacattttacaaaaatggataattgaaaaagagaatgggtgcagtggctcacgcatgttgggaggccaaggcggatggatca

SEQ ID NO: 42879 - DNA, 2593 bp, Homo sapiens
acaacagccaaaaggtgaaagcaacccaagtttccatctatagatgaatggaaaaacgaaatgtggtatgtacatacaatggaatattattcaaccttacaacggaaagaaatctgacacatgctacatgaatgagccataaagacaacatgctaaaggaaatgagtcagttaccaaagaatatctactgtatgattccacttatatgagggtcttagagtagtcaagttcagagacagaaagtagaatgattgctgccaggggttaggagaggcagatatgagatgggaagttattgcttaatgggtacagatattccacttgagaagacaaaaagaattctagagttggatggtggtgatagttgcataacaatgtaaatgtacttaatgccactgaactgtacatttaaaaataattgggccaggtggagtggctcacgcctgtaatcccagcactttgggaggccaaggtgggtggacccacctgaggtcaggagttcgaagccagtctagccaacatggtgcgaccccgtctctactaaaaatacaaaaattagctgggcgtggtggtggatgtctgtagtcgaggctacttgggaagctgaggcaggagaattgcttgaacccgggaggcggagattgcagtgagctgagatcgcgtcactgcactccagcctgggcaacagagcatgactctgtctcaaaaataaactgactcatcctaccctcaataaaagaatgacatttacactatacttgtcttaaattcaaattcttaatggatttcaataagcttgaagaaagtaacagcattttctgaaaatcaagatccaaatttacttacctgttctggattccagtagaatcattttttagcccaaagtaaatggcacctataaccagtcccagtacgactgtgacaatgatcttttcaaaaagaaaaatgcaaaaaaaggggaagagtttcaattagagataaaaacttatacacaccatttattagtataatatatggttacataatcagatctctccattaagataaacactcaatggcttggccaacgtccctgggagaaaataaaacagcatacattatttagactgcttcctaagttaaaaattaagttatctgtgctttggggagagtggtaggacacaaagcacactgctggaaaagctggacttcctcccattgcaccacccagcagtcagttcagggtctgcttcaggttactgagcttgtgaataccacacaggatagcagagcaatgcaagtatgtagcaaagcaaagtccaagtgcctaagagttttgaccctgaactgaactctcaacctttgtgccaatgaacatgagtcattttatatttcaagaggttaaagtgaaaacaggatatctttattcttaacattaaaaataaataaaaattttaaagcacacattaaaaaaattctaacaatggaattttgcacagtgaggaaataggggtgagatggagcctgcctatccaacctctagggagtccatgcctgcactggaaaagtgcattgtcactgtcaccaaagcatttggccggctttctctgtgcacacactgcatgcttccactacccatctcctgtcactgcttcctcatcgcttcagccagtgaggcctatagccaatgctgcagacctaagctgccaattctttgctgttctcacctatcttcaccactcaattgatttctatagctcctaaggagactggacaaacaccaatcttgtttctaggataaagggtctcttaaggacacttcaataagcaaagggttaatttaagggttacgttatgatataatttatctgagaaaatcctatttatatttactcgtgagttaaatattaaaaaacaagaaatgggctgggcgtggtggctcatgcctgtaatatcagcaatttgggaggccgagggggcagattgcctgaactcaggagtttgagaccagcctgggcaacatggtgagactccgtctctactaaaaaaaaacacacacaaaaaaattagccaggcatggtggtgtacgcctgtagtcccagctactcgggaggctgaggcacaagaatcacttgaaccctagaggtggaggttgcagcgagccaagatcataccactgcactccagcctgggcgacagagcgatactgtctcaaaaaataaattgataaataaataagaataaaaaaataagaaatggtaatctaaagaagacaaaatatcctaccatatcttggaatcttcaaagttaaaaaaacaaaatctcaatactgcaacagtctaatggtatcaagatttaaagtaactgatcaaggacacttttggcatgaagcaaaccgaactgcaaaaacagtaccatcatctgtgataactagtttgtgaagaacctagtctggaaagaacattattccaatgtttctacttatgagctgtcttttaaaattcacttagaaattttggggggaaatccattatgctggcatattttcattaccctcagaatatacttcaacagaccaagcttccaaaataaatgcagatgactgtatcaacag

SEQ ID NO: 42880 - DNA, 646 bp, Homo sapiens
actacctgagacaaacaccacctgatctgcaaagcctaaaatatttactacctgatcctttacaaaaaaaaaaaatatatattgcctactcctgccctaagctaatattccagtttttcacaaatcgaaacaaaacttgtcctgctaagcagatgctcagggagatacaaggtcctattcttaatctaagagactgccactgctctgaacatggctggaattccttttgtgaaagtgagttcactgatgaggcagggaagctaaacctagaggcactaggccaggtgttagcattggaaggaagcccagtatcaaaacatgcagaatctcagtgtgtgaaaaacagctctgtgttctaattatgccctctccagtattgccacataggcgatttggacaagacatttataaaccattttttgaagcaagataattcaagttattttccaagtaagaaaaatctaatgcatacatcacactaaaaaagcaattcattacattatttcactgttgacaataagtaacccaggttgatcctaccagactgatttccaaatgatatcaaatctatgctcaaagaataaaattttgcctttaattgatagtatataaaagtgccagtgttctgacagaaacaccaaattat

SEQ ID NO: 42881 - DNA, 1294 bp, Homo sapiens
aatatatacacaacgcccaccaacctttccagacacacactctcagcgaaactggttttacaatttactcactcagcttaatagagctcggtcttaaccaaaggctcaggatctcaggatgcgtgcgctcggaggcagcgctttaacaattaaggatgtaaatgttgggatgagtcacccggaccttccaaacaaactctaaagcagcagtttccacttaacaagaccaccaagcatgtgcacggtgcgttcctaaatcctacccagttcctccacaggctgcctccttgccgcgtctctcaatctcagtgggagtggcgggcactgcctcttccctcctgcgcgcccggaaccttttgagtgggcacagcacgcagcccgcgcgcggcacaaccccttcccccaaccacacccggcgcgcccgagcgctcccctcgcgcggcggccggcgtgggaggcgctgcggctggaggtcacgatgggagccggcgggtggccgcctggggagacccggacatccaggggacgagctcaggcagcgctgacacgaacttcctaagccgcgcttcgggctgtggaccgccagagctgaacgcagtggcccctccccagcgccccgggtttccccaggtcggggttcgcgggcgggggtgaggcgtggccccgactgccgggccgcgataagcgccctgcgacccggctgaaagcgcacacgtgtcctgccgcgctgagccgccagcaggactggtaccaccgccctccctcggggctagggtcaccctgccgtgacacgcagggacaagccaaacactcccgcctccgggatcgaacggaatgaaccagagtgattaactacgagaatcaccaggcgctcattgggctgatcagtacctcgtctgacctagctgggtttggtcgccgtcactggccggagcgccgaagcaccggggacgctgacgcacaggttgcccagtcacaagcgctgctcgcacccagagcaagttaaatgggtggtttctggtgaatgggattctgagaaagtggatgcttgcgccccagggcctaaaaaaatcaggcactgaatctaacccaaggaaggaaaggggagaaacttactgaatgaaaatattaccatagtttaaatgttattctttacactcctgtgactgacatacttctgtgcaatattccgatggtgtggaaaggctagaaagtgattgcgcatgttcaggaaacgggccatcaggctttgtgagtgtagccatcccaacatctacctgctgcatctacccta

SEQ ID NO: 42882 - DNA, 653 bp, Homo sapiens
gtgatgtttcatatttataggtcggtttatttgctaactaaagttacattgggaggcagtggtaaatcaaataaaaattcaaaataaagttttattagttcctaacctcatcctaatattttatcaaattctatttgataagttcagattaaagccagcattttataaatgtattgcactgtatagaaatgagtcattttaacttgtaagttagcattgtttttggagctagccatagaattttagagaaaaaggaccttcctcattaggtcagatgttagatgactttcctcattttacagataagtcaccagtgcaaaggagactgatttgcacaaggttaaaggttaagtgactcacagccttccaagccattgccctctgccctccaccacaggacctttcttttattttaccaggcaagagtcactgcccagtatttataaggccccatattgagactcctgctgaatgcctgtgcaccagttgcaaagagctggtaaggccccagtatgctacatttcttagtgcttactccaaaggtgaactccagaattgtcaattttccctggcaaggtcaggtttcagacaggattcaccatgggcctggggacatttgggttacatatataacagatgtattcagtccgagt

SEQ ID NO: 42883 - DNA, 2041 bp, Homo sapiens
accacaggcacatgccaccacgcccgggtaatttttgtatgttttgtagagccgaggtttcgatgtgttgcccaggctggtctcgaactcctgggctcaagcccgctttggccttccaaagtgctgtgatcacaggcgtgagccattgctaccggtctcattgctctttttcatcgtcattgtaatctgtcactttagtcgctcattctgaaaccgaaggacagcctcattcctccgccctgacggaaagaaccgatgaggccttgctgcacgttagcagtgggaggctcagaaaagcccgtggagcttttgagactgcaaattccctggctatttccacctggagcctctttgtcacatccggtgaattccctcatctacagaaagcggctgctgaaaaagacatcaccagctacaacgccttgagtactacagcgctccctgcgcaaagtaaaacccaagtcttcggatcaaaaccagccggggctgtgcatccttcacgatgccggacctcctgaaaagctcacctgggtacagctcaggatcctggcctcggctcgctggccctgacaggcgggtggtcagggtgacacacggtgggaagaacacacgcccgcctgcctgcgaagcctcgcaaatagctgggctccctcggcaccttctgccgccaggtctccgcctcccaacctccctctgggcgtaccgagcccgttgtcgccacgtttccctcgcccgggaggcaacgcggcacccaccccgcagcatcctcgcttccggggcctcgggcaagggtctccagtcccagcccacccaccctgcccgcctcgcgccgcgctggccctccagcctgcggccacattcaaggccgagcgcagtctgggctggaaacccgccgcccggggcgcaggcagcccagctgggccccgcctcaccccgacgagctgctcacgacctccaaagggaagaaagcgacgctctgagaactccgagaggccgccggccaagcgccgactcggggggcgggggaacggaaaccgacgtctccccttcgacctcccgggaaacccttctccgtttactctccattccgcgaccgccaataaagaacagcatacatggttagcagaaataaatgaattgcactctctaggctcttacctctggatggctacgtccctgaaaaatgttttaattagctaacggaggacgggggaggagctttcttggtcggtaaataagagtgccttctccgtcgtctcggatctccgaagcaagcagtcaaagcggccactgccttgcctgctggaaattctcgaaaatttttctcccgcagttgaccagatggagagggagaagtctgttcccgctgactgacagcagatccggccagtccgcactcggcgagacggctggccggccgcccgggccctcgatcgcagccagtcacagatgccgatgggaacgagcctccccgcggctgctatttgacttcgcaggcttccagctgcgcggcggagcgacgtcaccctgtgccagtggtggctcgcggcggcgccccgccctcccgaggttagctccccagccaaagagggggcgcgcttgcgcggtgggtggggccgcgagacttggtacctagccagcgggcggagcgcggagggggtttcgcttcgggctaagggactgtagttgtgacagccaggaaaccgagaacggaatgccaatactgcttaggcttagagtttgaaaggcatctgatttcactgccatgtctttgaacagcagtgcacagtgcagtcttcttcgtggctgaacaggtatcttgtgatctttagggaatgtctattaattcattaaacaagtatttctgtgtttattgaaggacgtcttgtatgctatacatttgctaggcactggggatacgcccctaacacagctagacacgatagctgccctcatagaattttcagtctaacaaagaagagggagaaaaccaacaagtaagcaagcacatagaatagtaattaatcatgtcaaggaaaga

SEQ ID NO: 42884 - DNA, 1059 bp, Homo sapiens
atatttcgtagatatgatagctgaagcacggaatcattaggtaacttgcccaaagtggcattcacgactcataaatggcttaggatgtaaactcagttttattccctgggacgccctctctgctcttcagcacttgaagttcaggcagcgagagttgacatggggccagggctgcgcccctggggcgggttgaagacagggtgagtctcttgatattcaggaaatcatcgcgcacccagtcaccagcgttcgggagcctgtcgcagcgggaccgacggaatccggagcaggcgacagggcgcagaagcgggatgtacttctgttggggcgccgactccagggagctgcagcgccggaggacggcgggcagccccggggctgagctactgcaggcggccagcggggagcgccactctctgctgctgctgaccaaccacagggtcctctcgtgcggagacaacagcaggggtcagctgggccgcaggggcgcgcagcgcggggagctgccaggtgagcggggggccccaggtgcagggtgtgaggaccccagtacatgggcgcgggggcttgggtaccgggcgcagggaaccgggtgcggagcgctgggacccgggtgaggggcgcgggggcccaggtgcagggagcggctcagatgctgggcgccgcgggccaggcagggaggggtgctgggagccttggattcctcggggcccgaagagccacaggaaccaggaaaatggtgccctgtgctaccgaagagcaacttcctcagtttcgttttcccaacgcccctcggatttgtttcggtttccaattcaagttcaaagcgaaactgagagccgaaactaacctggtcagcgctgctctggaaagagatgtggtccctccggcttgccttgcagataaatcctcgcctgcgcggttctacctggagaaggcagcctgaccttacaaacgtggtttgtgggtcagacacctgtatctcccttagaaatacactggggcattaaaaaatatatatatataaaaatatatatataaaatatataaatatatata

SEQ ID NO: 42885 - DNA, 1047 bp, Homo sapiens
ccacctcagcctcccgagtagctgggactacaggcgcccgccaccacgcccagctaattttgtttttgtatttttagtagagacggggtttcaccgtgttagccagaatggtctcgatctcctgacgtcgtgatccgcccgcctcggccccccaaagtgctgggattacaggcgtgaatcaccgcgcccggccgcggcgcacaacgcttaacaaactttggcttccgttatccctccctctggaaatgcgtgtgtcagggtgcctcctagtggaactgcagcgtttcctcgaaagccattccgtccaggagttaaggtggccgctgcccgcccgggacactttctcagtccagcccatcggcctttaccccagccaacgacctgttgcctttggccgcctgccaagtcactctcattacagtttccttttccttttcgattccgccccctaaaaacaacaacaaacattatgtttcgttttccactggagctgcaggccccgcccccaaacagcacgtggggggcgtggcgtcccggcaggggctcagtagctgaggctgcggttccccgacgccacgcagctgcgcgcagctggttcccgctctgcagcgcaacgcctgaggcagtgggcgcgctcagtcccgggaccaggcgttctctcctctcgcctctgggcctgggaccccgcaaagcggcgatggagcggaggtcgcggaggaagtcgcggcgcaacgggcgctcgaccgcgggcaaggccgccgcgacccagcccgcgaagtctccgggcgcacagctctggctctttcccagcgccgcgggcctccaccgcgcgctgctccggagggtggaggtgacgcgccaactctgctgctcgccggggcgcctcgcggtcttggaacgcggcggggcgggcgtccaggttcaccagctgctcgccgggagcggcggcgcccggacgccgagtgagtggggctggtgtgtgagggctgtgagggctgtgaggggtgagggctgagggctgtgaggggcgggcagccgggggtccgc

SEQ ID NO: 42886 - DNA, 596 bp, Homo sapiens
acagggcaccagccagacctctctgggcaaggcagattccttgctacacaacagtatagtggaatatacaaaccagcaaatcaataggaaaatcagtgtggtaaaggtctttgagaaattaagtgggaactcaactgagtcttccaggatggaaagtgaagggactcagagatggtttccaagaggtggtgactcaaactgatgttgaaaaatgagcagagggcaaggggaggtgcttgtttcaacaaagggaacaccatttgccaaagtatgacatcatggtcttgagtggcctttgggttccaaagtcttttcaggtacatgttgatttcttggtttccagatgattttcatcctctaagagatgtttagtttcactctcactgggtaacatagttttggcaatttactgtattgctaaacactctcatcattgtggataattaagaattgaccatatgtgcttttatttaataggtggcacacacttgcctatgtttctgatttgggaaaggtcttttcctttggttctggaaaagatggacaactgggaaatggtggaacacgtgaccagctgatgccgcttccagtgaaag

SEQ ID NO: 42887 - DNA, 2018 bp, Homo sapiens
aatgataatttcaaggttcgagaaaattgaataatatgtttattacgggaaaaagaaatacgaaaaattgctagcaatctaccattcaaagataaccactgataacattttggtgtttatgcgatttgtaatactagcgttagtgttgtcaatattcaattttggtagcttggaaactgtagagctgtcttcccaaaaactagttaaagaggcttctacgaaacctgctaggccacaactaagagccactgggcagcaaacacagctgaattgcttaagattgtcaggcaccagttgtacaagacactttcacaagaatctggagggtacaacaatacttttcattatcttggcttaaaaaccggaaggcttcggacttgtcctgaatcgcagtggttcataaacctggtggtacattagaaatcatttagggaccgtttaagaacacagataagctgggcgtgggggcggcgcctgtctctcgactcctgaggaggctgaggcgggagttctaggccagtctgggcaacgtagggggcaccctgtctcttaaaaggaaaaaaaaaaaggaaaagaaaatacaaatgttcaggtcccatcccgcgagcattccaagtctgcccgtcttgggggctgtcggggaatcggcatttttaaaacggtccccgggtgattgcaatgcgcagccggtcgcgaaccctaaaacgcttcgagccattcccgcaggctggcgttgcgttctgggagatgtgggacgcagctcccctggcctccggtctcccccgtcctgcccgctgtgcgcccggcgaggacagagtccagaatgtggcagcggagagtacctgaccgacctacaaggccccagtggctgcaagaggccgcggtccaccgctccctttccgcccaccgggaggctgcaaaggaagggccaaggccagcgagttacctgagcggcttcttggagagcgggcacaccaggaactccagcagcgccggatcgaagtcgcggggcggctcctcagtcttcttgccccggtcggccaaaggccgcgaccccgacgcgtgcaggcacctacgggcgaccgcggacggcggcgcgcgcgttccccgcagcgctgaggcgagcctgcagcgtgctccactcagcatggtctggcagccggagaccaggcctcaccgcagcctcgccacccgtggccgagctcccggcttcccgttcgtccaggccagccgggcaggccccgccccctggtcctccaggaaacgctgccgaggagtaggcggggcgggcgctttggttccgagggtgcttctgctccgactgcttttcccacgggcgtcatctatagtccggaggacagccccagggcagaggcctctggtgagtgccccgccgccttaccagactacaaactaaaccagtgtttaagtcaaggtgtctgggttttcaccggggcctgtccaaggatgctaggaagccagtggccaggcctcagagttgtagggagttaggcttggacctacgtggttacctccaagtgaagtttcaaacacactgttatgtattgtaccgaatgtattgtcatggatgtattgaaagcgctcatttgtttcatgtacatctttactataccattagtttctgtaaccttgtttggcttttttctctctcattaaaaaaagtgagaacctggaaggaagggcctaggcctctgaccctccaaaatatataaattcttcctgcctgagacccagtcattgtgaagtatttgcgtaataaagcacagctaatttacttctataaatgagcttggaggccgcaaggggcctaaatagctgtgtaacaggcagatgtgatctgcctgttaaagatccattcaatgagtgggtgatccattcagtgaatttgtatcccaggtttgcttcccactctccaagaaagtgaccatgttagatctctttcttacagtgtagtagatgggaacttgggctctggggcctgacagcttggttccctg

SEQ ID NO: 42888 - DNA, 2246 bp, Homo sapiens
gagggctcaacactgtcagtcagccaacaacgtctcatccccaggatacaccactccttgaaactttcttttctacttggtcagtctgttaggttctcaggacgagcgattgcagacctgaggtgatttgaatgtccttggtaagaatctatcctcaaagggccttcctgcttcaaatgccaggttatagaaattcttccactgggagagttattcctttggattaaagcagtaccgtgccagtgttctgcattttacatttaaggggggcagacacatgaagtcacctttctgaggttttctgcaaaagattagctgtggatcagatcaggtctagggcaagtatgaaagcactagtgaccttggggagggggaggaagctctgggattcggcgctagggaaaagtggaagaggacaaacttttaaaaaatccgttactgggtataggccacagagtgtctttcagattacaagattttaagatctggtgctcagactcttcttgctatgctccccccgggtccaccctccagcctcccccaggcccgcctttcttccgcagccccgtgccggtcttcgatccccacctctccagaagagcgccggcggctgccgcgtacctccttccccgcctctcccaccgcgcagcgccgcgggccggcgccgcgcttcctacagtcctacgaaggggagtaaagcagaagactagcgcactctccctcaattgtcaccctccagctttttcccccgtgcccaaggctttcggtcacctcttcataaataataaaaaccagagtccagaacctgaataggcaaccgctgatcggtccagctcgcttccccgccagtgaaaagcaatcttatttcagcgtcaacgctctatgtcttgcagtccgatttcggctgacacacccgtgccgctgtccccgcgccgggccctcgagtcctgtcacctcgggcagcctgcgcctggctctggggcctgggcctctcccctcctcctgcccgcggaccttgccgccccgcctccagcccgtgccacggcggccgccattggcgcgggcccatcccagaacggcgcccattggcccggtgcgaagccattcacccagcgcattccgccgcccgcaggcttgcggggaaacttccttattattgtgacgccgaaaacggagaaaccccgggtccggcgagaggggctgtgacagtcggagtcccaagctgcggttcggctgctgccgaggtgcgcagggcgggggccggggttccagggaggggggtacggcggagctgcagccgcgctgggccgcgttccgcctggcactgcagtcagcgcgcggctcccggaggggcggctgcggctcctcccgtggctccggcggcgggggctgcaggcacctccagagacgacctgggtctggggcgcggggaggttggggcgcggcgcccttagtaccctgcgtacgcctccctggcgttctcgtgggctcgccctccggtcagagagccccgcgccgggaaaggcgagacaagccttcaaaatgggagcgcctcccgcccgcgctcggccgccctcccgccctgccgcccgggaggaattgcgacgcagaaagtcaaaaggaggatagtccctatgctcgccccctgcccctatttaaattctggggttccagggacctccgtgcagtgaggggcgcggacgctttcaattgaaatgggagctggcgaggccctggcattttggggaacctcagcggccgcgaggagtttgcgccgaggacgcggtgcacggcgtccgcgatgacagcgccggcagggctgcggggcccggcaccacccacttcgcggaggccgggccggctcgcctctcccgggtccgcctcctgggcggggccgggggcgagggtgtgtgcggacacgtgtgtacgggtgtgtgtgtgtgtgtacgccgacacgtcggtgcggaccgacgcgggggtgtcaggagctgggacggccgggggcaggtgagacttgagtcatttgtgaatgtgtggagtgggcaaaccagggcaaccagaccgagaggagcatgtgtaacctgaaacaggtgagcctatggagacagtacctaatgcgactgtgcacggaatatgtgtatgcagcatgagctccagggaataagtatttgaactttgctgttggtctgtcactgtttctggctgctttctgattgcattttacatcagctttcaaatgagctcaa

SEQ ID NO: 42889 - DNA, 3007 bp, Homo sapiens
ccagaaatttctgttgttggttaagcttgtctgttaattataaactccatagcagcttggaataatgcctctttgaatggaaagattatgtgggtgggtgcctccctctctccatttaactttttcgttggtaggtgtgttctaaatctggatatgatttgcgtttgtttttaatgagtgggaagaagagaatgaacttgttttctgtgtttgcttattgagaaccatgacctggagagctgctagacatggaagggaagtctgtggcaggcctagtttgttacaggtatctgttggtcttggcccacaggaatgctacccccaagtagcttctgtggtatttgggaagggaacatgatggaaggccccttccttaaaagaggatttttctgggggttatgggcaggtctgtgatttcagcttggtatcattgcccagattggttgactttgaaatatgaaggattttaaaaagtgagtgtatgactgttcctctaaggctttgagagtgtgaagaagtgagttgaaggagttaattccatggtggccaactccaagtggcttacagagttttgaacccaagtggcaaacttaagtttctttttcttgctttgcagtactggctgtgaatggagtaatgcctgaccatcaacacttactttgctgattggacttgttaatatttctagtcctagcagggtgtccaccagcatgggtatggtcatctagcactagtctggaggagaatttatttcattgccttgaaactttgtttcctgttaaaatgcaaacaaccctgggagccacataatctgaccttcctgaggggaaggaaagttgaaagaaggtactggtgtaggagatgcacctggacaagtcttctaatgtgtgccttgattctgtcctgctagtcatcatataccatgttatacactctgtctctaactggttcagctgcaaggcacatcaattcatttttttgggatgcattctgtagatgtgccagagcagtgatataaagcacctctcagtgattctaagggttttggagatcctttttttccttcttaagaatatgtaacagttaactattgctgttgctgaccctgagactactgtggtttctttgtactctcatttctgtacttctcacattagcaatacccttatgtgaccaactgtgtgtgtgtgtgtgtgtgtgtgtgtgtgtgtgtgtggtaagaaggaggcatttcaaagatacatcaaattctgaaactcctggttattcaggccccagatattttcccagtgtgtcaggcagcacacagagttctagcttaggtgtgtccatgactcatttgtgatttggccaagggcatagaggcctgtgattcccagaagcatttttcagatgtagtatattaagccccatctaaactcaatttccagctttaaaaaaaagtattggattataagtcttttgcacattcctctctcacatgacttttctctccttcattctcacctttgcattcagacatatacctcatccctccccgacaaagcagacagagtttttgtgattggagtcatcatagggttattactaatttccttatggtttttgtccatgaatttattttataattttctaagacataaagttacagagctggcattttaggaagtcttgtgtgccttccccactttttttttaataaagcaagcaaacaaaacataagcttttttttcctgaatgttattttttataagtgactaagtggacattaagtaaatcttgagctcttttattaaactagagactggttgtccatagaaaggattcaataaataccttaatttaccatgcctctcatattcctacctagccacattgtaaacagtactcttcagctaaatgaatagttctcctttcctcatacatactctgatttctaatattgggattttagggtaagctaatctctgtgttattagggatatctgaacttacataagtgtcttctaatctttctccctatcttgaatagacaagaaccgtggtaggggcagttatttagtgtaatctaatttgactctgctaaattttaaaattctctgtagacataccaggaaatcttcttatagcagagcccaagggtaacaatttataagcaagctctaacatttctgtgcaactctatttgattcatctctgtgattggttccttttactttctcctgagttagtttccctcttgcaggtaatttaatccaattcacattcgcactttgtattcagtctaagcatttccctaatgcccatcaccatatgtaacagctttcctgctgtttgataaatgaggtttataaagcagaacgtccaaaagcttcaattcccaaactgtgcttgcttctaaccatggtagaagtaatgctttcaaccagcttctcaggttgctctcgggcatctgaagggcgcaataactctgtcatgttaatcagctcttgctgaaaagcaaaccagctgagctgaaaggaaatagaagggaccctgtaatgacttcctgttattgaagtgcgtgtttctatgggcataacgctgatataaaaggcagaatgtgccataggaagtgttcagatctcaacattgcacttgttagggccccatctgttccttattaggaatggcaggtggttcaggaggctgtgcacccctttctgattttggtgataatggttataatcaaaactagtaggatgtcttgcctcctttgatagctaggtagatgactttctggttcagaggtctaaggatcaggagaaactgtcatttaataattttattgtgggataattgatcggaattttttttctgtctgatactcagcctacattctataaagatacttgagtgttttagaaaatgtgtacttattaatgagcatacttgttagtgtgaggtatttgtgacttttaaaaacctgcagtattacttttaagtaattaacaaaatggtttgcttc

SEQ ID NO: 42890 - DNA, 1712 bp, Homo sapiens
gcatgtatcagtacttaattctttcttattcccaaataatatcccattgtatggatataccacattttgtttatacttttatcagttgatagacatttgggtggttttaggtttttggctgttatgaataatgctgctgtgaacgtttttacacaattttttgtgtggacacatgttttcatttctcctaggtatgtacctagaagtggaattgttgggttatatggtaactctgcgtttagcctttgaaggaaccttcagattgttctctaaagtgattgcaccattttaaattctcacaagaagtgtatgagggcccgagagatctttttaaaatgtagatctgtttggccgggtgtggtggctcacgcctgtaatcccagcactttgggaggcagaggtgggtggatcacaaggtcaggagtttgagaccatcctggccaacatggtgaaaccccatttctactaaaaatacaaaaattagctgggtgtggtggtgtgtgtctgtaatcccagctactcgggaggctgaggcaggagaattgcttgaacccgggaggcagagatggcagtgagctgaaattgcgtcactgcactccagccttgtgacagagtgagactccatcacaaaaaaacaaaaacaaaaatgcagatctgttgataagagtgcctatctcatagggttattgcgaggattaattgagataaaacatataaagctcttaaaacagttcctggcatgtagaaagcagtcagtaagtcctggctattattcttattattgatatagtgggtgctctatgtataagctagtttcttatgtaatgatgaaacttaacatcagattcacctgggcaacttcagatttctggtcgtcctgaagtttttgatgcaagtggctaggatggactcacatcagtcatgtttgttcagaaaaagtttcgcaagggattctgatgctcattttttgttgtgaatcactgctttaaagattccactctgggcgttgcctctaggaagctgtccttgggcctacttaggctggtttgattactcatcctctgtcctcccataatgtgctatgcataattttgttactgggtttacctcactatactgtaatttttaaatctgtcatctgttatagcctttgagtcactttggatgaatgaatgaatagctcattatcactcaaggcacatcttggatattacctcttccaagaagcctttcctaactctctctgtctcccactcgcagtctgggttcgttgtccctcacgtgggctaccattcaaacctgcatgtttcttttattacactattgtgataaacgttgaccatcagtacgtatgtcttgttttcctcgtcagtcaagggagcatgggtgcagaaccacatgttatttatcttttcacccctagtatttataaagaatcttgtatatgataaagcatatattttttggtgtgtatgtgctttattattttaaaatcaactttatttagataatttacacgcagtaggagtcaccaattttaaatgtacaatttaatgagttttgacagtcattgaatcaggtaaccactaccacaatcatgatagcatttccatcacccccaaaacttctcatttccctttatgtcaatttaacatccacaccaactgttttgttccccctgcttttttgtcactatagttttgacttatcta

SEQ ID NO: 42891 - DNA, 1342 bp, Homo sapiens
acagggtttgataggcagtctattttgctttataagatggagcatatattagtattaatgtaggacttaacaggttctgctgctcacatgggagcaaggatgagaggaagtggagatcttacacaagaattcttaaaaagagggaccacttctcctctgcctggctgcattggctattgagaagcagtagtggaagagctgaatgacaggttaaggtttgccaagtgagcttgtagggctgtgacattcaagagatgcctgctcatggtcctggaatttccctagaaaatggcactttctgttcattagacttacagaaatgtttgttaactctggagatttttggcaagaaactttatgtatcacagcctcagggaatggcaggttatttgaaagtgcttcttaactaatgattttcttatagtaatttccagcaattcaactatgagagtgttgttcagcactagaaaacaaggagctgtctttctctgtctgtctccctctctctcttttgccaagtcacagtgcatgtcacaagagtgcaatgtctaacataatgtttgggtcagctcttcgggtttaagaaaaatggagacgtggaaaggagagcaaatagatcctaaatggaattccgtagacaaggtggtacaggcatcaggcacttgaggtgagaggagaccctgaggtcagagacttcagtcttcttctgttttccccttaagatcagctcctcttttcctatgacagcaattccttccctctttgattttgtgaaatctaacatttgtgagggtgtacatttgattgaggccttttttttttcttaacggcatctaattttcattccacaggatgcatattggcacataaatgtaattgtacttctcatgcaagccacagggtgtcatgccttcctctcctgttgccagaaggatctctgagatccattttccgtttgcttagctgctaatgccatttctcgttctccccagtgttcctgacaggcagcgatcggattcccatctacggcatggccagtctgcagattgtcatccagtccacagccagcggggaggagtacttgccggtggcccacacttgctacaaccttcttgacctccccaagtacagcagcaaagagattctgagtgcccggctgacccaggcccttgacaactatgaagggtttagtttggcctgaggcttctcagcttgtccagtatttcccttcgttcctcagtgtccacattgaggcctatacagaaaatcatggggagtgatttctatttttttattgtctaagtgggttgggacttttaaatactgagcctggttgatgtgt

SEQ ID NO: 42892 - DNA, 3599 bp, Homo sapiens
atgtactgccaaaaggtagtcagaccacagagaataacttactatcctaaaaaatttaaaaattggttcggaatacagccacataaaaaatggtatgcatagcaccaattattacaggtaaaccaaatggtttccatgccagtgcagcaaaaacatctcaggaggccgcagcagttcccgctggcgggcaaagtacaagtgtgcaaatggttcatggtaaattttgatatgtttaataagggtgtttctgaagagaaataatgtgaataaacaagcaaccaaacaaagcaaaacaaaaaaggactatcatataactgatatcaaagtattgctatgaaaataaaattggcaaaagctaggtggcttttccagattgtctcagctgtgacttcagaccttgagtctctttaaattgttaaaaacatttaaaagtttacaaagtaaaattgactttttaaatgaatacgtttctttttgttttagtaagagtaataacaattcccatcgacgtagttttgataaaaattgagataatgtgtgtcaggtacctcataaggcacacctgggacactggctgtgcacatcagttttccgctccctctcttccttcccctcccctggataaggaaaacagggtagaagtatctgaccaactcagtgaaggcaggaattggggcctgtttactgctgtccccagagcttggccaatgcttgcatatggccaataaatggctgttaagcagtctagtaattcagtttgaaaagagaactacaaaaaattactattagaagagcataaacacctaacagagttagggacagctaacagagttacaaataagaacttaacgacctttaatgaaatcaggtgtctaggccttatcaattatatcccaaagtcctgagagaacttaaaagtgtggaagtgtgccttgcacatagtgagcactcaatattttttgagataaatgtaacaaaattactctcagtagcctttgaaaatcacgaggaaaaatagcaaatagattttcaaataagacaaccatcataagtgttgtagatactgggtagattctagaaggaattaatacatagataatatataagcaattgggaaaaatcagtgatcaactgatgagactggttccttaaaaatgagtcatgaaaatgaaccatttttccttttttgatagatgtagtatttggatttcaataaacaaccaggtaagcagaccctacgaaaggaaagctggcttcccaaatttctgctgagtaatgactgaagggtgacatgaacctgaagggcagtctacagcagcccctctgcctgaccctgccttactcagtatctgagtcacttggacaaagaaaaggcatatttcaaaatgtacagataatacaaagcgggtagggatatctgatatgttggagtaaaaaagctagatttagtgtatttcctacagctgaaatagaagtatgagacgtaacaaattggaaaaattcaaggccctataattaggaaaaagagaagctggatacatcagtggcaatgcacaagtatacagcaaagcatgagtcagggccatatgccagggccatgagcagtggttctcaatcagggtgatctgttcccttggggacatcgggcaatgtctggaaacatttttggctgtcacgactggtgaaggggtggtggtgccacactactggcctctagtaggtggaggccagggactctggtaagcatcccacaaagcacagggcagtgctgcacaacagttacccagccccaaaggtcagcagtgctgaggctgagacaccctatcctcagaaaggccaaaatgaattcccaataccttgtcagttgcataggcaagaaactggaggcatgaaagggtctcagtcatccagatcaatgtaaggactagtctttggtccactgtcctggttaaaccatatgcaggttaatgtccagttccgggtatcagttttaacagcaacattgataaactggtgtgtgtgcacacagcagagctaggagaccactgaaaggtctggaacccgtatcacataaggaagagtaagaggaacttggataacaaattgtcacagggtgtggggtgggagtgggcagggcaggtgactgtaaatacaggcagtgctctcagggaagaagcagtatgtctatctcatgttgctccaaagggcaaaactaagcctatgggatagaatgtaataaattgataatagctatgaatataatttcaactattttcattaacttggtatttatcaaacctatacattttaaattacatattatgtaattaacaaataattataaaaccaataatataagttatcagctattattgatacttatgtagtgagtgacataactccttccattgctgtaaactttttaagcttgaggatggaatctctctgtagggacaatgtctctattctgccagagaagttttagaggggattcttatgttggctaggagaactgattagatgatctctaggtttctttgggttggaaaatctaggccttcagaactgagctggctgtagttcatatacagctggttcgttcccaaaagcatttaaaaccaggggtgagttttggagaaaccacttagatacaatcttacctgcacacacaccaaattctaaactggaattgccaagaattagtacagtccaaatactttctaataggcctggccaacaggaacaaagtgaaccaaaagacagcactgtttacaaaagcaaagtagtcattgcaaaattatctgaaattttgaccatgatgtgggccaggagataaaccacagccaaaatatacttgtgaaaaaaaattaagctaaaggataagaatgggaaaaatgtcttttataaaaaagagcatcattaggttatcttcaattcatttggtgaaacccttattaagtgtctacattttggatgtgttcaagaacacatttttatctagtaacggttctattgcatgctgctaagagaaacatgctaattttcatacacacaattacccaaatttctccaattactgtggtttcattcttgggtgacattaccagccagacaaaatttgtctttcattaacatcaaggcttattgtaagaaaatagctctaatttttaaagacacaatatagtatactggcccaaatttcaagtaccgtgtttacagcattttcataaaacaagttctacttaatacagtgagcacagtcattgcctaataccataaaattaggcatatgatgtatcaagatctgcaaaaggcaagaaaaggaatacataaaagaagactttatagcttgtggtaccttacctcagacaagaaaatggagaaattctcaattggtttccctcagtagacaagagggccccatatactgaaataatcattcctaactacagcacgtaaatgatcgccccaggctcggaactatcacagaaatatgacaagtgaaactcttaaaactcacttctgcttcaggtttaactcttgctttggagttaaatgactgttagaaaaacaatcactgttttttaaaaaatgattgc

SEQ ID NO: 42893 - DNA, 1270 bp, Homo sapiens
gagttctgtataaggcagtccagtttgttcagttgtctagaaacaaaaacatgaaagaggctgatcctagtacgggccaattagggtcccacagagacacactgatctatgggcacagattacatctcgcattctagcaaaagtagccaccgatgacaaggattatctgtacaaaatccatattactggaaaaaaaatcaggacatatgttctggtagctatcagtcattcacagcacctcattcgtagattaagagcagattttaaaattagtcctggggactaaatgtgctatgagaaagtcaagaaggaaaaaagccggaaatactgcacccacaaatctgtcaaagactactaagatatttgtagaagtacaatttttcattgttttatatgtttatatatatatttcctatgttaattttgatttttctataaacagtatatgagattccttttaaagttggtctaatgagctaatttaagattttggaatacagaaaaatccattccccaaatacagaaaacaaaaccaaacaaaaagcattgtggacaacaaaaccaaacaaaataatccctgaaagcgaagtaaaaacaaaacaacaacagacaatacaaaaaagagggggggaataaaatgaaaccaaagaaatcaactaaatggaactggagaaattagcactctttagaggaactgttcaaagttggttatatgtagctactgatttttagggaatgctgtaagaagccaccaccaaaaggcccgatcacaccccctttccattcaccggaggggaggggaggagggagggaactggtgcggatttagcaatgggttagcagctggggtcttcacctttatctccttgaagaaggaagcagtttcgccctcgataattggctgcagcaaagggcttctccgcttgctggagggggaaccctgtgacaggtgttaacaagtaggttacattccgaacccctttccctttccctccagctctcggcctcctctgacctcaccagtatttattaacttttaactctgcattcttatccctccctgccaaacactcccaggaaaacctgaaacaacaaaagttctttttccaagttgctgcttcccttcagcgcccacacacataaatcaaggaggacagagtacagcaagaacagcacaggagtatatccggcagacacgcagaagaaacccgaggagaaacacctgcctcccatcgctgcccctgccaatcacagttaaccacaagaacac

SEQ ID NO: 42894 - DNA, 2705 bp, Homo sapiens
tggcagaggacatgctggtagatgtgcctggctaaagctggacacgaacaggaggtgtttcatcatttgtactaacactatcggtctgctcctcctaagtggtaggacttgggcacaagcagctcaaaacgccaacataaaagaataaaaaatggactgagaggcgaagtaaggaggggggactggaaagcaaccactagaaaaaataaaacatgtcagctgcagaaaatggaactattaaactgaccagcttgcatcttctgtcatgatatttcataagacaccagtaattttctgcaaggactttccccaggagagggaaagggttaagatggcttgaacagtaatgcagcaggcaataagctcaccgcagagtggcaaagcagcaaagccactgggggcagggcacggagctttcctggggacagagggctttggcaaagcaaagtctgatgttgatattggcatatgagtgtgctggttagtttgacatttctattcataaaatcttagtttaaaaggtgttaccttacatcctgaagccctttaatgtgttagaatctagcagaatatctccttaaaaatgttataactcatctttaagttttcaactaggtggtctctgtgtatacaaatttttacttataagagtgtgtgataagataaactgatcttgaattcactagaaaatgctaatcatggaactgaataatcattatttgatgctttgtggctaacggcagggccatccatcagttttcttctttgttaacacagctttattttgtggctttattcttgatcagttgctttactgacaaggaaatcaaatgtgtccttttcctagcgtctcccatggtatacacgaaatacacagctgcagtaattctagcttatcagtgacattttctcctaaagcatatagttagggtgaatgaattcacttattttaaaatgagaaatgtaaaactatatgagtttcaactctaataaaaagtatgcatgtagaacggaagtgaaaggtttctcatctatgcaacacaaaatgcttacctgattctctcctttttctctcttttctgttattcgatagtcttataatttaaggcttctattcaaaagagttataaaatgacatgtaatacacagttcagtataactaagggatcaataaaactgttccccattttagtttgaaatgatctaaaagcacaaggctcatgttttgatagttggcactcaactagaacaataacaaagtactaaataaggtagtgtggtagataacaggtacaatttcactgcctgcctagagagccggttttgaggatgtattcaccgaccattccctgaccattcccaattgctactttgggaaatattttatattttaactagcaattctagagcaaggagagagataggaatgttgcaagaaaattatttaaagggaaaaacaggagggatgtgaggcttcacactggactgtcttgctaaaccaccacataaaataaatgcattttcatatctagaccaaagttccttgtgtacagttagttttgcttttagacatgtgtcttgtcacagtgaactctggacataagtatgacatgcctctctattaaaaattaatccacccaggtcagttgacattgcagcaggtcggaaataacagagataaaagctgcatgcttgctactgaagtaataaaaaaagactaggccctgggggagttccagttcagacactatagtacacatggatataacggaaattttctgtagaaagagggaacatatctctgagtaacgctaacatggtcactgggacaagctactctctgcttagctggctggatccacttactatacaaaagaaaaccgggtactgggatgattgatttctcagaaatctgcacagaattaagggggccgatgttttccacattccctttccaactatattatttagagccattactccttggcaagatgtaaccatttttctgctcagctgagctaggaggtacttggacatcccagacataaaaagatgtaagcctcatggtggaggctctttactggaagaattttaaaaaattttctttagtgttccaaaatttaactttagaacaatgttagtcctatgaaattgttcaattagtcttgttaaccaacagagttagaaagaaccagagtagtcagctttatcaatcacaaatgtaatccttacatttatctgctttgtccctgtttgcaaagttaataagcaagcccttaatagctccatttaaatcattaataaatgtgtggaacaggatagggctgaggactttttacctaatgagaatacccccatttgagctgactttgatccatttatctacacatttaagaacagctgcttaatcagttactaattcactaccctacctgtcttctctcccacttctctgacagtcgggctatcattaacgccccgtcaaagtcccaggtgaagtcttttcaaatgcaccatttccccaacctaaagtctagtattaataatatcaaagaaagaaaggaggttggtgtgacatggttaatccttaataaatctgtagaggacctagtaataccaattcctcttgtgttcagagccacccatggccattcggtaaactgcgctctggtttcaaagaaggcaaacttaggctgatttttcct

SEQ ID NO: 42895 - DNA, 605 bp, Homo sapiens
tctcctttggtgcagctgtggtagaaaggtgacatggagagcttagtctagattttagttcaccacctaattttatgtcctaactgaaaccatcatgttattattagtgaacgcctaagcagtgccagcagtggcactgggcacgattggtggctgcacatgagtaacacacagaagaagaggacttggcacatggaagaaggatgtgagattgtttcccaatgattcatccactgccctgggagctgtccaccaaagaccaaggcagactgagttcagtttagtttgccatttagtttgtgtgctacttggaatttatgagttaatgtatgaagtccatccacaaaagttacttttattcccttttatctcacaaaagaaaacaggcataaaaggaaagaactgaggagacctctccaggagactggcaaagcgattttctttaaaatcatgttagataggagaagagtaggtgcttgctgtgagcagaggaagatggcagtgaaaggataaaaccataaaaaacaaaacacaacttgacagtatcatggggaaacatgatctttaaaaggatgcctagagacaaggaaataatgtcagcttgt

SEQ ID NO: 42896 - DNA, 1400 bp, Homo sapiens
cctcccactaccaccaccatcatgtcttccatagtactcattatcccagaggtgatcaaaaaatgtttactctttcgcccaagataattttctttagctaaagctgtagctctttgttatggccacagacaaacccagaaaaaccacgtaaaatcatgtgattaggtaaaagggaagctgattcaaattcgtattaaataattaagaagataagtaaataaatacaaacaccctaagacttactgagtacttactatgttccagacactgtgctaagtacttttacatagtttttttttcacttattatttacaataaccctatgaagaggtactactcttttccctgttttcagatgaagaggttagaaaggttaaataacttacccacagccatagaaccaagaaataaatgagctaggatttgaaccaagaaaggttttagctcagagtctaagctcttaatcactccactagcttgtctttcaatccattactcactacagtcatctttggatatggaggcctggccttaggtattttactttgcttttaattacaacaatttctcctctgcctcacaatgcctgttattcatagtggttcccaggctacataaccaacaataaaaccctttctgctttctgtctttaactggaacaagcagtccttgcttttgctactttgtggcttaccctctgtaaattcaacaatatataattaactcctatactccacttctcagtacagttacacaaccttggttttgagagcagggacccatatgagtaatgactcggggaaaacccagaagagagtaaagaatgtggatctgctagatgctaaaaaacattccaaagacatgtcattagcctgttagtcctctatgccatctcagaatgaagacatgtatttcctctcctcctttccacatccttttgaactgtcttctttttgactattaaagcagatcctgatgttttgatgttcattttccatgaagggagggtgaagaaagaaaggcaagaaagaaaaagacaaggaaacaacaaacaagatgaggttctgagatttctaactctttaaataagtgcttcttcattcttaatgtgcataggaatcaccttggcacttgttaatacagactgtgattcagcaggtctaggtcttgggaaggggaagctgagactgcatttctaatacattcctcagtgattctaatactgttggtttgtggaagacactgagtggcagaggctcttatcttcgcaactaaaattcttcaaaacttcaattacttaaatatcccaataatgatttttaaatactgtaatctaagtaatgaaggtaggatacggaaaactcatgttaacctcagtgaataaaagtcaacacatcgaa

SEQ ID NO: 42897 - DNA, 978 bp, Homo sapiens
tttgcatatttagccacacactttaaatatatttctaagtggtttgagacagaagaaatagtttgtaagtgttccttgaatactgaaaagtacagaaaaacaagtaaatgctaagaattcggtcccattcattgaagaaactagaaaaaccatccatgaggcttaaaaaacaaaacaaggagcaaaagagaaagtgagggacaagtataaagaaacaaaagaaaagtataaagtaaacattttttcaggaactcaggcattttccacatgtgctacaaatgtaaggggaggaattttcttagagaatgataagtgaagttagcacattttcctttccttccttgttctcaaaacataaagtgcaacacatgtacttgagcattttcaatttatccacagtctcagtcgttaaccatgccccttgccaactggggaggtacgtggcagccactgttctgttgcttaggtttttggtttggtcccaatcaagaacattaaaaaaaaaaaagtcccggtgggctttttttttttttcctggaaaacaaatgtaagagttttcggatcagttcataactgtttgcagctgtaatttgttgcgggtgggggatattttacaattcttttttgtaaacccaggcagctttgtttatagttttattatttgcactttgtgcctaagaacacaactcttagccagtagaaatacaaattattgcagttcaagggcaaatagattttccagaccaaaggttaaatgcaaagagctgaagttgttagtattcacagaacagaaatttttagctaacagtaagaggtattattctgaaggcaaaacaaatagacaaaaagacttccaaagatttagattttattccaatatgatagaaaaatatttctaccaatttttgtctgtttagtggaaatttgaaatatactgttatcagctgaattatgtcaccccaaaaatatacactgaaa

SEQ ID NO: 42898 - DNA, 1115 bp, Homo sapiens
aataggaaaatactacctttgcagaggcatgatttcacaagccattctcgtatgtaaatttgcaagggaatctcacaactgtctcttccacggcaagtttggtcgtctgtacagtgaacgtcttcttacagtggctaagctgggttgggggcatgaggctgcaccgcacggctggagaaacaacttgctctgcagttggccagtctactgctgctctcagcctccaaacttcttcaggcaatgctattttatcggctgcttctctacatttacactgcagtccactttgaccttttgttccagggaagcagctgaaccaccgggccaatcagagcagcagctgctgcagcactaaaggcgctcctcctcctcccccgcaccctactccttctgctcctcaatggtccctcctcctcctcttcctcctcctccttctctcctcctgctcctgctcctcagtgggcttgcctagttctggtaacttgaaactttcctctgagcagttccacagacaagattttcagtctggggcaagcaaccaataactgcagcaagagccaagagtcctgtacttctcaacattacagagactgccagcaaggattccatttgtcaaggaaagacactgcccacgaaactaaaggtttctgtagcagaaggcaagagttatgttgcgtcccctttcttccttaaaacaaaacaaaacgaaacaaaaacactagccttgaaaggagtgagacttttctagaaggaaagcatgcctctagacccttgccctacccacatgtatttcctgctgatgtttgtttacactgcggtggttactagtcgctggtgacatcacccagcgcacgtagctccacttctggggaggatacgtgccctaagtctctgcccaagttcttaagggatcagaatccactctaatgaaaattgtttcaacttactatttctgcattttattcttataaaactgaatgtgtttacacagttatttttctccatgaacatcaacagcattttgggggggttgctttttatttttatttttttttataggtaacacaaaatcagtttttccataaagtcttctaaatatttgttaattatcacct

SEQ ID NO: 42899 - DNA, 453 bp, Homo sapiens
aaaaaaaacaaaacaaaacacgatctctgagacagatatttaataaagtctccaccacgaaatcatcagatcctactgtaaaattaaattaattaaaactaaaagctgttggaactttaaattacttgaaccttaagagaaatgagaatatgtggcctgagtcacgtagcatgcagttgcaacttctgcttctctgattacagattaactttcctctgtattcttgtactgtagatgattaggaaagacccaaaggtaccagagataagactcccttcaacgccactacctctccttacagaatgttaaagcagtcttccttgggctgtaataagctataatcaatcaaattgctataatgtatgtgctatgagctatgcaaggttagagaaaaccagatccacacatgtctgtgtctttccacaatgccaggcttttattaatgttattcca

SEQ ID NO: 42900 - DNA, 2243 bp, Homo sapiens
atgacgaattactatgttactttgtgttaacgaaaaggttacatttatgttcatatggaagagataattcactgaagaatttccaatttttcaaactgacacgcacacacaagacggaaaggaaggcagcctgaccgcgtttcccaggaaacaggtggtgcaaggtggaggtgcaccactctctcctccaggaaggcggtgacccttccgcagatgtctccgttggaaacaaataaagggagtatcagtcaaagcgcaattccccgattccacttgagaagccccgggcgtcgaggcacggcaggaaatttaccacgacgcctcccactggctcaagggtctcccaggtgctgtcgattttgcaaagggtccgtctctacagcgactgtgacgagtttcggagcatcagcaccggggagcgctgacccgacactcggctctaccgcagcccgccgcgcctcggcaccctgggcttgtccggctgggtgttgccgagcgaacgccccagctcctgcccggaacccacgtccgccggctcctaccgtgcctcatgatcctcgctcgggctagcactttccacgcgcgctgactctgggctccgacacctggaccgcctccgcaaggcggcgcggctgctgtttgtaaacacgccccacgtgcgctcgccctgccccattcgcagcccgctcccggcacgcgaggatcctccgctttccccccagcactgggggggtgagattttaaaatttccccctagggagaaaagagcctcgtcggcagagccgggccactgggaaaagcgccaggacaaggcgagcgtgtgcctccccctgccggccagggaggcactgcggccccgaaacggccaggcggtgagtggaacccacgcagcgcctagagacgcacccctgccgggcccccgcccctcccgcccgctcgccggagtcccctcccccgggccgcgtgcgctcacccgcgcaggccccgccccctcgccggcacaacgttctgcgggggcgcgcgcgtgctctctaatcccccgccttccggctccggcggcgacgctcgtccctctccgctcgtccctcgccgctgccgggccaccagtgccagcctgcctcaggagactccatttgcgcttagtgtggtctgggcgccgcgcaggcggtcccagggcgatgcccggggccggcggactggcgttccctgtgccaagcggccgcccgctggctggctggctgcagcagtgacatcctggtcgccggcgtccaggcggaatccgggctccctccgcgggaggaaagacgtcccgcgctctgaagctcgcccagcggggagaggccctcgctaacacggcttctccctgacctcttaatttcaggaggtaggctcttcaggtccctctctctgtcaccccagattatgcctgaaagcattatttgtcgtatttagctatcacattgataggaggcgttaattttctcaacatagttgcaggataaatgtggataatgccacagatcctgatgttgaattgaaagaaaatgtttttggtattttcctttaggtttcggagcctccgagtatctctacagcccccacaggaactgcttctgttggtccatcgaggatcgtctttcaccaggattattgtaacatcatcttcaccgagcctgccaccccatagcctctaccttgggtcctcatttccaccgatgcagtttttttgatgctttctttagtaatgtgacatcacatgtccactatcctcctttccagctgccaaatctagtaggtttaagtcgcttttaaagtagagttttctgcctgttccactttcaccttatttgcactgttcacttctgtccgggtcatcttctcttgcgtatgatttccacaagcactcacttgcgcaacctatagcagagtccgtgcctagagagacagcattccatacaatccactgcttgacaaagaccacatagtcagagggtgagttttcccattgtattttcctgtatgtcaagtttgcaagtcctctcttgacttaaactgtttactccctagcacatttcctaaaatacttccacctgagatttagtggctattctggcaaagaacattacctgcaaggatggcaagaattgagtatgcaatagtactgttttagaagccttaccagtacagtttctagcctctagtgtgattgcacttcatgaaagaccctgaaccctgaggaggaa

SEQ ID NO: 42901 - DNA, 1227 bp, Homo sapiens
caagttcttttttgatgctttgggaatggaaggtgattttaatgcatcgtcaggctggctaactcgatttaagcagcgccatggtattccaaaggctgctggtaaaggaacaaaattaaaaggagatgaaactgctgccagagaattttgtggtagctttcaggaatttgttgaaaaagagaatctacaaccagagcaaatttatggtgctgatcaaactggattgttttggaaatgtctaccatcaaggacattaactcttgaaactgaccaaagtacttctgggtgtaggtcaagcagagagagaatcatcattatgtgttgcgcaaatgccacaggtttacacaaacttaatctttgtgttgtggggaaggccaaaaagccccgagcattcaaaggcactgacctttcaaaccttcctgtgacatattacagtcaaaaaggtgcatggatagaacagtctgttttcagacagtggtttgaaaagtactttgtgccacaggtacagaagcatttgaaatccaagggacttttagaaaaagcagtgcttcttttagatttccccccagcacgtccaaatgaagaaatgttgagttcagatgatggcagaataattgtgaagtatttgccaccaaatgtcacaagtctgattcaaccaatgagccagggagttctagccactgtaaaaagatactatcgagcaggacttctccagaaatacatggatgaaggaaatgacccaaaaatattttggaagaacttgacagtgttggatgcaatttatgaagtgtcaagagcttggaacatggtaaaatcaagtaccataaccaaagcatggaaaaaacttttccctggcaatgaagagaattcaggtatgaacattgatgaaggagccattttagcagctaatttagcaacagttttacagaacacagaagaatgtgaacatgttgacattgagaatattgatcagtggttcgactctcggagcagtgactcaagctgtcaggtgctgactgacagtgaaagtgctgaggaccagaccaaggctgctgagcaaaagccttccagtaagagtagaaaaacagaactgaatccagagaagcatattagccataaagcggcacttgaatggactgaaaatttactggattatcttgaacaacaagatgacatgcttctgtctgataaattggtattaaggaggcttcggaccataataagaaa

SEQ ID NO: 42902 - DNA, 1698 bp, Homo sapiens
ctctggaggctgaggcaggagaatggcatgaacccgggaggtagatcttgcagtgagccgagctgagatcgcaccactgcactccagcctgggggacagggcaaaaaaaaaaaaaaaaagaaaagaaattccaggggctaatcttgaaacagcccaggcctggagacccagctgcagattacctcaaggtggttaatctacaacctggtcacagtcgacatgggaccagctagtactccaggtggacagtaactcaagatagccatcggaacaagacatgcagacctgtactctatacgattcctgcgtgtttcccacaccaggtttcccttttataaaccccttcagtcagccttaaaatttgagttatcattttgagactcgagtccggacatgtcctcaactgctagcattttattaaaactgctttcctttcaccacacttggcatctcatgtatctggcttttcaaactgtgaatagccagacctaagttctgttataggacaatactttcacaaggaaaatgtgttccctacttttaggcaaacgagaggagagcagaggacacttcctgcatctgttgattctcagttgccttcagctcaaataatccttatgccgaagtggcatgtttttgggtggcatgacctgaaccccttcagtccttagtagtttcttagcttctcagaatcacaaatctttttttttttttcctttcctttccgaaatagcctggctcttgcaagtgaaaaccttgctttccagattattgtttctactgcactctttttttttttttttttttttttgcctttggtctactttgaaagtcaaagctaagcaaagacttctttgttctcaccattatttgtgttttccctgaagcagtcaagctataggacaagaattactgggaatgagaagtgtgttggctattatttttaagattctgtattttcacctcagaaaaaaaaattatcccacattctataaatttggatctcccagagatagaaagaccacccagagcgtagagccttccgtcatctcagggagaatccctctccattatgcattttcactcccgctttcagcaagacaaattcctctttgtttcacgcacttcaatttagcaagcaagcaacttttagcgcttgtgcaagtaacctttgtatctcaccctctaccccgggcagcttagaaaagacttttttccttaacagacagtcatcttaaaagaattctagagtcagctattagaaaaacaaacaaacttgttctccacttccttatactctacctgtctgctctcctgtttcagtgaatagaggaggcctcagagcttcatggtgctggatacaccagtacagagttgttgaaaggaaggagtcttctttacctttcttaaggtctaagtaacattgtgagtgaaaatatcatcaggcaaagaattatctgtgcattatgttaacttagtaaaatgtccttgcaggcacagaaaaacacaaaaggtctggacagctttttaaaataagtagatttgtaaatcatttaaaagaggttggaaagtgaagtctgatggggcaatggaacacacactggggcttgaggcctaggtgtacgtggtcccttctcttgcctcttaggaccggctctcagctgccagctctgcgacctttgtcactacagatcccac

SEQ ID NO: 42903 - DNA, 734 bp, Homo sapiens
cacagaaactcagaaatgaaaccatgtggctctggcactgctgacatagaatcactgatatttcaaatatcagacttctcaaaaagaagtatgtaaactccctattcctgtaattgctcaaattactatctttgaacacttatatatttctctgttggacctgattaaagtaccaagaaattatattttactaagttttctaaaatgaacatttgaaaagcctcatgttaaactaaaatccctactttttctgtagaagtttgccttttggatagagcatgggaaaatctgaactaaacaaacaggtgagaaaatagaggcaaagagaggtcagagtcatatggttaaacattggcaaagcatgagtttagactcagacagtctggccctaagcccgatttgaccattgtgctgtacgtttgtttgtttgctatttacactcacatttcaccttttccaagttgcttattcatgccctttgcccattgttctgttttcctcagatatatgcaagagtccttggaatgttaaacttttgccacatacttgttgcaaatagttttcctagattgtcctttatgctttacgttgttatgtgttatgtgttttgagggttttaaaattttgttatttaaaatgtttttgagccttttgtctatcagccttttgacacatttaacaagcattttaactattcaaatcacaaaaatatttgtctttttcatttataaatt

SEQ ID NO: 42904 - DNA, 1490 bp, Homo sapiens
ttgcttgaaccagggaggcagaggttgcagtgagccaagatcaggccactgcactccagcttgggtgacagagtgagactccgtctcaaaaaacaaacagacaaacaaacaaacacatgcctcatgattacagaaacacttttttcataggtgctgtactccagccagcaaatctctgtgatatgacctcacgaacctcctggaaatgacctgtgtgtacaacacccatgactaatatgttatggtacgtgtccctccttccaaatggcagatcttcctcactgttatatccaatgccagtttaatgtagtccaattaattaagcaatagtgtactaagtgctaaagtgggcactgaggatacgacatgagtaaacatagactctgtcctcaagaagcgtattatgaagtcagaaaggcagatgtctaaacaaatgataattccagagtgggaaagacagacaatgagaggattagacaaatgggggaagagggcttgaccaagacagacaaagactttgcccgatgagtggtgtcatttctctcatgagaaagaatctagcacgtacagcaacacgccaaataaatgattggtaatagaagacaaaataaccccgaagtgctatttaactgtgttgttgtcgaggtgaagtatgtttgtgtttaactgtgcttgttgaaatgaaacatgtttatttttgcctgttgttgctatccttactaaggtgtgggataacagcaaggaagctgaaatgtttatttggaagttctcaaagtatagttcctgggctttttagggttccagggtctctttccagggggttcgtgacgtcaaaatttctcttataattgtactaaaagatacttgcctttttgactatgttgatatttgcacggactggacaaaagggtaattatttgatagtaatcatgttgattttcacagtgtccctgaaggcatgtccaaaagaaaacttgcaggaaggcaacacagggcaatggggaaaacactgttatttagaagacacagacttgatttttttggagcctcagtatcttcatctgggaaatgagaagtttggcctggattgtggatcccaaacttagttgtgcagcagaatgatctggaaggctttaaaaaaattacaggtctcaggaacttgtaggatgaggcagagattgggccttctgggatgatgctgtgggtggggaagggtagaaaggactacatttgtcagcaattgtctcccaaccccttgtctttccagtgttgcctgccttcctgataaactttcagagctaatcagattggcactgaggtagaggagtgacgacaggtagctgctgtcctactccggaaaagacccattactgacaggtaaatgaggaggcttggatggctggtgtttgtcaccaaatatgaacactgaggcaggatgggtttaggagctgtggatgtgcccagaagagcttcagcctctttggcaagca

SEQ ID NO: 42905 - DNA, 770 bp, Homo sapiens
tcaagatattctaatcaatgttaaaataatagtaccctgtcgagagccagcagccactcaatgctggattgagttagcacattccttgaccttaggttatgtgggtatcttggaatcagtagaaaaagagaatcaaaacatacataaaagacaaaaggatagctttcctcttctttcttcagaacagattccctgacagtcgggtaagatctgctctggcagtttggtgccctggctaacaagataataattgcatacactcttggaggagcagaatgcagctctccttcctcctttcacccatttcctaccagccctgcaaagagctgcccaagaaatggttgtgtaacctttgactcggttgttattttttccctcctttaatgaagtagacctttgtttgcctccttgtccacatcaccagcaatgacgaactacaatgccgtcacggtaatgcaatctgggataccgatcagatgggttaatatttgccaacacatttcacaaagaaaaaactccaatctgcctaactcaccttaatgggggtcagttttatgtggagctcccagttccataatgaataatgcctacaattaacctaggccaggccgatttaatttcaaggaaaagttctgcgagttttacctgcctcaagagaactgaattccaggaaattcttgctataattagtagaataaggataaacagtagtacttttctctgagcccagagcccatcttgtcccttgccacacagcaaataatataggg

SEQ ID NO: 42906 - DNA, 640 bp, Homo sapiens
gagggctatgagaggaagtaaagacaggccttcagagtaattatttttcttattcactcaattcatgcagctgaacaataggcctatgtagcacaaacattaaacattactttttaggctatcccaaattgtttaacatacacaatgtgccaggcctgtggtgggttctagagagccacaaaggctcaattcctgccttcagaagctcacatccactgggcagaaaggtgatttcattgctacagatttcaatggtaacacaagaaaagaatgactcattccaacttttgcaatcagggaaagcttccggggaaccagtggagatctgctgcaaaacagggaaggaaaaaaataccaggaacatagtaagtaatcacacagatcatggtacacacaaggtgggtggaatctgccagtcctcaccttcaggaagttcatatctagtgggggaggcagaaacataaagggagactggactacggtataatggtgagccctttggtagagctcggcatagggtgttatgagtgcacaatgctggcatatctaagagaaggcccacccaaggcctctgagtgtaagcaacagcaatgctgccttgaaaactaagcaggacttcaccagtggggaggaaagggca

SEQ ID NO: 42907 - DNA, 806 bp, Homo sapiens
tgtatagaagaaaatttgcataagtctatagaagtctatataagaaaacttcttaaacatagttcatgagcagcatggattagttatccttcagctggaaggtttcttggagaacttaaaagcaagggacttcctgcagaaatgactgcaaacatttctccttttatgggctagcatcctctatggtggttttgtaccactgtcttagatctgatggaaactcattcccagaattccctttcctaaatcgttcttcattccagttggctacaaaggaaatttgtgtgacctttggaaggtaaaagtgaaacagcagcattctgctctgaaggtcagtgtagtcaacaagtgcagctcactgacctcccagatcaccttgtccatggcaggcagcagccaggctgccggacatttggctccccacagatctcctcttttggtttctgggccaggtgcacgaatggctttgcagtgaagagtgccagtccctttcgggctgttcaagtcagggtcattgaggctggagaagtatgagtcaaatacaagttccagtttatctttatgggtttcattttctcctgcaggttctcccttgctcagctctacttcaaatctaggttttcttcccagttgccagctctgctaacctatgatgactttagctccataccagatgtgacgtgaaagcgactgcaaagctcccacaattgttcaaggtctaaaactgaaaataaatccattattccatattaccatagtggttctgcttttctaagtgatagggattccattaaatcttttctatt

SEQ ID NO: 42908 - DNA, 1091 bp, Homo sapiens
tctgaaaagcagtgctctctactgtgttacctccgggaacaaagagtttgaattctgaaatgacatgaggtggtaaagacattccagagtgataaaaagggtccagtaataagactaatgcctctaggtgatttctgtccattttcttttactagaaaaaaaaatcaattgctaattaaggaactaaaaaaataaggcagaaatcacggcttttttcagttattggattttcaccttccaaatggacagacaggtatattcatcctcctaccgagtaccattaattcattagaactacagttttaagaaggaatttgtctgaaataggcctcctgtgcatggattacctttttttttcttagtattccatttgcaatgagaacacttagctgtaagctgtaataaggaattgcttaactttcataagtaaatgaatgtctatgattaaaacatcaatcacggaaacactagttctataaatagtttctaggtccaaagtccataggcagttaaataaagacacatgtttgttttttcttgtttgtgtgtgtgtgtgtgcatatgtatgtgtgtgggtgtgcacacacatgtgacataagaaacacatttggtttttcttttgagaaacaaagaaatgttatttgctgaacatatgtgttacctggtattttgataaaatttatgtttgccaatgttatcacctatgcaatgatctataaaattttaacctaaaatatctgtccttgaactcaccctgtgtttttttaaatgtcttattgctcatttagaagctttcacatttgctttttaagcaacacaagatgaaatccaagatagaagacagaagtccataaaatcgtactgagtccttacattttgacccactgtgatttgcatcaccaacagagtcctgcagtgtagcatagtggtgaagctcatggcctttgacattgaacaactgaattcacacagctccattaccatctgtgggactttgggcaagttatgctatctatttcctcatctctagaatggggaattattaatgtgttattatttagtagtacaaacctcagagatttctttaaagg

SEQ ID NO: 42909 - DNA, 973 bp, Homo sapiens
tcaagtgctcgatacagatttattaaatgatccaaagaattcacctttcttaaaccagggccttctgccaactccatttcacattctatctctcacctcctaaataaattcctatttccagttggaggaaagctttgattcaatttgcaaagtagaaggagctgacatgctctcaatccagtccagctcaggttattaacttttcccctccctctcggaggctcagatttcatcactcaaaagccacaaaccccagagggaggattttttaaaaacctatcattatagttctaaacatcaaaatagccaccaggggaatagcagaacagtttcttcgtaaaagagcataaacatttcagtgaactaaatttgtgttttaaatggcactttcagaaaaataactttatctctaaagacttttaacacctatggtcttttatatattatcaacccatttcaggtgacaggacgcttgatacttaaacacagccaccattctataaggaaatgccactctcttcaaagaaagcatagagtcaatgtggcactgtgtcctctgttagtttcgattggtactattctcggcactgtcttctcggagtgaagctgttgaaacaccgacactttaggattaataattagatgaggggatgtttttagaaataaagtaggaggcacgaagtgggggtggtatgcagcaagtgtgcatgaggaaggaaagtggcaggagaagttgacaaggcatgagagatttcagagcgctatgaagacagctttccctaccgaagagatctgtctgagttttccatcttgttgccccaaaagggcatttgtctttatttgcaacatgaataaatcaaccctgatgcagtcacctcattttttagccatagtaacggagcagttctacacaatcaagtggccagactgtgcagtgatctgcctagcctcagagaggggttgcaaacacagc

SEQ ID NO: 42910 - DNA, 658 bp, Homo sapiens
ctcattcctgaaaaggaattaatagatacaaatagcctaacatagaagggagctggcactaaaatctacatcttttaatttataatccaattttgttatactataataaagagagtggttgcaattcacttattctgagaaaataaacaaactaattaacaaagtagatgatattctaaactaagatacctgtctggctactatagcaaaggacaaatagcactggcagaaagcagagtattgcagaggtcatgccatggggcaattacatgccactgatagtgaaaccactgagcctattacttcatctattgactcagcaggttatacaaacagcattttctaagtgtgccataatgtgaaaaacagttgaatcaatggattaaacaagatagagttttatttctttcttaaataacaatctaagcacaatctgaccagaactattattgcagcaccactgcgtcaggggtccaggaccaattcatgttttgacactgaaatctctacagtgctaccccacaggaatggtccaagatgctacatgaccatatctgttctctaaattgtttgaaggctcatgtctttccaataaaagcatagtaaaataattgaacacatcacttctggcaatatcccattggccagtagataacaa

SEQ ID NO: 42911 - DNA, 2300 bp, Homo sapiens
atagattcacatagttgtacaaacattgccacattgtaattttagaacagtttttctttttttactgcaaaggaacttcatgcccattaatagtcactcttcatttactccacccacgtcccctagccctaggcaaccactaatctactttctgtctctattatgtatttgtggtctttttgactggctgttttcacttactataatcaaaaacttgtgaagtttatttaaaaacatgtatttctatacagacacacacattcattctaatgatattacccaaagaaaaccattgttgtttattgtttggccatttcatattgtggtccatttccatgtgttcaaaaataaggctgtatttgatataacagagtttttacttaattacactgaacttgagattattcaagctaatataaggcaatagtagcataggttatgatcaagtcacttacatttacctttgggatatactatgtgtagttttgacagcgtgtttgcttaaataattatgttcagctagagtaaagtcaaattatttttgaattcccctagcacatgtcaactaggactagatagagatggatgtaaagtgtcatgtcaagcagaagtcaccataagattaaagtcttattataaataatccacaatgtgaacaatccaactatagataaagaattttgactgcatgttgtataactgccttattagatgctgaaaaatgtggacattaatacttggatggaaattgttatcatgattaataacaatgagttgtggcaattttacaattaagagaatgttttggggatccatgttatataatgagggtctttgtggaactttgataaaattcattcttctagatggaattacaactgataatcataatatagctaacatgtattgagtaattacattcccaggcactgctgtaatggttttacatgcactcagtaatttaatcttcctcataacgctatgagactcagattaaagaaagtaaatttcctatagaccaccagcaagcattggtggatgtgcaaaatttcttaattccatactttcgttttcaatgtgtttttgacataggataattagattattaaaaattgttttctctagtgaagaaatgctactattcctagtaccaatagaaacccttgtttccctttgaaagaaatatggagcgcctgaggactagataaccaaggttgcctgaggaaaggatcacaataacagtaggcaattctgtcccaagaatgagtgcttcttaaaacataaaatagttttaaaaatttcttaagatagaaaatgtattctcagtcagattttttaattttgactttggttaatcctaaaatttccgggctaacaatggaaaaatgtttcttaaaattctagccaaatgttttcatttattcaacagagttagttagtttgaaattcttcttgaatgtctcagtattgctcaatcaaatggaatctaggttagactaacaaatattgttgacattgagtaagaatgccatagagtgcagagatgtggtaggagctcagattccactaatccacaatattatgagtcatttaacacaaattatcgtcatttcagcagaaagtgtttgtacttaattgaagtaagtggtcccattcaaaatctttctttattcagtctcttcaatcaccaaagcaaaacaggatatatgcatctttgaataaatatctgatttattgtgtatctgttaatttatatagaatatattaatgttaaatggcaaaaactgcaattacttttgcgtcaacctaataatagattgtttaataaataatagtgcacatatttgtgataactataaagacaaaatagctaaaactaaatcgatgatatttgacctatgtagctaaattaagcctgtgtctttcatgtttcatacataaattctgagagcacatatctagaatatgatatcataaacatcaaaaatttgaaaatcactttcgtgttagtctttagaaatagtgagaaactgtgttttagaaataattttgttaaattccattagtgcactgatataaagctaactgatagaattatttccaaatatttatgtttagtcaggatctgagctacaattcagtaatggaaaaggaatcgttggtaatatgaaaatatttatcagtgtgtatttcataatattacagtgcttttgacattgataaagtaccccttgctttactacatgttgcttatcactggtaagtagtgtgttaattagcattgcatatatatatatata

SEQ ID NO: 42912 - DNA, 549 bp, Homo sapiens
actaaggcttcagttccttgctgcttggtggctgaaaaccagtgtgaatcgctctctaaggcagttcactacatagcaactgatttccttgagtgtgggcaagtcagacagcaagaaaaaggaagcaagacaaaagccagactcttcttgtaatctaatcttggaagtggcatcccttatttctgctatattttatccattagaaacaggtcactagatccagatctcacttgaagagagaggattgcacaaccatgaatcagagatcattggggacaatcctacaggctgcttatcatggtatttattacattttaactggattacccaatttatagacacgaaaaagattgatcatggttttatggaatggcttaacttatggtccctatcctagaagtaattaaaatccctggaagaatatagaaaaataaatggataaattctaacaataatatgataaatagcataattgtggaataaacaaactgacaaaggaaaacatgtggtgtgttattcactctatttgggaactgtaaggtctaaaga

SEQ ID NO: 42913 - DNA, 549 bp, Homo sapiens
ggagtgatatttttgaagtttttttaaatacaaaaatgtattttccaatactttatatcaacgtatgtgaggggaataagaggtacattggcaaaggtaaattgcactgtctcgtagccctgcacctttgtaacatttcaggaaagtcagtggggatacccagtaacgatgactccttttctgtacaaagttgcatcaggtagaagaaggcaaacccagtttaaagaactgggttgcctgtaagaccatgtatctttacattttcactatttatctcagaggatgagccattctcataaggtaaatacgggacttttccaaaccacttttatgagtgggtcaaaggttaaccacaaaatttaggtcagaggggggcattatagtgatgtctctgagaatggatgataaatattgtttcatggcaacttcagatttatttaccacaactcctcatcatttctaggtgcacaaataatgcaacaattctatgacccctggagcctcaaatgtgttgaattattttatataatagctaggcactgatagtat

SEQ ID NO: 42914 - DNA, 1510 bp, Homo sapiens
gaggaattactttaaatgctttgaagctcagcatcccggggttcttatccgtcactaattacctatacatttgcaggtctcagtttctttgctttgtaaacataggcttcttgtaaggattgggattatacactgaaaaagcttagcacagtattattactattatgctatctacattatattataggtgaaacactacagattataatacatacaatatatactaattgtattatatattgttattttttgtcattatgctatttactattgttctatttaataactctctagataatttaacaggacaaaggtacagaacaatctggcccttacaagccggcggagacgggtacgaattaccatgacaacagcgcgcgcctcgacattgtcggctcgcgcgttgtttgggaagaaaaagcctaggctgcgtgttgcgtcatcattacgcgctcttaaggtttctccgtggtgttttggaaggtcccggcacggctaccgtcgccccacgctaggaaattttttttttattttcaacctttgttacatagcactgaggctacaagatcgtaagtactgagggaagaaagaacaagcgagcgattgaacgttaaaaagatgccttagcatgcactccacctctgaaccttcctgtgtgttcttaatcctatcagcttcctctcagctgggatcgcgccgcgtcaacttccgggcggatgcccgccagcacggcctccgccgctccccttctttggcccctttgtgtccccgcagtgtcgaggcgcgggccctggcaggtcctttctcgaggcagggggcacggtagcacagggagcttctctttgtgggcgggcgcgaggcccgctagggggttatactggggaacgtgcctgcgcgtgcttgggtaagaggaggttgcatgagggtcagctcgtggtttcagtaaggaggggcgggcgggggaggcggacgaaggggagtgaaaagcaatggaaaattttaaaagatacccccgtccaccttctaattgttgcggcctaacaatgaagcgcagccataacagtcctgagccactggcatgtttgcgggccctttattgccttgggaataaactgctgtggcattgtatcgtatattgttttcatggccttttttcctctctttatttttcccctgcagatagttcatttaaagcccccatccctgcaaggtggtgctttctaccaatatgaatcttttcaacctggaccgttttcgctttgagaaaaggaataagattgaggaagcgcccgaagcaacccctcaaccttcccagcctggcccttcttcaccaatttctcttagtgctgaagaggagaatgctgaaggggaagttagcagggcaaacactcctgattcagatataactgaaaaaacaggtgagttacaatgttaaaattgatgtaacatcaaggacagtttttaaaagatgaaaggcagaagggattctcatttttattcttgatgtcat

SEQ ID NO: 42915 - DNA, 608 bp, Homo sapiens
tcagattcccacagtcagctcttttctcgataactctttatattcagtttgaatttcattccaggattatcagtttttgttcctttgctgcactttcatctttgttggggagttccctcttttgattcatttttgtaaaatgtcaaagggatttatcactgggccacaagcaggcaatagcaatacaactacacactttgctatctatgcaggaataacagatgtgcagtgacctctggcagtctttgatagaagtgactggtcattggtcatgatgtacataggttatttacacagcgatatgtgaactggagagctactagcaaagtttgtgttttatgcaattacaggtaattgtggtagctgaagtccaaaacattttgggggaggggaagaatggtgttgctaaaccattatgactgcaattcgtgcatgttagaacctgtgcaaagcaaggtctgcctgtattacatactatttttctgtaattgtaaatgatgagaagctattctgaaagaaaaagatactgaagaaagatttgtttttattttcctttttaaaaatcagaatatggctaaagtgaaaatcttagtggagctggggaggga

SEQ ID NO: 42916 - DNA, 1987 bp, Homo sapiens
atagcccattttatttgaaaaagataaggttacacttctttttgttgttgttgctctccactccttacatataaacaatgctaaagcttgcagaaaaagaacatgtctacaacttcaattttatcaaagagatggcaaatccttccctgaggatcacttagatataacagttatttctggaagtaacaaaaatgcctgcagtggcatggaattttgtaaagtggaattctagccataggtagtgtattcttaatgaatataccactacatttttttaaattgaaatgacaccaattggacaaaaatccacaaggccttacaaatgaggctacttagaaacagccatgagtatctgacaggtcaggaaagtaaactgtttcatacagactttgctgttaaaaatactccagtgatgtgtttttataggcaggcaagggaaaatgtccataaatagctctgggaagtttagccaagagtttaagttgccagtaaaaatattaaattgaccatcaatagaaatatttcaaatttagtgaatacttaaaaaggcaaaaataagaagaaactgaatgatagcaacatttaaatttgtagaattattttctctttgctatattctgtatttttctaatatttcagtgtttctttccctattttcatatcctatgattttcttcatcccaaattatattttcatttatcattgatttaaatgctttatttcttttttgtttgtgaaggtggattttttttaaccttattccagaaactttcccatctgaatttcaaatcatcgttgcttaacagttcatttcttttcaagggatggggggttactctttaacgagtatgaggggttgggagggaaaacttcacctttctgacactggaaattcgaatcagtaagatgtccttcatcctgatacacgctttcttgggtgtttactgtcggcactcaaccatgaactatgacttggcatctgtagtctctaatcctaactcaggtttatgaagtttcacaattttttccctagagaacagccaacgctgagctggcgcaataccacggagcacagacctttgaggagcacactactggcatccatataaggaatacaggacttggtcatggcagcccagggcagcaggaggagtgcactcagctcttcgtaattccgtgcaaccatgcaagtgaggacgaggctgtccggcccctccctgattgccttctcccacataagtttgagaaggaggccttggacagcacatacactaaaatttgaacgatgcagagaagattaacatagagtcagaaagaaagaaagaaaaaggaaggaaggaaggaagaaagaaaggaaagaaagaaaaagaaagaaagagaaagaagaaagaaagaaggaaagaaaggaaggaaggaaggaaggaaggaaggaaggaaggaaggaaggaaaagaaacatgctggttggcaatatttcagaatgatggtctgattcatggtgacttctaacttattaataaagaataaatattttcttgaaaaaccaattccatgaacagttacttaactatatatatatataatatagtttatattaaaactataaattttaaaattgaaaagcttcttaaatcaaagccttaacatgtttcaactctctcctctgatgaatttagaagagttactgtaactcttaagctatgcctgagttggaattcagaagtaggatcagggcttagcttgaatcatttgtctaggctttttgatctggggaagccatttcatttttatttcctttagacacagaaaatgttttcccttgtgttaaagtggacatttttgtcctcactaatatttttcttttcttttcttttctttttctttttttgagacaaagtcacccaggctggtgtgcaatgatgtgatcttggttcactgcaacctccacctccagggttcaagcagttttcctgcctcagcctcctga

SEQ ID NO: 42917 - DNA, 1613 bp, Homo sapiens
atcatttttaatattgtaaacttgtcagttctctcttatattccaattttcctcacgcctctactcacattgtttcttgccagttaccacagtaggagtaatcttatctagcaattgtagataatacattaaattttaatgttaaaaacattcttcttaaaattcttgacacatgacctgtgttatttcttctgatactctgccattgaaagctacaaaggaggttaagtgtctacaaaatcccgcctttcctgttttcctcagttactgcaattccaaatttttactgggaattttaatgtaaacaagtttgcaatgattttcataccatccttgaaacctctgagtcttgtaagcatctctaggattatgtagaggatttcatttgttttccccattttttctgtagcctaacttaacatgactaaggttcaaggacatggaaaattaaccttacactttggaaacacagatcaagtgacatagactcagtttaagaaggtcatttcatgactcactgataattatttcaggacagatttgataattgagagtgagccatgttagtcttcaaaacaacgtaagaaaaagttactgatttgcttttggaaaagcatattcatcttacatagataacaggaaggaaaatggtgaggctcttcgggattgcttttttttttttatgtttgcctttgacaagtgtatcaaaggttaataaagccctttggaattttgatttttgaaacactaacacacgtaaacttaaaagcactaccggttgattagaaggtggtacttttgggtgtgaatgctgcccgtttcacatgcaaactgcgtccagcaaacaatcctgggaacagagccaagaaatgtcatttctctcactttgtacttccataataagtcttcatccccaaatgctttcccctgttctgtccgctgactaatccacccactcaaaatctttcctgtttacactgtaaaagaatggtatttttaaaacctttactcctttagcaaaagcacccaacataaagccttgcacacagacacacgtaataaatgtcattttgaaaatcttttaaaatagatatccctttatgaacttcaaagatcatgcaaaggaataagtcaaagctaaacccagcaacttgactctcccttccaaatgtgttaccatcagaaaacactagaatctgagtgcaagactgaaactctgaaagattctaccttatttagcatgcaagttagtcctgtaatccgtagaatcaatatcaacacttcagaaggatctgtcctgacttggcataacatttgatttttcttagcttgtgaaattgatcctctccctaacctagattgttaaacctcatagaagacattattaggcatgagcaacagtttatttctgaaatctgaataaaaaatagacatttactcacacagtaggtgataatccatggccatttccctcatataaacaaactgccctcaactaactccggaaacctcttttaatgatagttcttgcaaaaggtcagctaaagtttattttgctttcttgcctttgttggaattttagaaaacatggtatctttttaaaaaagatttta

SEQ ID NO: 42918 - DNA, 604 bp, Homo sapiens
attactctagtgtttagttcattagcctagaattggatccctcctcaagtcacagaggaatggttctggtgctgaaaatgaaactagcattttactttttgattaacaggagcagaatgatatgcttgactattttaaaaattcttttttaatgcaggaatggaagtctagactcagtcatgtaacgctcagttggagaaatagtttggaaaaattactagcatcgtttgactataatctgaagtttttcaacattccataggactttaaccttaataactagcctctctgacaatttgtaagataagactcattagtagcgttatagcctaaaggtgaaaacacagagaacatttcctcactctggttatctattctctgacaagattaggtgagtcatttgggcctcagtaatcctctgcagtgaactacaagtcagattgcaaaacacaggactatgaatacctcctctgagttttcctctttgttttaaaattgagagatttgtatagaaagaagaatttatttttactttgttaacagtttatcaaaatttactaatgtaatctgtgtagaaaatattctggtatatcttcaggaagaa

SEQ ID NO: 42919 - DNA, 5074 bp, Homo sapiens
ctaccgttagggaaagagcagctttggatcttcgcctttggaattttgcttgcacttctgggggccggggagctcacggacctcatgaagttcatccttgctttatatgctccttggttaagaattgtccttttcacgttttataagccaattcacagtgtaacagtctagttactttccgtatgttcagtgaacattattcacgttttcttatgaataaattcctcgggcgtatcaagcaaccctatagaaggctggaaagtggactattgatttggatttagaaaaataaactgaagatacagtggttgaatcacttttggccgcttttatgtatcactgtcttctggtgtgatggacagggttaacttctgttagggttactggttttcaccttcctgacaggtaaacttctgggtctgcacttttcagagcatgtaaagctctttcaaaaaaaaaaacgcaggcagtaaccgctgaacttgcatagatagagatttatccaaagtacccttctatttttaggcagagcaactgcttgccaatttaaatttctggagagaaaaatgcacccactacaaaacggacgagcggagggttagacctttgccaggtagcgctcaaaatccgctaagactactcccaccgaaactcggtagcgcagttgtctttccgcagctgcttcagccagccccagcaagcccgagcgcccggcgccgccgccaccttccccgcccctgcgcggcgcggctgggactggcccagaggcgtggccgggagcggaggggcgtgtcctgggtcgggggtggggcgagggagagccaggaggcggaagttcccgcgggcggtggggacggcgccctcaccgcgagtcacttgtcagcccttgtctgaggcggaggcagccccgcgccgcgccggacccgaggtgagtggcggccggccggcgatgcgcctctcggatctccggtgggagaagggaaagaaccggccgctgtgcgccgaacgcgagaagggaagcccggttggggacgaggagggggcgctcctcgggcagggatggctcctcaggtgctttctgggcgcggagcggcggaggtgggagagcagcttgggaaaaggagcgcccggaaaagggcagcgctggagtccgcatgaggccagagggcgagccctggggtccccgcagcccgggccgaccgggaccagcgtagcggagacggggacgcgggagggcgcccggaggtggcgagggccggcagggacgggcactgccgctcccacccacccggctgccggcgtcgcccggcaccaccgtggtgtggtgtctgagtgcccagtcctgcgccagtctcttggagggtaggaagcgggactcaaaggaaaaggcgcgttagtttttctttgctcccaggctactgagaagcatttatttctcccccagatatttacagttttgtgtaacctgtttggggaaaacttctgcgcgtccagaaataaagctcgtttaagaaacacatttgtcatgaacacgagatttgttaacacttgagtacttgttggggcttttgtaagactgtgccttcggtgcgttttacaataagtggaaaaaggaagggcgtgtggacagggcagagcttggaaggaaaattcgtggcggcgctgggcagggcagatttagggtgtgatcgccagatcctatcccaagtccgccttcctgacggggaggacgtctgaacccgcctgccacggaaacggcccgttcggtagccttatttggccaacaaggctaggcgcgaatccctcctggaaaactgtcctgtcggctgctttcatcctgtgcctgtggctttagttcttcagctctacctacattctctctccattgcggggaaagagaatctcaagatatttctctttaatttcaggcctttttttttgtcactctgtgtagttcatcttgagttctcctttctcccctctcacccactaatgaagctgagatacaagtgtgggaaataccaagcttccttccctagtactagagcaaagacattgtttagactttccctaaaagaaaatccataactctacagaaattccaaccttttcgacgtgtttgaaagagtatgctgctatttcctgcctgcttggtatttgaggaagggcttgggcactaataaccagatggaggagtcttggaaaggccaataaaaatattgccattgcttggggcagagactgttttaaggcagatgaattccaaatgaagctagcagaagaagcatctagaaatgaacggacagtgactagaaatgaaatgacactggttttgtagtgtggctgtgaccttgccagtgctaggaattttaataacaaatgagagaagttaggaagggaatccccaagtaaagggaagttgcaagtacatgggttgataatctaaatgaaatacattttcttgtagggaagaatggggccagaggaagttgagcccaactttcatattattccccagacacaagttaaagattaataaaggagggcaggctgcctgtgaaatatcagttggctttacacgattctgatttgtatcgtgtcaatatcaggacagtccttctattagttttctgaaaatctcctccttttatagcgggaaagcaattgaattatgtgtggctcgttattagcttcccactagtagtttttcacctatatatacagtttgacttccggcttggcctttggatcttttttagtgctctgtgcctattacttcattactgaagtaatgtgttattgccttgtagttcagtatactaccacgccagtagaaaagctgtttcggtttctgatacaattttctgtaatttttattttccctgatataatttttctttaaaaaccaggcttatttgaatgttttgccccattttccctttatgagaagaaggaatgtttgctttaaatatacctatggctcaaatatctatatctgcaactatgaatttggggtgatgggctagaaattttgaatgggttaaaacatattttaagacaggtaatattaggtggtgatttggttgaatagcttacattttccaaggaagtatgtttttaatataaaattacatatctgttatgtttttaatattttttaaagagagagaattattgtttcttagtattccattaaaacaaaagaaaacttcattcctctgtctcctgccgttataacaaccaataggaaactcgaagtttttttttttttttttgctttttaaaaattatatgaaagtactactaggagagtcatcacacgcacacttaacagcagaacagacaaaagaaagcaccgaagcactggttcttttctaaactgccaattccatttgaatgcattaacccagcacttttgctgtatttagtcataatcttattcactgagtggcaaatgcttactctctgcctggtgaggtgtgtgtataaaacaaaaagcaggttgtgactaacatcactgtactagagtattgcctatcgttgactatctgaaggaaaagtagatatcactttaagtgtggaaaataccatgtccccataggaggaaatacaagttgtagttcatgattggagagaatagttttgtgcattgaaaaacagcttctcattgtaaagaatttagtatttggaaagcatgaatgggagcctactgatttgcagtctctttcacatgttagagtaacttagaatttaagtaagtgcagttgaaagactcttgtcaattgcagacaaaagaatacatgaagtggagggaaggagaaaattattctgaattcaacctgaaataaaatcttgctacattagtgaagtattgtaaagtactttgagttaaactttgcatgcaagaagccacaaaattggattgaagcaagttgtgaaacatactaagtgtctagaaatgtattctgatatggaatttttagaccatggaaattgccatgagtgtagaaaatttatattagctcacagattgcttttcttaaactgaaattaatgaagaacttaattaagacttatcttctatatcctctcacccccctcaaacaaaatactaaacataatttatgttctagggtttcaagtaaacatttttgctaatcatctgattttctttcacagcatatttcattttctgtcattggactttgagccattagaaccatgagcaactacagtgtgtcactggttggcccagctccttggggtttccggctgcagggcggtaaggatttcaacatgcctctgacaatctctagtgtaagtaaactttacaaattttattatagatgttcattcagtgcttagtcctcgggctgagttgtttaattctctgttgacctgtactctacttattatcattgctcctgggatttgatcttggcaaatttgattatctataataaaggatgaggggagtagatttagcaaggataactgacttcaatttaacttcttttcgttttcccccatgttatcaataataaaatggaaaaagcatttaactaggaacagactgtacatttttgaactgtccctaatttggggaattctctgaatcttcgttctttcatatataattttcaaaggttgtgctatgggattttaataatctctttcagttccaaaagctgtttgttaaaaactgttgatcaaaattgaataaaatgattgtttcggaattatttcctcagctcactttctggtggaggtgatagccaacagtaagatggccaaaagctacttacccttgaagaggaaatgaagggcttggagctccaactagatagcctatgaataattgagatttggctttttacctcattatggatttagtttgaatgtattctgtgtatatattttaaggatatgttttcatgatgatgatgatagcactgatgagaggagtaattaaagcttctatttattgagacttgactatatgtcaggtactgtttcactttcatcaccagtaggtaattattactattatataagtttctaaaaggtttgtttt

SEQ ID NO: 42920 - DNA, 2001 bp, Homo sapiens
tttatgtaggattttctagaagcaatttttttaatacacacacacacgcgcacacacacacacgcacacgcaccctgtaggtttggattgaattacttatgaagtctcttctttatagtcagtacatagtaaatatttgttgaatgagtggtccatttccttcttccatctgtcatggtctggcataaactctccaagagatttgaagggagagttggcaccagtagtacctccaattagacattctttccacagtgattgccattcagtgtagttttgttttgttttgttttgttttagattcttttaaagtagcatgaaacacagtattgctggtgataggcagttgctctagggaatagttttctgcagtgaaggatgaattcacaagacagaataggtaagtggaatgaatgtagactagatgaactaagcaatgtacctgccttttgtactattgctttctaggtgtttttccagcatcagctgcctgtgggtagaggtcaccatgctctttatcttgccatcctgcatccctggtggtggccagctagactaggatgagtgcctccctaaatgcggcatttatagataaagttgggagatttgtatgttgtcacactggttacaacctctgtgaattttatgaaataaattataaaatttagcaaatctgaacttcagtcatataaatgtaaattattattgctcactccattgatttatttactcattccacaaatatttattgaacatttattatatgcaggacattgtcctaggaactaaagatacagcagtgaataaaacaaagtctgtgccctctcaaatctatgttttagggaggtgaagaagagacagtaaacaaaaataaatggtgataaaatggtatggagcaaaacaaagaggtatagggaaagagtggcagttgcatggggcttacataatttgtagaaggtgagcaaataagacctcacagataaggtgacatttgagcagagatctggataaagtccaggaatagtattcagggcaaagggtaaagaccttgaggtgagcatttgcttggcatgttcaaggaacagcaaggctccgatggctggagtaggcagaatgagagggagaatagtaagaggtgattttattttttttatttttattttttgagacggagtttcactctgttgccgaggctggagtacagtggcacaatcttggctcactgcaacctccacctcccgggttcaagcagttctcctgcctcagcctcccaagtagctgggattaaaggtttgtgccaccatgccaggctaacttttgtatttttagtagagacagggtttcaccatgttggtcaggctggtctcgaactcctgacctcgtgatccacccgccttggcctcccacagtgctgggattacaggcatgagccaccgcgcctggcccagatgattttagagagctgaaggtagatacttctcaaaattaaatcctgtgctatggtttgttgatgggacagaagctctttttccttggattaaaataaggtcttgtcaacatagtgggtgttttgtttgtttttggtaagcagtaaatattttctctcaagtttgaagtctctgctgattgcaatgttgttttattaaggactgatgttaattattaatagtatttgaagttttaaaaggttgtcagtggtgatatttgcattcttggtactgttgtttgatatgtaggaagagtaactgattatgaatgagaagtggagtcagattaaatacatagttcagtgataatttttatggagtggtgactaatttattttcattgtcatcatcctaacaataatactcactttaaaaatcaaggtgaaataaaattatttttgtctttacaccaagatttcagcttgaaaatggaggctgagaaattttagtatcttttgggtaatcaccaaagtaacatgcagattattctaggcatattagcatgttgaatgtt

SEQ ID NO: 42921 - DNA, 2207 bp, Homo sapiens
acatagcattctgtccctgtgtgatggttaatattaggtgtcaacttggttggattgaaggatgcttagatagcaggtaaagcattgtttctgcatatgtttgtgagggtgttgccagaggagactgacatttgagtcagtggacttggaagaggaagacccaccctcaatgtaggtgggcaccatccagtcggctgccagcaccgctagaacaaagcaggcagaagaagatgggattatctgtcttgctgaggcttctggctttcatctttctcccacgctggatgcttccttctgttcctcctgcctttggacctcagacttcaggttcttcggcctttggactcttggaattaacaccagtggtttgctggggctcttgggcttttggccacaggctgaaggctgcactgtaggcgtctctgcttttgaggcttttgaactccgactgagccactactggcttctttcttccccagcttgcagatggcctatcgtgggacttcatcttgtgatcatgtgagccaattctccccaataaattcccatatatatatatgggatatatatatatatctcctgttggttctgtccctctgaagaaccctgactaatacaccctggtgtcccaaaattcatgtccttctcacatgcaaaatacattcatttcatcttggtagccccaaaagtcttaacttgttccagcatcaacttgaaaatctgaagtgcagagtctcgtttaaatatctaaatcgggtatgggtgagactcaagttatgattcaccttgaggcaaattgctctccagctgtgaacctgtgagatcaaacaggttatgtgctcatatatataaggcactcattaaccatttgctgaaagaatggaacctcatggcaaactaatctaactctgacttttaagattacagtaaaatattggtctcagcattcaataattatcaacagttggtagtactgataatttttggtgtacacaaggaaagccctaaatggattctagatttacctgcaacttctggtagtgaattcttgttctctctaacagaaatggctttagccttatccttatatttgagtgcttctgggctgttactttgaagggcagaggtgatttgattcatcaaagcactaacgtaatgagtgggagaggatgaatcagcagacagtgtgctggagaaatactctgccaggcaaaccaaaatcttgcttctctgctccttcactccctccttggtatggactttgctcaactgggaacagtgacattgcttaatagatttttccctaactgctgtcagcaccctgccctctgccaatctcagcattacccagagcacaggaacacatggtccaccactgcagtagaacaagaatcttcagtgttgcttcagtttattttactcttagttttaaaaaagaaaaagaaaaaaagaggcactgacataagaacatttcctttccatttctagctgttttttgtgattgtgcatttgatttctgtaggggaagtaaaacagctagagttaaatcaatgctgtgtgacgagagaccagagagctagaagtgatctactaacatttggtgctgtcttgataaaagccaactgtgtaggctggcttattgggcaaaaaataaataaataaacttaggattgtgaaaaaaggtacaggaaacttattaagtggtattggtggaagttctaacctaaacaaagagctggaaggaaaaggctcccttggaggtcagaaacttggctccttgggtcaagtgttgatgggccttggttttgaaaggctacagctgtataaaggagtctgttgccatacgtcctggggctggaatgggctgaagactttctcatcttctctaagggataggagaacatacttagtagaaaatgcactgataggaggaaccaggagttggcaagcatggatttcttggaaacaatctggcatccaggagtaatagcacataatatatacaatctgttataaagaataaaatcacactagttgatatggaagcagactgtaaacttagattgttcagaagttatttatcatcctatactgtgctctttatcattactttcaatggcaaaaactgtgattacttttgcaccaacctaatatgacttttggcagccttgctatccttgactctcagttttcttgttactttctcc

SEQ ID NO: 42922 - DNA, 3032 bp, Homo sapiens
aaagaaaagatacatatgccaaaatagaagtataatattattcatcactttatgtataacaacaaaaaaattaggaagtaacttaaaagactaaatagtagcctgttgactaaatacctttgatttgcagtgtggcagttcatcagatgtttattgtgttttgtgtttacgtctgtgtatgatagccctaaatagaaatataagatacagttagtttgaggagcattgtattatggagagttgggtacacatgtgaaaagtggaatagtataaaacagtagatgagagaaagagccttgcctcttctttaatatcttttcttagaattgaaggtaatgccttatgggaatagggccttattaaatgttaatgattaacattttgaagattattaaggtttttaaaaagcgaatccctgtttttataagctatacttaccttagcatgtgaaatcatgattttgcactatttggaataagcattctgttttaaaagttcttaaattttcttgagctttttgttttgaaatatctttagcttgtgggttttgaaaggcctgtgatttttcctcctgtcgtagaagtatgctggcctggtgtttaccaaccacacttagagaaactctgttctcacatttcattaaatcgtaagttcctataatttttttggttatagacgcctttgaggatttgtgaaaagtcgtggtcccactcaatggaatatacatgcatgcttgcacagaatttgcatacaatttcagaagatttgtctcatcattgagggagggttgaaatgtatgattatcattgttaatccattcccaggtatgctagatttgactaatttgcttttagtctttataattatttgtgacatttcctatcatttctctcactattccagagtaggctatatagaaacactgatttctctgtaattaacaaatttgtttgattttcagatgtttgtggatgtgttctttttacagactatcatactttcacatttctagtaggatattcacacattaacactttggatttagacatatgtagattagctataagtcagaagtgttaatgaggcatctcaatagtaaatcacagttgatgaagacatgtttctatttattaggactttggtagagtagagtaagatgctgttttactaaataagggctcatcataggaaataaacttagactactagaacagaccgtgctgtatcagcaaaagccctgtgtttgaactagatagctccatggctacataaggaaaagagacataattgtcctcttctgtttgcttttataagggaggatgacacgtactttgaggtattctcctcattgctaccatataaggtgtattctctaacttttgagtaaaattggcataaccaaaataaggcccactgttaaagtaagtactgctcatatgagtcaggattacacatttgctcacagagagacatcggtgattgcttgttttatttccctaccattctaacctacaaaaagccttatcattttatttcacagaaaaaggtaataaatccaaagcagtctctctctctctctctctctctcttttttagttggtatgaggtctcacttgttacccaggctggagtatggtagtgcaatcatggctcactgcagcctcgatctcctgggctcaggtcgtcctcctgcctcagcctcctgagtagctgggaccacaggtcccagatggcacacaccatgcccatccaaattttttaattttttgtagagatagggtctcactatgctgcccaggctggtctcaaactcctgggctcaagcgatcctcccacctcagtctcccaaagtgctagtattacaggcatgaaccactgtgcccaccccagccttagattttaagagggatgtttacattagacacataaaccagagattgacattttaaatgtagttgaatagcatttgtagactgctcaaagtgccaacattatataacaacaagtagtgcaggacagaacaatgttaaatgctgaagtgtgatattataaggtagattaataagcactaggatgataataaaccaattaggatttgaaaaaagctttaatgcatatatgcgggggggacatcacatcacacattttctttacttctgctcactttactagtccctcagttgctcgtaaaaacttcaccgggattttatttatttgtgttgttgagtgggttgagtagtacctattgttggcaggaaagcaagttctgtgaaagttctctgtcataggtgtaatgctcacacattcttatgtaggtgttttgcaagggggtggtgacgcaaaaagtcacatagtcacgtttatggtatcctgggaaatatgtgggagagagataactagaaactgtcaaccatagtcttatatgtccagattcaaattttttatttgacagcaggtactggaaaatatattttaaaacaaaattcaagattgctcattaattagattttaagaaaaataacactttctcagtgctttttctgcctcaagaaagtcttgtttgtcagactgatataattttattagcataattcttcaaattttggtaacagcactgtcagaaaaacaacagcttccattttcccatggtttggttcccagggtttttggacatgggaaatttctgttagtgtttctttctgtagccctcatgtttatatgttccttttttacatttactatatctgatggcattcctgccatacccatagtgttagggtcatgtgtttccaagcattccatatttgttgaaaatatgcagaagattgaaacttgccctttggtagtggctctttatataggtacacgtctcctacttgttgcctgtagtacattataggataatcaccaaagtaaatttcttttgaatcagcataaattgttctatttagtaaacatctgactattaaaatggtgttacctgtccatattataaatcatttctattgctgatgcctattttcttagtttgg

SEQ ID NO: 42923 - DNA, 1928 bp, Homo sapiens
tctgtctaacacattttgtcttctgaaagggtaaattatgtatactgaactgactgtaacaatgtagattatgtgagataggagatctgactgatgcattttattaccacctgtttgccagaattatattcagactcctttctagacttcttctcatgttggttggttggtcttgtagtttcctagtactttatgcaggtgactgcactcctacattgtggacattttctataccagagtcattcaggactactgttgagaaaatgtcagtgtttgccatctcttctcactcctggtaagtacagtcctattaagtaatcttttggttgtttactttttaccaaaaaaaggcctgttcccatccttatctatcatcaagtctctcaccattatcgtagttgatatgtcttaacatctagtcattgagggtgcttttatgacacttttaattttaccctgattttcttgatgccaactgtactctgttctttcacacttttttgtgtgtgctcgagcacttttgttttcttaataaagaaatggaagtttgagtaacttacacaaggttactcatcaataactgattcaggatttgaacccaggctacttaattcagaagagcccatacctaccactcaaatggattgccatccaacattcattccaaactctaagcctttacttttgaaatccatttgtcctgacatttttataaagaagtctttaagactagaaggaaaaaatactctgaacataaatttatttactagcaggaagataggaattagatgaaatactttcattttgcttcaccctcttagaggtctacaacaggaaattggagagatattgccgatgttttagtagattccatagaaagttcatatacatccaattttcaatttagaaagaggtaaggaattggattgttttcatgacatttttctaagggaagataagagaggaaataaaggggtgaaccaaaagacatcagatataaagtgcctgtttactccctctgagtgactcacattattctactttaaaaacatgttaggaattcatctaatcttctttagggcacacccacttccctctaagcttagtatagttcacagataaattggtctttctcagctcaccacttctgctatgtagttaccttgccagtggtgatttgatgtcccgtggctggccatgctcttcctcttctgtctcaatttcttccttatatgtataaataaatacctgactcacaagtgttttgcctaaccctgtgctttccattgccttggcaatatttcttgagttgaaaaagccatctaaggtgctaagttaaaagaaaaaaaaaaggccttataaggtactcaggatctacacgaggttgttaattcatgttttgctttaattggttactctgtttcctatttcctcggtttccaatacttgtttgtagaaaacatcagttttgtgtgtatttgctcttggtcctaaagttaaggacactatacgcagagttaattgaccttcatttgtgtgccagcattctggggtgacataatgcctgcaagtgtcatattcttaatatgtgagggggttctatatggagtacagggttagttgctaaataacctctgtacccctttttctctgtctcgatgtatgcattctcattctcctgtagattgcctatttgtatgtattcctagaaaaggccttcgataggacgtctgtagggttattcccttctaaagggaatggttataccctctgacctatcaattccatttctataaatttatcccatagatatactcacaaatgtgtaaaatgaagtatatttgaagtaaattattaaagcattaagagcaagctaaatgttcatcagcaggaaatggagtcaatatatcttcgtctgtctgtataat

SEQ ID NO: 42924 - DNA, 544 bp, Homo sapiens
cttgtgatccaccccccttggcctcccaaagtgctgggattacaagcatgagccatcgtgcccggccttagaaatacttttctatctcactcagaataaaagaccaattccttgtaatgggttcatgtactttatgtgttctgcccccagccatctctgcagctttatctctcactgctttccccagcttttcctggaacctttctagccccactggtacattcctgcctcaggactttgcacttgctatttggactgccaggaattccgtacttcaggtttctgttcagagttcacctcattagagaggccttctctgacccttttgtataaaatagtgtgtcctttcctgtgtcttgctttattatgctccatggcacttactaccatgtgaaatattttgcttgttagtctgcctctctcaaatggatgtaagcaccttcaaaggaggaattttgtctctttttttttttttttttttgacagagtcttgctttgtctcccaggctggagtgcagtagggccatctcagctcactgcaacc

SEQ ID NO: 42925 - DNA, 2233 bp, Homo sapiens
cttttagaatgttaggtggtgtaggcaccagtgctgattgcaggcatcccacccaaaggaccttgttgcacttcgtgagttgccttgttggcaataacaaatggtcctttgaagtgacttctcaagctctcttctttttaaatttatcctactttgaaataattgaaacagtggcttctctaaagttgaataaggttaaaacttaattgcattttcatctcttctattacataattatagcataatgtttctaggtaatatttaaaatggagtcaggaaacctcaatacttcatttagagtcaaatataaacacccctctctttagcctactattaattgaataatatatgtgtcaagaacatagcacacagtatgccattcaaaactgaatagtttttttgtttgtttgttttaaaggtagtcaatgttcattgtgacgtttaaaaaacatagaaacacagaaaacaaaaaacaaagttcacacataatcccacctcccaaggtaacctctattatctgttttctttcagacttttaaaacattcacacataaggacagatattattttacaaaaatggaatcctaatacagtattttgtaagctgctatttttcctttaaattgtatttttcagagtgagcacctgcttagtaagaattagccagcagcagtggtagtagtaatagtggttatggggagaaagggaaaatcagtaaaggtttccaaagtctagagcagtattcaacacacagaaggcattcagtaaatgtttaactgcatagatcatgcatgactctagacccattcatcatttaggccataatgtcaatttggttagtcattttcctgaaagtgctagtatggggtctctgtcttatagaaatatttaaactaatgtaagatctggtatgttgctgctttatcctaataaagaaaacaatgttttagtactacctgcatttagctgttatatttttggtttaatatcgataaaatagaaacaaactctgacttgtaacattgcttctgtaagttacagtactttggttgcctagactgatgcttagggatactatattctggataaaaacacctttgtggagacaggagtcactgctgttatttgtatgctattgtaagcaagtaattactgggtgagttaacaaaatgtcataccacatcagttgctgattcatgttgtgtagttatcaaattccatgatatcctgtaatcaccacttccggcacttctaaaaaacttacttaatatggagaaaatgtgaagatcaaagtagaaattacatttcaccacccctacctgccttggttttaaatttaatgccaggccagtatgcaattttaatgcacagtcatcctgccgtgtaaaataaatatgtattatgctaacatgagtagccatcacttattgctccctcatctgttaaattttatattgttctggattatccagtacttgttatcagttaagcattaaagcttcatttactaaggaagttaataggaatggggattagttcatgtcaagatcatgtaacagtaattaacatagcacatttgcctggtgctcaaatgcttaagcagcttgaatcgattgtggtcagttcagaggcctagtcaaagcataattctagttcttggcctcagtgtcactattacttaaccaaagcaagaagactttagatcaagtgacattctcttggacacctgttttaaaaacgagctgtagtttcaggcttgataccttcaatgcagactattataccctagcaagcttggagaagtttaaatttataatttatattgtgagttttctgtcatataatttatattgtttgtaccaatttatattgttttgttttatatttacttttcaatatttcgaatttgccaaaaaccattttttatgtaaaggcaaactaaagcacattttatgttttattttattttatttattttttttttttcagcagagttgattgttttagaaaacctcaggaatctgaatgttagaactgaactggttatctctttatagagcacattcagtttaaaattccgtaatcttatttggatctaaagtttaaaaattttttggtttatttgaattgtgaaaagtttatggatgttttgcctaaattgtattatggagacattactttgactagctacgaatgaataggaagttacattttaggaacttctgttgaagct

SEQ ID NO: 42926 - DNA, 598 bp, Homo sapiens
gttatgactttttcttagaaatcttcactctttaactacaatgtataatgtatacaatgtttatcaaaaagttttcacttaatctaacatatatgtatatatgttatatataatacatatataatatatgcatatatgtaaaatatgtatataatatatatgtaccatattcaacgtatgttacattccatataatattgtgtactgtgtattacatatgtatggttggtatgtgtgtacaggtcctacatgggttttcttttcaatattccataaaattcatcttctgtcatactatcacccttgttcacactgcttcactgttaattgctctgctctcccctaacataccatgaatactttgaccttagagctttgcacttgttgatcttgttgaacagaggctttttcttcagattgttgcctggaatgaccgctgactgcttagatgcctcttctgaaaggtcctcttcacagagactttccctggccgcttatctaaaaggccagccaaccaccaccatcaggctcattcctgtgtgattttggtttcttttttctttacgccacttactactacctaaaaaaaaagttaact

SEQ ID NO: 42927 - DNA, 987 bp, Homo sapiens
aactgtcttattttagattcccatgaaaaagtacataagaaacgagatgtactaaaggagatactgttccattttcaagcagaatttggtgaaaatattaaaaagccagtatttgctgagatcaaagatgaaattgtttttcctccttggtcaccccctaacaaacaactaccctagtgaaaaaggactctttgcaaagatggaatccataatgtttcaggaataaatatcaaatcaaaggtctactgtgaaatcctttgataagttgttaaacagatttaacaaggtgccctacattttagctagacaaatgggcttctatcagtcctaaggaatttcttaatgactcacctttgattcaacacaaaaaaacgtttaagaaaattgtcccacagaactctgaagtatagcagagacaagcttatctcaaagagatttgggggtatgaattatgtcaaatggagtaaatttataatttggtatctagaaaacctatgaggttttaaaataacttatatatccatgagctggagagatacagacattttaaaattaaaaagttgcctttttgcctccaaattccttcaggcaggtagcatgctgagaagcttttcagttgctcataaatgccttcctcacagaaaatgaacatttacttagtgggaagagcaaagaacaacaaagaagcaatccaggggagcagaattgccctaatcaaagaactgaactcacaaattcatttgcctggctgaattttagaattgctgtgaacctgtgatgtttatgtgcctacagctctgctctcttttacttatatgtatctagaagtcatcttgtctttgtctccacattatatgtttgataaatggagggcaaataaattaacttcctggtttgcctttggactaagagaagctacgtccaagtagctgatcctgaggtaccagccctgggaagcatcattcagaaattgatatgacttaaatt

SEQ ID NO: 42928 - DNA, 1603 bp, Homo sapiens
aatgttttttgtgcttccaagtttcatgagtacattaaacaaatactccaaaatgatttacacacacaaacatgcataaatatgttgaaaatcaatgacaaccaatatgtcctaaaaattagatgactaacactttaataaaggcaaaatatttagtaatatcattttcagcaattttattgtattgccttaaacctaaaaacatcttaaaataacctatttatatgcccccccaaaagtattttcaataagaatataccgtaaagagaatagcaaaaataacttgcaatttttcatttgctttttagcgattataagtacttgcctaggtcaatatggaattctaacagttgaacagaatgtcctttgtatccctaggcagacaaaatagagctgcctcagggaaaagaatttattaaacacactccccaagacacatgctgaactcaaaattacacagcatgcatctagtctcaaaagattctgatttgcttttcagtcaaatgtttcccgctgctagaaaaaatgtaagctttgtttcatgaaaagctttaacctgagaattactgcactgccatggttacccagcaaaatagattgcataacctagaaggtagcaagaaaacattaggtttggaaaataaaatgatcttcctgttggaaaatcataacgtgtaccccctatgtttgtgtaggcatctgtacagcttagcccattctctcagaagatcctaactctgaaggaagttcccacagagcaatatgtgtatcccggcagtgtgtgaatcatttctcttatctaataatctcctacaaatgtacctttggttatgctttgactttgctgaaaggtgagactcaccatgtggcattcattttgtctgccaagtatttcttcaggagttgtttgtttctctgctgttatactttagacagaagttcatgactccattaagaaagagaaaataatatccatattaaaatgctattaaaaataatcaattttcctggttagttccatcttttcctttttttttttttttaaaaaaagcagagttcctgtgagcattttacacaggaaaaaagaagcattattaaagctgagttgtataagaaaaataagcattctttaaaatacaaatgaggaaatagttttaaaatttacttattccttttacttctcaagcattaaagaaaatcaaaacagaaaataacacaagcaggcagcatatacactaacgactacttgccatctcaatctaagaaaagctagaaaataattagcaaaactcttgattaaatacatcctttgctacatgcccaattataatcatttcactataatgtgtaagggaattagtaacttaaaaatgtcaattatttaacattattgattatgttacataaacaaaatatgtgacttcaatacaaatgcttcagttaagttctagtatgacagaaaaaggcaatacttttctccccattgtgttttctaacttatttttcaaattttgagaaatcatctaccaacggaaatctcccaattagtagagaaagttatacttctgttatttaaaatctttagttaaaataagcatacatt

SEQ ID NO: 42929 - DNA, 677 bp, Homo sapiens
tttaacaaaataaaaaaaaagtaaaaataacaacaaaactcacaagcacaacccaaattatgaaaggagtacaacagaatatgcagccagaaaaagtagaatgccaaagcaagaaaacagatgatctcagcaccatcacgccttgccccatctctcaagaagccagtacttaaggaatgatgagtcacaaaaatcctgtaaattctcatcaatactctgtagtttttagtgaacctaactgagggagtgactcacgagccctaggaaaatcaggataagtctaactacaaacaacttacgtaatacagggaaatatcagtgagaaagtatcatcaagagtttctatcttcaggcacactgtaataagtgtgcctgaatgaaagagcaaaaaaccaagggattgtcagacttttagatgggatgagagtgccctgacatggcaatttatgaaacaatatgaaaaagcccacatctcatagcatgaattacattcagctgcagctaaggcatcacccgtccacaatttattttttcattgatttatttgtttactcaaccattcttaattggaaaactattatgtatctggcactgttctaagcactgaggaaatacgagtgaacaaatcagacaaaaatctctagttttatggaatttacactaaaatagagacagat

SEQ ID NO: 42930 - DNA, 661 bp, Homo sapiens
cttgaatttggaactgagttatgtgaaagaggaggcagggtatcagaatttctttgctggggagaatagattaaaggcagtgtggcccaaactgacagttgcagcaaggtaaaaaaaacttgggcatttggcttcctgatcaagcagcagtagctaggtctgggggccagcagctatactggcaacctctcagttaaacaagtaaataattaattgtgcaggagcagcaagcagttcccatgctagcccagatctgaggagtagctttgggtgcattcctgaaagtgcagcctagaatctgtttattgatccatttagtactgacacaagcctgtaatatgctgtaataaactttctgtttaagccttttagattatattattttctcctcaactgttgataatcttttatctttggctgcttttttatagataatctccttttcctttggtattttgctgtctcattatgctgcatctagatgtgtattttttacttatctttgttggaactagattcagcaccactgaatctgagaagtcacattttcatttatattggaaaaatgtcagccatgacctcttcagatataatctctgccaaattttcaattaactccttgtgagattcttatcagatgcattctgtaaattctcatttt

SEQ ID NO: 42931 - DNA, 1534 bp, Homo sapiens
ggcaggattacaaagcaacgagacagcgggaggtaagggcacaggatttggagactcatatattatgtcaacacagccaggaaatcaaaatcctagacctaaactgcacaatcaaaagtaggatgtagacaactattgcggaatcaaaagtcctagccatatgctcaccagccttttgaaatgggacaagtgatactatcagtctcatctgtaaaataaaagtatagtgttttccctgcctacttcatgttttgttatgtttacaaaatggtactattccgctctatgtttaactcacaagcacgcagaagcggagcaggctgaagataggatgcctgtcacaggagctctgcctcttcctacatcttacctgtcgcctgctgcttcaggaaaggtacctggtaggatccaggacccacatgggcctcagtgctgccaccttcagccaatttgagcaggcggggagcccgatcatacatagtgctcggggtggtgggggcgctggggaagggcaggtgccgaaaacgataaaaacaaggtagctagaagtgtggagaaaaaggaagccgacaccagtctgaggaggccgggaaagaacttccgtaaacagggaaattaggggtggggttgtctccccgcccgctcattgataccagatttcctcaaatcgatttctagctctgtggtaaagtagaggggtgagcgactagagattagacgtcccacacaatcatcagtttgccaggtgcacgccaccaaaattgggtattagggattagacgctcgccccggtgcttccggccctgactccgcccacttctctccgcccggaagcctggggaggaggcgggcccagtctctggggaggaggcgggcccagtctctagggagcgaagtggaggtgccttcctgggccgagccctcggagcatgcgcaccgagcagccaccctttcccggctctttttacccggaacccggcgcgccttgaagaaggcaggcctaaacctcgtagctcttggggtcccggtaactacttaggtcccgaacttttttaagtatgcagaagaaccttagaaaacgcgttaggaagggtgaggactaacttgaccttgatctgcttcccgactcaacagaacctagtaaagaaaaatgcagtagcatgaagcagagagcttggggttccgcaagctctcccccgcttctactgcagccccactcgtactcacagagaaaaggcacctctgatcttaacctgtagatagtccaaactgctaagacaaacccagggctcagggcagtgacaagaaatggagaacccagaaaaaaaaataacaaataagataagggtaaaaaagaaaaaaaaaaaaaaagaaatgaggacaccaggcaaggaggcgaaaagctcaccaactgaagccgtggaagtgactgaaagctgcctcttttgtcgtatgccaggtaaccacaatactgattcatcaatatttaaaaagcaaagcgaaggcactgaaaaagcccagtccaccccaccaa

SEQ ID NO: 42932 - DNA, 1110 bp, Homo sapiens
ttctgcttttctcaaacagaatgagtctttcactgcagccaccacagctgggaatgtgctgggtcaccactaaagtcagcatgtctcacagcccaacacacatggcatactccctagttatcaccgctggttattcagggtgcaagggctctttagtcagcgggagatgaatgccgccaggactgggtctttcttttcaaggcctaaggttcccttctggcccaggatctcatctagcaacgtcatccaggagctagggcttagaaagggggcctcacaactctgctcagtgccctattttgctatgactgagctgatgtccaacatgcaagacaaagtcctctttacttttctttctcctctcctcaagcagaagaaaggacttactttctttgctgagaactgtgctacctggggttgggggaggagagatgcaagcactccgttagtcaccctggctggtgtcccagtaggttgtatgccctccaggtctgccagctccaagcccagctcagcactatgatctgcttaggaactgcagtcccaatgacccagactgcccttcacgtttatttaaagtcccagagcacttttgccaacagtggcagggcttgctggaactcaggttctgactgctgggatgggcaattcccctctggctagggctggtctaaatgtcccctctgtaggtaggcttcagctgagttcagcccagttttgccttctactgtaacagggcaacactgaattcaatgtgctctccctccctcaagagcacagattctctctccttgccatgaagctactgccaggggactggggaggggtgatatcagtgattcgagactgtttttcctacccccttcagtacctctttcagcgatatgaaggtaaaactaggtattggttactcacctgatttttgttttttatgaaagtgtttttttgtgtcaatagttgtcaaagttggtgttcctgttgggaaaatgatcagtagaggattctattcagccattttgcttcatccctccctctagatttgtttgagctgtcctcatggtttcattaaggttatgtatttttggcagaaatactatataagtttcatgt

SEQ ID NO: 42933 - DNA, 914 bp, Homo sapiens
tacatagaagtatatgaaggaagcaagataatctcatcagaaacatcgttttgaattacagctgacccttgaacaattcaggagttaggagcactgtcccccaaatccccatcaaaagtctctatataactttaatttgactgccttaaaacctagctactaatagcttacttgttgacattactgataacataagcagtcaattatctcaggtatatgtggacccatccaggtatatgtggacccatgacattcaaccttgtgttgttcaaggatcaattgtactttatttttgcctaaaagaccactcataaaacacatatacctatttcacaagactttggaagagatggttataagcctattggcatagattacttgactagcttcctatcactctggaaaggaaagcacttctagacagaaactgaaccagacaggtaaccatgccagtgtggagaagtaggtaagttatagacttctctttctcatggaatgtcacagtggaggtgagcttagggttaaggaacaaattcacccaaggcagggtgatgaaatggaaagaccatggactttgaaatcaaacagaccttgttcaaattccaattctacattgtattggtcaggtgacattagacaaacgaattaaaatattttgattctccatgtccttatctgtaacataactaacttatgtggttagtattatatgaaatactaataattatatggaatacaaataattccaagagcatcaaggacaaattttagttacttcccagttttccctcaggctagtcccagagagaaagaatggaatgctttaagatgtggaggatgtcttcagtgagtctgtgagcatgtgtacatgtaggtaggtagggtggagggtggagagtggagatcattttagg

SEQ ID NO: 42934 - DNA, 3470 bp, Homo sapiens
atgactgctgttcttattaaaaagggaaatttgaacacacaagcacactgggagaacagccatgttcagattggagttacgctaccatatgccaagaaactaccagaagctaggagaggcatggacgagatccctccccagtgccctcagagggagtacagccctgcctacaccttgatttcaaacttctggcctccagaattgtgagataataatttgttgttttaagtcacccaatttgtggtatgttacggcagccctagggaactaatgtagtgcgattattttaagaggcaaacaagaagaacatcctaagagtgaggtgcctgatagtctcatgcatcagaaaagtcccatatatttgacttcagcagttaaattgtattttcctgttttaccaaacctttttaattatcgtttcttgctgtagaaaaatcacataaaatctgctctttgcttaacaaattacagggtcgcttctgatttgtgtgctcgaaatactagtcaccaagcagaaactgatgactgtgagaataggcgactaattaacaaacaaacaaaaaaagccctttctcaacattggattgaccgagtgaaagttgacaggggaaagacacctcgattcagccatctttctccaacaggttgtactgctgactgcacagtgtcccctgaaggactccggtcgctgtagccttggagagcgaccagattcctcaccccactcaggaggagccagggcaagattagggtgcagagaaatcggtttcctccagcctcctaccccagggaagaggaccgaagccagccccggcctcacgtgcatgcccagtcgggaggacgccctcagtgggagagccctgctcaggttctccccgaggccgaggtggtggtgggagcgggcggtggccccgggatcaaaggacctccgccgggttagctttggcagtgccgcagccaacccagcaggacgcttattttcaagcctggggaacgtagttcctcccgctttcacagcaggatggagcccgacggcaccccggttaaagggcctttccagagccctccggggaacggaaggccgcgctcctccgggagggagaacgacacactcttcgaggaaatcctggggcgggcgctctcctcgctgccgggacctttgtttctaagctggccacagctagagcagccttaagtgtcccaatgacacgcctgctatcgagcgccctcccggcggcccctcctcagccagctgcccagcgggcgtcctcaggtgtccccaagaggcgcaggcctagtcgcctacacgtcctttccaacttcgtcagctctggcttcccaccacccctcccggctctgcggcggcccagcctcttctccggttaattccggcctgtgcggcccggtcgtcccgtaaagaaggcaagcccgggttccgggtgaggggttggtgggtcagggtgggaaagcaaggcagcggtgagtcctctgctagcagatcgggctcaatatccccattccctgttttctccgggcccgccctccgcctctcaggcggccgccatgaagatcctctgccgcggctgcagccggtctgcaaacacacgcccacccgcacgcttagcctcgctcgccacagagggaggggtggaaaaggcactgagcatgctcggtggggagggcggggcgctcgtgggctgcgagtcggggccggagctcttcaggccggctcccgcgcctccgccgcccgcccgctcggagccgcgcccgccgcaggctgcgcccgccagtcccgccccgccccgccccgccccgccccccgccgctcgtccccgccgcggccgcgccgcctgcagcagcaccagctgctcctccccggcggccgccccccgcgggtccctccctggctgcgggagagacggaggtagagggaggacacagagccgcgccgcccgcaccacagaccttcgcctcgccccgccggttcctcaccctcggggagcaacatgggtaagtcatccttcctccgccgtcatcgcctgacatttttttctttctcggcgtgctgcagggtgggaagcatttctcgcgcaaagttgccggatttctccagtccccgggtgtgagacggtggctgttcctccggggagagtcggcgcacgcggaacgcacgccgggtgccggggctgggagggtcccgagcgcgggctggggtggggtcggccgcgggccggaccgccgcccggctccccggcacctcgcagcctcgcctcccctcctccattcttcctgccggtgcccgggcaccacggagcctgcctcgcgggctcgcatctgcagctccatccccgtttctccagaggccgcccgcttccttttcccccgcgtgtactgagctcgaggctcgggtccgaccactaccacttcgtgtaacttccttctctgtcagtgcgacctttccccgtcgtggagactcctcatcccgggcggggaagtggaagcaagtagtttgtgagggagatcttacaacctgcacggaaattattttccaagggggagagcggacagcctcataggttgaaaggatgacttgtcagaggccacgaggaacgtgaggcaggatagagccgctagctgttgaattagtgctgggtgactacagtgtgcaatattcccgtgcccagcctattttctggattccttcgtccgtcttctgtagcaggaaactgcgccctgtaacgttgttaccgaacttacatggtagttattctttcccagcttcctcctgtctaatctgcataatctgattttagttcctttgtatttatagttaatctgaagagattggtttggatgagagatttaagagcaaatatgttttataaaacgatatatacatttgacctaatttttttacatcatctattgcttaactgttacattcagtaatcacagaaacgtctgatgaatgctgtcatgtaattaagagctcaaagtttcttttaatagtagcgacttgtactaagttccccagtttgcttccactcctgtctgtcataatttcctctttttaaaatttgctcccttggcatctgtcagctgggacttttcccaccccttctgtgcgagttatttaaagcttgagatgaatgtggtcctttcatctgttaatacagtgctcaacacgttcagagttaggtggtgcaactcagaatcttcaagaagtatctaaacctgggaatggtgtccatagagttttctggaacagcaaatgcttcaggctttgatcccgacctttggccatatatctggaagaggccagggttgacggaggaggtggtatgaatcaaaaaaggtctagggctctgaattttattttcagttgttttttctttttaacgtgagtactcgatatgctgaacaaatttctgtaaaaattgggtggcccatttatgcgtgtctgcctttct

SEQ ID NO: 42935 - DNA, 396 bp, Homo sapiens
acagcccaggtacatcttatgtattctaaaggttgaagaccactgagtcccctttatgtgctaataggacaaacagatacacaaagggcttatcataacctcccataattgatcttaaattgatctctctgcttctaaccttgaccccatccctacatacctgcttattccgtaaacaacaaaaggatttttaaggcataagtcagatcatgtaacttctctgctcaaaattcccccagagtttctcatctccctcagtggcaacaagcctagaataatctccctgctctgcctttctgactcatttcctaccactctcctctcccctcctgcttggctccagccaccagaccgcctcctcctcacccctggcccacctggtgcagcagaaccttc

SEQ ID NO: 42936 - DNA, 626 bp, Homo sapiens
gtacagtaatgtcctaggccttccctttcactcaccactcactcactgactcacccagagcaacttccagtcctgcaagctccattcgtggtaagtgccctacattggtgtaccacttttttatcttttatatttttactgtaccttgtgtatgtttagatacacaaataccatcgtgttataaatgcctacagtattcattaccataacatgctatacaagtttgtggtccaggagcaacaggttatgccatacagcctaggtgtgtagtaggctacacaccgtctatgtttgtgttgtacactctacaatgtttgcacaatgatgaaatcccatgactcatttctcagaacatacccctgttgttaagcgatacatgactgtactttttttaaaaagtccaaggatatagatcagtatttaataagcatcaaggatatatattggtactatatattttatatttaagtggaatacatatgtatatatttcacaaaatatatttcaatttgttttgagacccctatcccttcacttctaaaatagtgactctgtatctttaaacatgacaagtaaaacaccgttttcaaatttttgtgcaattgtttcaaatcttcactggacag

SEQ ID NO: 42937 - DNA, 629 bp, Homo sapiens
cacttcttaacactggctccactgggggccaaacccaaacatgagttttggtggggacagacccgactcagatggacccatacatcattttccattctcaccaggaaggtatgagagtctagttgctctactttctcatccactcttggtgtttttatatttcactttacccattctattaggtatgaagtggcatctcatgatatacaaaactgtgagctctacagtttctgctgggagaaaaactaacaaaatcaactagtgtagggtgagtcacaccacgatatttgtaaactggtagatgaatcaacttgcgtaacagctcagtccaaagtcaacactaacacagagcttccgaaactgttgtgactgttccaagggctttgtgaatccattagctggaaactgtatctgtagtaatttgtgaatcaattgtttgtcaactaaattaataaaattataattttatgtgggtcctaagtttttttaaacgttagaaagggtttcttatggtggctaagaacacaggccaaggcctgggttttccctgcagtaataactgttaacaaggttttgtattaaatcatattatgtgagaggtttagggcttatttattcattattcaaaa

SEQ ID NO: 42938 - DNA, 3100 bp, Homo sapiens
ggcaacagggcccagaagtttcagtgagccagtcctggcaaacccaaattatgaaaaatataccctctgcttaaagattaactacaaacctaccctgggaccagcttgcttcagttaagtttaaaatggtgcctaaattgaaatgaaagtctgtagcatagataaagagaaaaaaaaagtcaaatggaaaagtaaatttaaaagtttctatttccaataaactgcgtctcagaaatcttccaggagataaagactcggaagaacagagggattgagacccattcgcattctctgaggcgtgcgcactacgcggaaaggatgaatgaatggaagacgggcgcgtgtgaaatgcagcaggtccggccggcaagccgaccggctacagcgatctgtaggcctcgctcctcccccttccctcctccatgacagcccagtcccaagcatggaggggcgaggacaatgtgataccccttctcaccaccaccatccctcattctacttggagagcttcaccgtgacacacgagtgttccttcccaccccagacctttctcgcttcccctggcgcaaacaccggcaactctccggcgcgctggattaacagacgctcgcccctctcaactcccctaagcgaggtcgaagctcctccgcgcgtgccgcggcaccactcccgcctaacccaccctccggcaacactcgcccaccagctccccagtccaccggtctaaggaagacgtgcgcgcgccccgcacccgagccccggagctggggttctgcagggagggaaaggctgctccagggctccctcctccatctcactccaggccggctcgccgcccaccctgcctgcggatcccagtactcgctgggagccggccctgcgccttcctatcatgaagacaccatcctcgcatacccagcccagaaccccagctaccctccaccctgtagacacctcgcggttccgcaggaggcgccacgccgcccctcccccacaccgctcccccagttctcgggcccccaccagaaagtgtgcgctacacgccgcctcggccatcctccgggacgtccccacttgtccgcgggaggtcaggtccaacatgaaggggaaggggcggcaaggggtacagtgcgcgccgggaacgccgtcccgcggagtcccccagtcagaaggaagacggagcgcggggacccgtgggggtgggggccaaaggcaatactcaccggttcgacagtcgccatcttagatcgatctgatcgcacaaccgctccagaagggggggtaagaggaaaaaaatgagattcaaaccggattggccagcttctggccacgtgacggatatgtccgtttggccctggcggcacctgcgcaagactgcggctgcgtgagtaacgagaggcttctgggaagtggagtctctcccccaccttttttttttttttttttttaaggtaaagaaattttttttaaaaaggactggtcacgtggccgatgggtagggtgcgcggttctcaacgcggcggacactcgcttgctggagggtggtttcagtcctctgctcttccgcctggatagctgcggtcacacttactgccaggcaagcctactgtgccctttgtcgccctgtcctcccatcttccccggaaggttgggaactgcaggctcagcacacacaataaggcttcatttgcttagttgaggtcccaggacaagttgcctgtgtgtttatttagttttcttttgatctcccaccattttctcttagtttcaaaaagaggcggcgatgcagagtcgtttaggcaatcaaccctcccacgtcccctggctcagctaatgctggtggtcattcgttgccatttctgcgaaaggggacggacggaaccgcccgcagtacccgcttgccaccggctggacgagggggagggacgacagcttttactgtcccaaatcctgagattaagacctcagggctaaatcttgcgtggcggtaaaaattatttggaagttctgtgcaaccgttccaatattccgcttttacgtgcacggaaatagcctaagtccagatgccagccagggaagccactccgggccccgctgactaagccctggactgatggtctggagtctttaggccgggtcaactatgactcttgacgttgactcattctccttaggcgagtgacttaatcgctcggcgtctcagcttttttatttatgaaccaaaggtgatgatacacttacctcacaagggtgtgcttcgtaatgactgtaaccggctttgaaaatgcatcggactctagaaatgattcataataagcaactgcgtgccttcctaaagatcaagtgcttctgctttttttttttagcaaagtttaaatttttttctgtttactttgtttgattatgatgtacaccagtgtagttttaaatgttcaggaccattttttttcctttacaactgcagctgccctcaatagaggctttaatgttcatgaaattattgttatgctcacaacaatcactggcaatcagaaatttgtccccacactggcatcctacatttcctttccctctaagatactgtgctgtcatttctcaagaccgtgttttttgcacagtttggctactaataacaacaaatagagatgaagaaatctagtagactcctaaggttctaatgaagaagacactgtctcattactatttcccatgcttttaaataatgttgacaccaggaaaaggagtgtatgcaggctgcctgtgcctgtctgcttatagtgttaatgaggtccagagctgtgtcatacctattattgagtacataatggatgcttgagttgactaacacataattgaggctgtatgagaactcaaagccattgcctgttcatatgttttggtttacctgaatatcagaagtgattaatgaaagcttttgtctagtgggcttagctctactaggttttaaagtagatagaattaacaggccaggcgcagtggcccacgcctgtaatcacagccctttgggaggccaaggcgggcggatcacctgaggtcaggagttcgagaccagcctgaccaacatggtgaaaccctgtct

SEQ ID NO: 42939 - DNA, 971 bp, Homo sapiens
taaggtatcagaggaatctgagacaagagaaagttggctggagatagttaaaatatttctaaggcccagtctcttgagatagacctgtagccaataatttacataataataacaaaaatgacaagggagtgagtaaacaagtagttcacagagctaaaagcaaggcatgatgcaaggtgtgaatggaattagtaagtaaaatgtgttgcctgggtatgtagaatttgatatttgttttaacaaatttaaaaactgtcagctgctactttaagtggagacagaatttccctttagcacatttttattctgagaagaatcacagtagtggctgcttttagttatgtaaatgtatgggcaaaagcataattgcaaactagggctgctggtagactgctccacttctctaattctctcttcagcagccaagtagcttggtattaggatagtcctcttggactagtaagtttctaggctttttaattaattcagagggaaatgcgacaacagaaactacttccccaataatgagtggaaagtaccaaaattaaataaatataactgaggtgtaattttagggaagaacaattggattgtgatttcaaccaaggaatgtaaaactatgtggttgcaatatattctgcctgaactaaaaaagtgctttagcagaggaaaggaaattggtagtagtctccctgtcatgttgaaaaggaaagtccagaaagatttggctgtgtgttgcctgcactactcggggccctagaatacaaatatggtagctgactcatggggtaagtatctccctatgtcagactaggaaagttagtgacacttatcattattgaataggttataaaactcaagaacaggacaggtgtggtggttcatgcctgtaatctcagcactctggcaggccaagggaggaagatgacttgagcccaggggtttgatactagcctgggcaacataatttt

SEQ ID NO: 42940 - DNA, 2272 bp, Homo sapiens
ctgggattgattacaggcgtcagccaccgctcctagccaaaacaaagttcttaaaaataaaagtagtatgagcttttctggtgtattaagtacggagaagttaaaaaaatacaataacaaagttcacagccttttgtgatcagtaaatgttagtttttcgctcttccctagtgacaaggaggcactcaagcatgagttacaacacaaccgacctggaatacagctgaaaagattgaagcaacaggttcgcaggggaaggcctttacagcttctttcgactctgacatttcaggatcagcacaattctcccctatttactgctgaagcaatcaactgggattatacaaaaaaattatttgtattgaatacctgacagttgtgttactattactagcactatcggttttgaaggggaggtggtggtgtgtggaaaaaaaaagtctggcaggagggagggcagatgtgaatcccagcccaccgtcccgttgacagctctatggctctcctttctgtgaatgagcggtggtccttaggcctcagacccgacaatgtcagtgagaaacagaacttaacccaagggactgttctccaaggagcggcgggggaatccaacgcagaggagcgcagcgccctctctagcctcctgcgggtgtcggggatgatcagggctcctgggtgttcgtcagtgaagacgactgtcttatctgactgtaggcacagagagtgcgccgcgagagggcggctcctcaccgtcaggcgccggcaggtcgcgttctctgctggccgacgcccgaaggcgccgaatgggggggccctgccgagctcccttacagccccaatgtgcgcgccgccgggaggcttgggcacgcaggcaccgccggcggggggcggggcgaagccggcggggcggggcaccagctgcgcgcgcggggcgggggcggggccggggcggggcgcgctgcgtggtcccggccggccctggctcctccccctcccgcgcccaggccagcggcgggcccagctcctcccccgactcggtctctctcccctcccctccgcccggcagttcctccctcccgccgccgcctcttcctcggtgaggcgctcttccagcgggcaggcagcatggcggccgtggagacgcgggtgtgcgagacagacggctgcagcagtgaggccaagctccagtgtcccacttgcatcaagctgggcatccagggctcgtacttctgctcgcaggtaggcgcccgctgccccgcggatatgccgccgctgcgggacccctcctcgcttctcccctgctggctcctcccgcccttgcggcgagtcgggacgcgctcctcctcttccccccggccgcgtttcctcctccccccacccgcgtcgccaccgccccctcctgcctcctggggtccctgggtcctcgggaaccgcgctgggctcacgcgggggcgggggcgccacccgccgcggccatgtgggctggggcggaagcgggctgtgcggggtcgcgtggccgcgctagacctccgcgttctggggccggttccccgcgctggggcgggggccgccaggtgtgcgggctgccggaggcaggtagcggcgccgggaaggagggcagcccgagcgtcgcgagcctccacatccgcagcaccggcggggctcgggtctgggcgctggaggcgccgggccgtccgtcgggtccctgcggggtggggggctgaagctacctgccgggctctgagagatgggtggcccgaggaccgtcggagtcgcagagaggaggaacgctagctagctccagccccacttctttgtgctttactaccgtgctttgacacttaagcaactttgggggtggggaagggagaggtctgtgtaattcattcttttctttcggtatataaaattattaatttacaaaactgtaagctaacgggatgagtcacctgtgactgaatttcccagagtgaaaaggacagttccattgagggttaggcgtgaatgctgtagtgtattttaagttttgtgcagtagagcaaacccagcgttgaatggggtccagactgaagcgtgtgctcgtgtttctgtttactgaagagtactagtgttgctgctgcatttcgagacccaggatgagggctgggcggcaatagtatggctcttagttacagtccaggtttagtgaagagaggcacatgaatattcaaatattaaattggtagcgtcctgtggggaggagagccggaataaagagaaggcctgattgggg

SEQ ID NO: 42941 - DNA, 3001 bp, Homo sapiens
ggaggctgaggcaggagaacggcgtgaacccaggaggcggagcttgtagtgagccgagatcgcgccactgcactccagcctgggtgacagagcaagactgcgtctcaaaaaaaaaaaaaaaaaaaaaaaaagaatatgaagtccctaacacaatccttggcacagcatagctttgcaaaataagttagtagttattggtagcaacagaacaaacggttgagggaaaggagaggtgaactacatagagatataaaaaatggcctctgtaggccgggtgcaggggctcacgcctgtaatcccagcactttgggaggccgagatgggcggatcacctgaggtcaggagttggagaccagcctggccactatggcgaaaccccgtctctactaaaaatacaaaaataccgagcatggtgacgggcgccggtaatcccagctactcgggaggctgagacaggagaatcgcttgaacccgggaggcaaaggttgcagtgacccaagatcgcgctatcgcactccagcctgggaaacaaagagcgaaactccgtctgaactggcgggggaggggggggggagggaaatggcctctgtaaattggtgaggttggaaatgtggaaatgatcgtttttaaaattaaattgcagatattaaatctcatagtacaaagaatcagacactgcattagaacctttttcatttcaatgtgccataaatttcaactccacaagtcagattcagaatactaacaattaagttatgcaacataggaatccaaagaaacaagaatactaaatttgatggcctgctcccctttaaaaaatgtcttaatggagcctaaccttttccttttactgacaattctaagcaaaacaaagccccactctaaatccgcgggaaatggccctacttcaacatttgaactatagtaacaattataatctttcaccttctctgaataaagacactcagtaataaggaaaagcaactaccagtttaagtctgaaagactgtttagagtttatttctttcaaactccaatatgtttaaggccatttgtcttactagaaaatgtccaaaattgcaaaacattaaaataatcagcaactttagactgagtatgttattcgtaatttctgcctttctttactgtctaatttgtattttatgaatttgtcatagaggagcagacctgggtcggaatcccagctcgccatcgttggtgtgaccaagcacaaccaacctcaaacctcagtttttggtaagatggggataacacctcgcagaggtgtttgttacgtgaggactagagggaatataaatctcttggtatttaagtgctcgaaaatgtttctgaaagggacgtaggggtctttccaaaatacactccttggaggcacaataattaaggcgtaggctcaattatgcaacacaagcaacctaggagttagaagcacgggatctggctgcagctctgccaagtatgcaagctgcaagaatgacccagagcgagttacttaatttcgtgtaagaagcaatgcgtggccgctcctaagccatttccactgggataccgacctgaccagcccctgccccccactctccggctctcccacccccccaccccgttccgactgtcccagaagcagcaaagaaagctgcttcccaactgaagagccgagacaaagcttccttctctttctgcccctctgagccgctcgctgggggcccagtttcagaaccaagagccagatcccgtcttgggcgccgagcctcgcgcgcccccgaggatagcagcctagtcccatgccatgcactccctcccttggactcagggccctccgctcaacgggccctacctcgttcgccatgttcacggattctggtcggcgcggggggctgacatccggggtgggccgcgcagcgacggaggcatgggcgtggcgagcgcctagcgaggggggcggggcgtggggggggcttgcaatggctccaaccggaagggcggtgctcgagctgtggtgcgtgccgctaagttgtgcgttccagggtgcactcgccggcgaggctgcacggcgccggtttcattgctaaaatccgacggacttgttgcagaactcgttttttttgtcgggaaagggcttccccgtgtaactttacagcagttatcgtagataagacttgcaaattacagatgtggacggtgagggaacgggaatttcactgaaagcgcctgagaaccagtaagagacctgcaacagctttgtgctccactggcgaatgcttcctcccctaatacacattatgtgtgcttggagacacaaggagtaagatacagcccctcaagggactcgtcatagggagaggacacagctttgggaataaaggggccacaaaggaggagagaggagtttgctgaaacttcccaagctcccattccagcagttcctgaagggtaggtaggattttggggagacagtagaacgtgggcagagaactttggaaggaggagatgaggagaacaaaaagtctcctgatcctggacagttttttgtgttaagagtgggccagagtgtagagagagagaatgtagtatttgtcggtttactctttctttgtttgtttgagacggagtctcgcactgtcgcccaggctggagtgcagtggcgcgatctcgggtcactgcaacctccgcctcctaggttcaagtgattctcgtgcctcagcctcctgagtagttgggatcacaggcacacgccaccacgctggctcaattttgtatttttagtagagattgggagtgggggcagggggttggtctcaccatgtatgccagtctggtcttgaactcctaacctcaagtgattcacccacctcagcctcccaaagtgctgggattacgggcatgagccaccgcacctggcctgccagtttactcttaaactctgttgtaaacgctgaattttgttaaaatagctctgtcagacacactgctcttttctgtc

SEQ ID NO: 42942 - DNA, 1193 bp, Homo sapiens
tatttattttgtttcaaatgaagtatatattaattaacaggaagtttcaaaatgccaaggcctatcaagtttttaaagacaaaaaatagaataagattcatctgtaagctcatcacccactttatgcttttgatgcagattcttcgagtatccccaaataagatacattgtccatagtattttgtaatatactttttctactattaatatactgtgaacattttcccatattctcctgcaacattatttgtaacatatgcatattatattttatggttacagcacagttacttaaatctctcttcttttggccatttaaataatattaatattaactgaacacccttctaataaacattttggcaatccacagttaatttccctagaataaattcctggcataggggtcactcatatccttttgatcaactgtaagtcactgcttcctgagttcctgaaggaagctccttttagccaaacatacaaggacacagaaaagcacaaactgaacaaagatacagcttacttgcttactttgcccttggtgcccatttttctttgggaaactgtgttggaagtttctttctgagttaagaaagcttcaaactcctacccagggagttccgtgtcctataatgagctgtctttgaataaataccattcatgttgcttaattctccaatcacttccttttctcctttgttgctgtaattcacagccctgccggcctcttaccacatcatttgtactattggacttcagctgcaaacctcattgctcccagtgagctccaagattttttaaattcttttttcttttattgaaaaatataaaataatagagaaaagcccattaaacatataaagatgaattaacaaataattatgaagtaaaggaaatttctactcctcagaatcgcccatttaacttacctgttcttctccttcacaaccctgataatcacttccttgcatatttagtggtttactacctatttaagcttctctatccaatagtttaatctagcaaagcctttttatgaatggaatcatagtgtatgtattgtttcatgtcttttttctcccctctactctatgtgagaatcattcacattgcctgtggctgtagcttattttcattactctagaatattccagtgtatgaattgaacataatttattcatccattttcc

SEQ ID NO: 42943 - DNA, 1742 bp, Homo sapiens
atctccctatctttcctaaaccattggcaaagtctgctatccactggggccttgggtcggtggtgctttgggaaataccagaagagggaaagtacggcaaatgtgcagtgtcacagatgataggaggaaagctggccagtgggatgattaaaacaatttcggtgggagtgggaattcagaccatgtaaatggtctgaattaagaaaatttcaagaaacaaaaaatgtttctaatgagccaaagtgaaagctcttcatgatttctttatagaggctctctagtgcttgtcctaatttcctgaaatctcatgggtatcttactctcctggtgcccgcctcaaacattcactgtagcaattatatgagcagcctagagaatcccaatcccagtggtcttgctccctggatctactttctcttaaaaatcattcccctaagtttccgtcacttggttgaagtttagtagatatctccacatctccagctagaacagcaccagaatttcaggactagggcaatagagtctgatattaaattctatttctatctatctatctatcatctatctatctatctatctatctatctatctatctatctatctatctacagaacaatttgtgggatagtagctttggggtcccagatctaggatgggcctggtcctccatgctggttctcctgggtgatatttctgttagtttgaacagtaatcacacttttattactgtttcatcttttttttttcactcttagactgattttatcatgtgtataaaacatacacacacctacatctcaaggataaacattaatccttgaaaaatatgtggtctaaaactatattgaggagagaaagataggacactttaattgccacatgattaacacgaggtcaccacacagctttcacaaatctacaagtcattctatttaggctgagtcaagttctcccttgggccagccagagcacaaataatggagcaatgtgactcttcaatgacagatctctgatttccagaaaagagactttgaaatacccaattctagtaaatatgcaattaaatttccagctaaatgacctttgctcctgtagtcttcatcttggggaagggaaagaagtcttattctgtttaatagtttgatttttataatagggtttgtctctgttataaatcttgtttgatatttaaaatgttagctaagagaaaacttctgtttgtttttatttagtgggaagaaactaaccctcattgagtgcctagttaacatcaggcactttgtacacataatcaattgaatcttgaccacaaccctgtgaggtaagtattatgtaccatattaacaaataagacaacatgcttaccccgtttgatcttttcagtgtttgttagggaagcagaggtttgatttgaagtctgtttgattacaaagttcatgtttgctgtcaaattgctgatcttgaaagttttaggatgttcgatgaaatttgggctttgtagtctcccctctcttgctgttatctgtaaatagaactttgagaaattgttcagttttatgtttgagagattgtttacatttgagattttgtactgttattgttgtaaagttaatggttactctatcggattactactttaggtcatagttagaatgcaggaaaaatattttttcatcattagatgagtatctgtaagtcaacaattcatactaatataattattttagtattgagataccagg

SEQ ID NO: 42944 - DNA, 1212 bp, Homo sapiens
ttcctgaaagcctcttcaattatcagtatacagcttctgcagcagggacgacccttcttctactcccaagccaatacaccctttctcttggtctcaaacacacagacataaaatttatgtgggcagtttaccattttccagttttcattaattcaactgcttcattgattttatcaagattcagagtatgagtaattagtggatctagattcaacttctctgccatataatcagcaaccagtttagggatgtgctgtctgctcttccagcctggaaatacagattaatgatgaattttacacatgaggcttcattataaaggaaaggtcattcaaagtaactgctgaagttgttggctttgactgagaaaatctaagcctgtcccgtttacttgcctcaatcatcaggagaatgcctaccccaaccacacacattatatagagggctgtgttcctaaaggagacttctggtactacagaggagaattaattcaaagcagatagaatgtggaccttgccttgagtgttcctggtgtcatgttgcaatctctggggagcagtgaatctatatctaatgtataacaaaggccaaggtcttgggaatcatggaaagaagcaattcaaatgttaaatatagcacatttttttgtgtgtgcattccctcatgtgtatgttttgatctgccacttcataaaagagtcaaatagcttaaaggaaaagaagaactctcactgtggcagcagtcccagtgaaagctcttgggaaaagaatgtgtacaaagcaatataagaataaaatgtgctttctggaagtaagaattgaacaagcaaagatggagttagctaaggtaagatgtagtttagcattgtattttctctattcccgtgattttcaagaaacacattaaatttagcactgtgctaagtgccacgctcagtgagttaccacacagactttggcagtctgctcattgctagaaagggtgggtgtggtgtaattgtgcaaagtataatgtggcgtaatctgcttagtgttctatgcggattattctgtgataggatcttgacaattacttgcttttcttggttctagcttaggttaggctccccaacttcttctccaaactaccacaaactcttctaatagatttatttttaatttaagtttgtttctgttatgtgtaaccaagaatactaattactgttctatgtca

SEQ ID NO: 42945 - DNA, 1559 bp, Homo sapiens
ttcagcccccaaacatattctgaagcttcttgcatgggatattttctcagtctctgtattactccttatgttgttttatctgcctgcacacacttctcctttacctggtgaattcatatttctccagtgatttccccttcggtatcacctctgggaagccaagctgggttatgagcttttccttgaggctcccattctctttctactttactatccttgtatattgctttataattgctcttttataattattgtctctctgtgagatccttggagaaggggatatatctttgactctggaaattctgataaagggcttggacattacttattgaagagatgaaagaactgagggaagtcaaaagggaattaaggaaaaaggagaggaggaggagagatactatgattatgacagcctctcacctttaggagcccagagactagctgggtgatgagatgttggtaaagagatgagcacacaaactgacaaagatatgacacaacataaagaataagactgcacctacttggcctgtagtacacatgctgattttctccaccgcagatgaatttattgagaaagggagatcctgtagcaactttcactgtagaaagtacaaaggtacacaggcgactggtagatcagaaggctgggtcctgagctttctctgtagtctggtaattattaaacaggaaaagtaggctctcccgctgcttgatggaagttcctaagtgtaatctgaaataggctcatctcagtgaaagagcacaaaaggtgaaaatgcaaactatttttttctcccttaatcaaacaggtcccctcttattatccatttttttgagttttaaatttggacttttaaatgtccaaacttaaaatttctaacagagtgtacaaaagtatttcttttctgttgttttcaaaatacaaaaatggtcatatttgtctctaaacttgagtaattctttcaggtttctgaatgtaggccccttgttgacagataaggatggtgtcagattttctctagtagtttatcaagagctcctcactctttggtttgcagagctggttactcagaggaagtgaaactaatttgcatacagggcctaccaacttggatttggaccctagaaaatctccgtgtgtggacctgggtcttgacccaaggcccaaggatcttgatgaagaatggagataaaatacatttccaataaaaggcaacaccagtgggcagggtttagctagaagacaagagagaataagtaaatgcttgttctgtgtcaaatgatacaatcatatgatttttcatttttagcatgttgatatggtagattacattgattaattttcaaatgttgaaccagccttgcatacctggaaaaaaatcacacttgatgtataattcttttttatatatcagtcactggattcactttgctaacattctgttaaagatttttgtgtctatattcatgagagttattaatgttagttttcttctttttttggcaccatctttggttttggtgtcacagtaatattaattttataaaatgaa

SEQ ID NO: 42946 - DNA, 817 bp, Homo sapiens
agaatatagttccaacagtaatatattttttgcttacttttcctgctgtgctcatgttgattctgtcttctctgcagaccaggagactggtgagtccttgtggatttcttccctgctcaagtgcataaagcaggtgtattgcataggtatttatttattttttttgcttgaataacacccgattccagttccacacatgatctaggtctttaagccacacccattagattattcacagactgtcaaatcataaagaagagggcaatgaaccagcaatcaatacattgatttttccaatttcaaataagattttgttttcattaggttaaatattaagttaaagtgataaagcttaatcattttctcttctcctcactttattcctcatctgtcaaatttcttgtttctcctctcttagtcccacagtggtcattcaaagttctgttttccctttatctgcattaagctccagctttgaatccaaacggtgcagttaggaaggaggaagagcaaagaagccgggcaaataaagatgacagccaggagccagaggaatgtgtttggctcaggactccccttctcttcatagagaatcagatactcaatcacagcaaaggtgctcaccctgctaagcatttttgctccacctcaaaccaatcagcattgactgagcccctctgtgtgtcaggcactaagctgggtccagtggatggcagtgataaataagacattacctctatctgtaccagaggcagtatggggcaaaggtgatggcatgctttttgggacctggcagaccctattccttactagctct

SEQ ID NO: 42947 - DNA, 926 bp, Homo sapiens
ttgtgaattctcagctcttaactcaatgagtggcacagggtgagtgctcagatatttgttgactaaattaaatgaatgacatctaatttgagaatgaggaagccttgaaagaaagatattttattaagatttattaagaaagatgagttgcagttgagaggtatagatgcagtcagcatatggacaaagaatcttgaaaacatttttctcccctaatacccccttttatacatttttctgtttaatcctctctcacacctgtagacatagcatttcagggaattatagccactaccaccttgttttcaaggccctaatgaatttggaaatgtgatatccacttatgagcttgcatcactttgtgaacacatggctccatgaactgccaaaagaactttggcacaaacttcatagagtcaagagatctttcttaataccatctggcaactactctgtgcttactctttgccccaccttctaaaagtttaaatggaggggaagagcagttgtcacatgattgagtgtcagtgttctagtatcagagggccatggcaggcctgtagcaacatctggaatgtccaaaggtaaccctgtcactctctaggggtcacagggcatcactttcctctgtttctctctctgtgtgtgtctctgtaagccagcccgattctatattacatttccaccaactactatattataaatgcagcttatccagagagatgatatgcttgcttcagtttgggtcagcgatccccggtgtgctaggcagaataatggccctcaaagaggtccactcctaatccctggaatctaggaatatattgctttacatggaaaaaaacgaattttgtaggtgtgattccgttaaaggtcttgagatgggaagactagcttggattatccaggtgaacctaatctaatct

SEQ ID NO: 42948 - DNA, 873 bp, Homo sapiens
catctaatttagatatgaattttaaattttaaattattcattattaatactgtattcctttatttgttatattgaagagaatatattatcaacagtaatatattttttgcttacttttcctgctgtgctcatattgattctgtcttctctgcagaccaggaggctggtgagtacttgtggatttcttctctgcttgagtgcataaagcaggtatgttgcacaggtatttattttgtttgctcatataacacccaattccaactacacacgtgatctaggtttttaagccacacccgtcgtattcttctcagactatcaaatcataaagaaatgggcaccgaaccagcactcaaaaccttgacttttccaatttcagataagattttgctatcattcggttaaatattaagttaaaacgatacattttaattactttctctcttcctcctctctcaagttcctgcttctcttctctcaaacccacaggggtcattcagagttcagttttccctttggggtcattcagaattccgttttccctttgtctgcactaagctgcaattttgaatccacatggtgcagttacgaaggaggagtagggaaattggataaacaaagtggaacagagagagctaggagccagaggagtgtgtttgatacagcactctcctctttatagcagaaaatcagacaccccatcagtcacagcaaaggggctcactgtgccttgcatttctagtccactcaataacaatcagcattgattgagcatctccctgtgtcaggcactaagctggggctgatggggtggcagtgataaataaaacttgactcttacctctgctgagaggcagtatagggaagcggttatga

SEQ ID NO: 42949 - DNA, 4771 bp, Homo sapiens
ttgttctatatcactgcagggtgatagagttcattgaacactctcatatcagtacttgatagaagtactgaattctatcaaatgaattcaacaccgtgagaatgaattcaacactctcatgtctcataccatgagagtgaattcaacactctcatatcttctgtcggtacttgatagaagaagtagaaagaaaattaatgaggatatactagacctgaataatacaacattaccaaccaacttgagctaattgacgttaactgaagattatattcaatgatgaaatgatatatattcttttcaaatgacttggaaccttcatcaagatggacccagttttacaaaatgacactcaaaatgtctgaaatgattactatttaaatattatctagttatcgaagatagacttcattcaccctaattctgctaagagtaatttttatgattctatcaaatcaattacactgatcttttctctttctaatcttatactagcttgtatgatccacaaagtagcaaaagttgttattctgtattactcttttaaattgctacaatatttctgaaataggtcaccaacgtcagagctattcgttaaaaattaacatgaagttctagttcttgaaactttgaatttttctttttctgaggaagatttttgcagttgattaaatctgggttttatcgagggtgcccatgtgtcccaattctggttcgcatataggtataagtaaaatgattatataattaattgttggaactggaacatttttgagactgaaaggtaagtcattaataattactttgtaattatattttcagcaaaccaagacatatcattacccatccataactgttcaagctggagcatgggttttatgtggtatataagcttatcaatcatataaataccactcagtttttcaagggagtaactagcatgataagcaaaaaatccacatccctactactgtgaacagaaaatgtgtatattcacagagtgacaattttggggagactagcaaaaacagaagttcttgactctagaagtcaaactttttattgctaggaggcagtagggcactcagatcctatacaccattatattaaattactaaaggctttgatttcaactcaactccttccccacgattgtaaataacaaaaaaagtgcctatcctggctcctcaccaatatttatcttagaagtggattaggagggagtaatttaagcattttatgaccacagtatatgaacatttagaactctcttcctttctctacttctcatatagtaaaagatcatgaaacaatgcccacagtgctatctcagggaaaccctgaaggcctgccttgagtcctgaatatctcttttggtctttgacataacaattataactatattcttcaaagaccacaaagcactttcactaatgtggtttcaatcttcataaaaaggaagagagttggtagagtaatgattagtttttcattatttcacaaatgaagaaacattatcaaagaggtcaaggtcacacagtaagtggtaggtcttttttctttaatttctgtgtctcttccatatacaaaatagttgctatggaaactagatttggttgtttttgaaatatctttcaatataacactgttcatcatttagcattaataaactcaccctgagatttataattaatatctgagtcttccctgagagcaaagtatttgtaatggctaaaaacaacaataacaacaacaaaaccagggtaaatcaggtagcttagtagaatgttgaatcatgaaagaagtaacaacaaattgcatgcacttcacaattttttctcatacccttctttactgggactaacacttgggaaggaaccttaatcttagtgctaaagcaacagcttaggttttagtatttctcttgctggagaactctactgttgaaggagataagtcattttaagcatcttgcttattttttctcttctttcttatttgggtccttcttttatttaataagcaattgtaatgtttaaaaatgtaagcaatctcacatatatgcagccaagatatgtttctaaaattatgcctaaaaaatgtaggttattacaatgatgtaaataatccttgtgctctttatcttttgataaaaagaaatgctcagtttcccagagtcttcctgttccccaattctctcccagggcatctgggggaaggaagactttcccacctccttgcctaggtgaagatcagctcctcatcacttgtgatgctcctctttccttcagtcttcctgacaatgcctctctctgcctgggtgctgctcacctactgtacttgtagcagagggccttatctggtggagctcatggtctggtttattttggttggccagagcccagtgttgctctactgatcacttagctcactttagctctagttatcacaacaaaccccatgtctctcttctggcctcctgctctgatggtccatctcaagctgaagatcttgatacatttcaccaattcagaccctgtgaatgggaatgttatttggctctcaagtcacctgattgctcagtcattcccctttgccctgcttgctctaccctgcaaaaaggaaatgagatatttaatttctgccttggccttgtagtgatggaaagctgccttgaaaagctaaactccatgcctaacttctgtctaaccacactttgttgccacgttaaactctggtatgggtctgccctagattgggcagaagggcctgtggttgggctatttacatagacccaaataagactccatagcttcctcttctagagcatcccctctttcctaacactcattcctggctaaagtcaagcagaagacatgaagacatttagatatgagtattttctacttctccttctccctttttccctcccattccacaaccccctactaccagagggatggactttttccccttcctctgtgtcacattctcttcttatcatcatacagcaagccctggcagtcacaggcagaagggataggtgttaccattgtgtcagaaatctgagtcttcttcagcctttaagaaaaaaaagaaaaggaatttagaaaattctctaccctaaacagcttggcttttaagcttattgtcttgcttcaaagtcctattttaaacatcggggagtaaatagcaataatcttgatcgatatttctctggccaccaatcatatgaatgtttcgggtcaattgagaagaaggtcttagaaggagataatgtcatagagatataaagaagtttaaaccagaaggctagccttggatctgggtggaaaattccaatgtcatttatatttacttttattgccaaagctgaaggtcatggttgttgaatgaaaacatctgtttactctctttctggacacccatttctaccatcactctttctgaactttgttacatgtttactgaataatttgtagcactcttataacttcagggtaccacgtgcaaagtaagtgaaaaactcatggttttttaggagtcaagcactcccagacatgtgttatgcattagtaaaaacacgcagtcacgcttcctgtgcatgtgcaccatgtttgcactgcagccaaaagaaaaggaaaaaaaatgcttttcgttctatgtggacatgttccaggtagaatgacaccacacatttcaactttatttcaaaacttctgcctttaaaaggaaaataaagaaagaaatgtttattcttaatcttatgggattaaaatctacctcgaacaccacacagtaattggaaagacccaaaggaccaagccaggtgcataagccatggggtcagagttgcctgttttcttctgaattgttatgattagaataattaaacaaggaagtttaatagcaatttaatagcttgttgacaaagttatacaagctaagtttaatatctgtttggacacctcatgtcaaataatattctcaagaatctgaaaagttcagtaaagttaattgtaaggccaatttgtaaaagtcttctagaactaaaaagataattaaaaagaatatgtagaacaagaaaatagtaggaagcagaagtaaaataatataatttttttctctatcataaacttaaacatctgcttccatatgtttattctataatctcagaattacataattagttactctaaatgtaacatcaatattacatgatattctgtaaaaaatataatgaattctaagcattatgtcttttgaaaatgagaacctgtgctttataagactttttggactttaaatctctgtaggaaaaataaaaacatttccattgtactttgaggattttttaaacaaaaaattacagctagatggtattatttagtctaaattatttcacacatgataaaattaagggccctctgagattatgcaattttttcaggtcacatgtagttggtgaaatatctagaatgggaattctgtattttcttatatcccttgctaatatgggggtctgatcacaggttccttaattctctaggttattgcgtatttggattaaattactgggttaacatgatagatgaataatcatgcctcctgtgcctccacccaatgaagccaacaattactacaaaagctagtatccacaatataaattcaaaggccatagtcagaatagatttttcatctgtattgagaagcacagtttttgaggcataccacatactctagcttttgaaccatatgccaaaggaaatat

SEQ ID NO: 42950 - DNA, 3398 bp, Homo sapiens
accgtagcaaacacctcacaggtagaactagcataaggactctgggatgtttattcatccaaaagggtttctttagggcctgagtactccacgggctacacccaacatataactaaacaagacagtcatgtgacatttagaacttgatccaccattccacctgtgcagcatctgaaaatctggtgagtggaggtttaaggaaataagttggagcagcccatgtattgcagcagttcccaagcactgaaagtagtaagactcttactttagttcactggagactgagggcatcagattctcccaccttcggcattagctcccaaggctgttctcacttccgttcatgggatgcagaaaatactgaccccagcaggaggcagtctccttctatgtctccaatgctacagagaagcaccaaaatcataaggatccaaatgctgaaaggctaatagaaagaatccttcaacctgatggagagttgcgggcatatctcctttatgtccctattttttcagaagagcattgcatgccctgctcccaacctccccaaccccatttctcctgccttagccaaacccatgtctgagctaggagaagaaggtgagctcttttgactatatataaagccataataataatattaaaaagttcactttggatttctatcaccattccttttcaccatgtggtaagcagctaaagcccaaaaggacctggggcactcataaccacatgcttcacatgcatcactcttctgctggaaccaaggcaaaggagctccactggcaccccaaaacctcagttgagaccacttcttaaacactcctttcactacccctgtgctttaacatgacttattttctataaagttgtaagaaagtggtaagattttcttaatcaactacccctgttgggggggcccagcccataaggaagccccttcttttaaaagatctgttactgtaggctttgatcatcactttgggaatacttgtgaaaactgttagaagtttgtcctggtgatttttaccatatttctgaattctgattctgaaagctgagctaatcatacacgggattaacggtgctttaaaagttaatggttaatgattaaaacacttatgttcttgactctccctaaactgaattgtggatgcaaagttcaagagagagaaaccagtcaatactggagctgaaacagactgaaaacaaaatatgttacctaatgctgagcctgtaacagcaatgcaactctgaaactagatatggcctcatagcttcctggaatctgaaaatagttacctcaaaactcatactcaaaataatgccataaaaaatacacaaagttccaactttgtttctcaaagagcaagatttttcattctcatttttagggaaagaaaccatgtgttaaatgagaaaacagaatccagctactcaacaaagagtgggtgtgatcagaaggtgtggtgccgaatatcctgcttcaagtccccagcgtgtttcataaattagtagcttaccttggcagagaaaacagattcatttttcccagtaatttgccttttcgagatggaaatctccttttgagcagcacatttttctatagccctgaaaagaccaatttatatttaaatgcataatacactcagaatttaaaaggggaaggtagtcatcacaaaagtcaactgcaaatttcacattggctttaatttccctatagaacaccagtttatcaaatctgaagacttacttcatcagttcttgatcttagagggtctttcagctttgaggagtatcaggggcaaagtgctaatttagacaataaacaagcgcattgtctttctcttgctaagactgcaaagggtaacagtatgtcaaattgcttttcttctgactgggctgaaaaactcagtctggtatccctagttattttttacttaacagaagctcggcattaatgtgtggcttggttaatagcaatgagaaaaatagttactactttaaaatgttgtctagtagaagagttacctcaaaacctgaatcctaagagggggctatcaaaatgaaagagaaattgatgatgactcattaatgaaacataagtcattgaaatgtggtctatgatggtcagcctcttcctgtggttggtgaatcatttcaccagcaattctcaatcacatttggccactgctcctctcaggcagccccttggctatagctccactccatcacttgccagattctagtaacttccttgtcatcgaccttcaggcctaggggcaataatagcttcccactgtagcgaaaccctggatacttcaacatcccttattggagtgattaaccctgcctgtacctctggaaagaaaattatctcccattaagccctaacttgattaaacaggggttccctgctaagaccctgactgatacaggtcctaccttcaggttttccaccagacaaatcaataagcagtgactactcagcatgagtactactgtgatggaaattctagttctcagcctaatcagtaagacgttaaccaacataaggaactgagaaaatgtaacatgaagaatgtagcaaccactgaatgcttagggttgaatgaacaaaaccattctttcaacctacaattataaatttagaacctataggtagaggaattgtgtgcgggaattagaacacttaaaataggagaatgggatcattctgtgggattaaacactaataaatgcaaataaagtataaaaagatagacttgaagtcacattgaagatataagcaatctcccccaataattcccttagtatatgaaactgtaagcaagataataatttacatactgatcagatcattttatgtccatttttctcattcctaaagcagttcccagggcctgcatgacaaaagtgggaggatgagctttactcaagttgctcagccagtccagcatttctgggtttgatgtctccatcaagcacaaaattctcaactgtggccttattttctcagttctgctggaaaagagaagcaatcaaggcagttggaaaaatgtcccaagataggagtggttatttctgtttctcttcctagcgtcagcatgaactcactgatagctaaatgctgccaccttcctgccctcataagtactgcagaggaaaccaatcctgaaaggcccaaactggatggaattagagaccattattctaagtgaagtaactcaggaatggaaaaccaaacactgtatgttctcactcataagtgggaacgcaaatgaggacgcaaaagcataacaatggtacagtgaactttggggactcaggggaaagggtgggagaagggtggtacagtgtacaccgctcaagtgatgggtgctccaagatctcagaac

SEQ ID NO: 42951 - DNA, 677 bp, Homo sapiens
ggttaataattctttataagggttctatgtcttcaacaaatcttctacttatgcttgtatttgtgagacagatacatgatttcagatgagggaactctcacaagagaaactccagttcaccatgacaacacagacctcctgccactttggatctcaaaacgtcaggaccgttcgaatgctgaaatgtaaaatgagagtttttaatgacttgttttcatatctttcaagaaaggatagtttaaacaattgtcctttctatctgtcatagaaacttcaagtaaattctgttattggaaatcctctgggctcaaagtccttaacaattagttttctttgttacgcaactctgataagggtatctgagctaattctgaaagcatcagtataatttcagtatgccaacaagagggaagtggtttccaggttgaggagaaagcatgaacaagcctaggaacatgtgaacaggaaaggtaatccaatatgtttagatttctgggtgcccaagagatcctgcaagtagatgagacctacttccctcactttatcccaaaagcctgctgcagagggtgatagaatgaatgccaaattcttaactgttgaaacaaaataggttttagttcaataataaaggctttcaaaaccatgctaagacattggcattttggcaaaacttgagc

SEQ ID NO: 42952 - DNA, 736 bp, Homo sapiens
ctgacagtttttcttacaaaatcccattgtttacttgcttaaaaaaatgtatgttcataatatgatgatcctgtaggctagaccaaatgtggagacaagacacaacattgaaaaatctctcaggtaaaaaaaaaaattagtaaaaatttggatctcaatatacagttccttttactaatgaaatccacgtccttggcacatagtggaagctcaataattatttataggcccaatgagtgaaagtcatttcatcttgtagacaggctttttgattgctgtttgagacctccatgaggtagatgttgtagataaaatttgcatgaattcatacttgacctctatccttgcccaaccctcagaagcaacaagagtagtaatcatcacacccatgtttacccaaagcttgccaagctctgtcagagaagtttgttatatggtcaaaagagcacaagttttgcaattagtttatatcctggcactaccccaggaggtttgaccagttatttatttgctttcacaaccttggtcttcatctaaaaatggtaaaaataatacctggcttacagggatctgaataatgcacatttgagaaagcactttgaaaactgtaaaataaggaaattttgtggcttacttgaaataaatagcagctttatgatgaaataaaaatagccacaatgaaatcaactaggtaaacaaaatccaaaagattttaaaaaattgattaatatagtac

SEQ ID NO: 42953 - DNA, 902 bp, Homo sapiens
tgggaacaggtgagctcacagaatgactcttgcctgtggctagtgccatatataattatgcatgtttagtcatgaatctcctgtttccttggtttctgccttgtctgcccgctagattgcctcacacaacacagggtctcaaaagtagagctccctccttgaaatgttttgagatccaggtctttcttatatcctctcccctgacttatatccctccttctgttcttgttttgctccgtgtgaggagagagctcgccaacccatctgaccaacgaatttgggctcatggattaaaatggcaccacgctaggaaatgtgccagctaaagattgattctattattgggactttgagaaaggcatcgagtcagtctgaggcagtcataccatggttgcactatatgctgcctattctgttcctttggagagcccagcttcaggaaccccacctcagtttatgttaaaacatagccctgtgtaaatgtagctttctccatccaccccagtggaggagtgaaagtcaacaaaacaaattaggtaagtctaaattgattcagcaagacaggccaattattaacttattttgagtgcactatcatattggagtagttccttttaaagagaaaaatgagagaagactgagaaacatcaatgtttttaatactttgaattatcatgttataaaaatgatttatctaaaaatattaactatattttttcttcttactcttttaggtctttctagataaaattatttgcttagtcattttcagtttggttcattttcagtgtttcatggtgaaaagaaaacaggttttggagttagaatctaagcttgaccaggtactaactatgtaccttgaaaaaggtactgcatttttcagagacccagtaaataaggca

SEQ ID NO: 42954 - DNA, 836 bp, Homo sapiens
ataaaagttcctgcctcgtaggatgattgtgggggttaaatggaataaatgcatgtaaattgcttaatggagtgtagaacattgtgatcattcaattagctattaatattattattctaggaaaaagaaaaggatgtccccccaggcgaccataaatgagcagctgggctgtcaaatttgcctttaatactgtaacatttctggtactggtcaagctactgaaaactcagtattgtataaacccaacatgacagggaacagggtgacagggcattggtggagcggtcagtgccctctggccctagagcaagtctttgaggcctggttctagttatttttctcaaccctgggtctttatcaatcaccagggaaggtttttcaaacataaactgttggctggacttcagagcctacacgattttgcaaagctcctcaggtgcttctgatgtttgggttaagagccaaaactctttattccaagggtcattggtactgtcctggacagaggtggtcctgggctatgccctgtaggtttcctctagtccatagccagagaggaccaacatatcttcagagaaagcaaatacttagaaaatcctagggttaggaggataatatttatccttgaggcagggttaccagccacagattagaagtaggagacgcctcttcaacttggaataaagccctggtaccagatattaacaaactcagtattctcagagggaaactctcaaactgctgacttctgcacatggtctgttaacatccaggtgcttcagggttactgcaactgcccaaattccaacttttctggaaggacagtgcctgtcact

SEQ ID NO: 42955 - DNA, 1646 bp, Homo sapiens
ttcaccacgttggcctggatggtctccatctcttgacctcgtgatccacccgcctcggcttcccaaagtgctgggattacaggcatgagccactgcgcccggcctttcttgtttgtttgagacggagtttcgctcttgttgcccaggctggagtgcaatggcgcaatctcggctgattgcaacctccgccttctgggttcaagtagttctcctgcctcagcccccccagtagctgggattactggcatgcgccaccacgcccggctaattttgtattttcagtagagacggggtttcaccatgttggtcaggctggtcccgaactcctgacctcaggtgatccacccgccttgccctcccgaagtgcggggattacagacgtgagtcaccgcgcccggccaggaatgcccttttaaaagacatgcggactaaacgtggaggagcgaaaagccctttgttcacttcagttgtcaagccttttgggcagagggttgggaatggaaggggcagatgaaattctttcagaaagtgacaagtaatgtgttgccatcctcttcatatctgtagaaaaattcccaaatttaaagtatttcagtgaaatcaagtaacacttcgatctttataaaactgtcctcagctcacagcacctgcagcaacttcccctcgggctctctacatttcagagagttcagcgacgtcagccctttgcaggaaaaatgaggtaaggcagctttaaagaggtaaagcccacggtctctagccacgaagtggcagggccataacacgctttccggccctttagagtacagatttcccactgattctttgcaaactcacttttcacatactacgggccgatggcaaccccaaaacacacgccgacggaaagcgccccaccacggggcggagcctcgcccactatcccttctaggctcccagccagcaaacgcatttcagagacgggattaagctgtctctggcgaaccagggagcagctgggtaggccgcggggggcgcctgtcatcgacgtcatttccttcagcaagagcgccgcaggaaaccacttccacaccactgctcccctctcccccggaagcccttgttgctagtagggggctgcatggcacgcgcccctttgcgtccagagaataccatagtgcgggggagcgccaaccagtgccaggacacttaccgagctgaagagttgacagggaagtgaaatctcagaaagaaagcctttctgggttggcctggttacggctcacgcttccttccacagaaacttcaattcccagaggcaggggcggtagttacgcagtggaggctacggcggttgcgtcttacgtcatcgaactgcggccatttcgaacccgcaatggaagaaaggggaggggtttatgcggggcggggtctggagttagtgttttgggagtgggaggtagttacagtgatgtctgttttttcccgttcaagaattaagtgtgtacctgcagacgtgtattcattcatatattcttgtgagtattggatgaaggaattaagatagtcccactgttaaaaatgcaaaacaacgaagaaaggctcctaatttttctgtgttgaaaatgagagaaaaacatctcttgcctatattatttttaatttat

SEQ ID NO: 42956 - DNA, 1477 bp, Homo sapiens
ttctaaatttttttttcattaatgtcatgcttctttctaagaacaaagtgtttcaatgttataaacagactgttttttcacatagctttcatacatcctgactttctatatctagtagggtaatacatttccttccaacctttagtggggtgaagttcatttgtcttctaatctaagaaaatacgttaactcctgacaacctctgacactcaacagaaacacaactgtactttggaattaatcatccatctttatttcatagtctccttatttatcaatgcaaatggaagtatagcaaatatttcacagtgtcatgtactacctaaggaatttcattgcaatagcattgttttgaaatgtatcatttgattttgatctaactatcatagatcagttttacccctgtatgttcagcctgaatgtctaaccacaatttcacaaaaatcaagggctctgttagttttcatacaaaattgtgatgacttattatgaagacagtcccaattaacaattgcatgtcatctgtaagaaatcaatttttttctcactccccacctgtaattttttttaagcaaagaagaatacttgggtctaggtttcaaggtttatttttctgtagtcctaatatcacttcagtaaattaatctgagactcatttttctaatatgtcaaatgactgttgtaaggattattataaaaacgtaaggtgattaacaaagtatgtaattgttccatagatggcagctcttgtttttttactgtgctttgcttctgccctgcttcacatattatgtaaaatagctggtgagttttaggaggtagtgctcacatgtttgcacagtgtttgctgtggacgatcaacagtaacagaagagcatacttcttcgatacacagagtttactgaatttggaaaggctttggcattcttatgtcatctgtaatgaaacaatctccagaagtcttttctaaaatgtccttgtaaaaagaaaaaagttatgtttatattttataaaaggatgatgttatttataaccagcagaagcagccttatttgaacatcttatgttgaaattgctacttaatacagtgactcataggagctttctagtggaaatcaaatgctcaaatgaaatagaatttagtttgttaggcaatagtgatatgtcttttattggttggactctggaaaacacttgacaacgaatagtactttacccgaagggcacgtatcatgcaccacatagcctaaccacaaacattaaaggtcttgtaactgtgagcctcaaatgaaaatacataaggacagctctcatacaatcaaatacaatacaaactagcttttaatttaaataaatatgtaagtaaagttcaagtgactataatgattttatatccctatgtatgtatcacagaaattgtggcaaactgtagaaatctattcaaatggaaagtaacaaagcactttcacattgcctt

SEQ ID NO: 42957 - DNA, 3001 bp, Homo sapiens
ttacctagattgtctggaagatttaagctcaaggttacggtttgagaaaagggttttgagagtgaccaggatagatttaagaattcattttatactaaaatatggccataaatatttttaaatacattcaaatagccctttgctggcacattttttcccttctttgccaaaacattcccacaggcggcctaagtcacctcattttataggtttagtaggtttagcaggctttatgtgctctagtagggttagtaggttttgttcatatcaggtctctctcatgggagtttccagggacaaggattgcttcagttagtatggccttagccatactagggtatttgctttaattctacagaagttttctaattaatattctgtagcaaaagaactaagatctggaattccccctcttaatctcttcctagaaatgagattcagaaaggacaggactgcatccagcctgtttgggaactcagacaaatgtgtgttgtcacagacacaaatagaggtctactatgaaataattggcttgctagtgtgctaatgacagacaatgctgatttgctccaacctcatacagtttcacacataaggacaatcatctatgtttcatgaaagttctatctactttaacattattttgaagtgattggtggtggtatgaattaacagtttaaatttaaatcctaaaattcagtgtgaattttttataatagcataaaaattcaaagatgtccatacaagaaaaattaaaatttggttaggtttagcagagtttgagaatccttactaccctcccacatagtattgtaatgtgaatataggcagttactattacaggcataatgatgattatgtattaagcagaaagaagtatcaccaccagtttttttctttgaatgcccctcagtacttctgcatttataggatggtagactggtttggtttagctctcaaaagtgaaaacatttaaagtttcctcattgggtgaaaaaaattaaaaagagtgagagactgaaaactgcagcccacctacgtttaatcattaatagtgagcccttcagtgaacttaggtcctgattttggagtttggagtctgacctttccccaaagataaacatgattgttgcaggttctgaagagggtcactccctcactggctgccattgaaagagtccacttctcagtgactcctagctgggcactggatgcagttgaggattgctggtcaatatgattcttcttgctgtgctttttctctgcttcatttcctcatattcagcttctgttaaaggtaagtttgtgttgccttttgctaaactttaatttccatctttggagttggaggcagatacgtgcgtgtgtgtgtgtttgtgtgagtgaatagtgaaagagtttctgactaaactatcttcaaaaccatgtaactttggaatgtttgtgaaagcatggctgagttgaaatgaaaaccaaattcaaatccctacaaacattaagaaaacagatatttcttttagtttcagttcctcagaccagtgtgttcttgcttcaatttctcattcatggtctgtttttaaaagaaggaaaaaagatacccactattgttacctgctgttgttggtcacattgaatgcagctccttcatttgaattgtaaatgaggattttttttaaaaaccgagttcttaaattttcttttagttgcttagcaatgtgacctcaagaagaattagacccaatgaaaaaggcatttgatttgccaaagaattatgaatgaaatggcacaacatatatttaattccgttacaattaaaaaatgatagaattcatagtgaattaaagaaaattaaatttcctgatacagatttaagaaataagacattatctttggaaaaataatgttgctacttacagtttctattttaagatgaaattaattttaaaaatacatatgaattaataccattgaaaaggcaagtgaaaaaacattttatgaggaatggtttcataaaactgttgtgaagtgtattaatatagaatcatgtttcagatcagctacattataaacatcggttttccaaatgctgcattgtgtaaaatgatcactttttagtttcttaggaagacacactgttaaaaaccaattgatataacaacatagcgttatagggaccaattttaaaaccatgtactctaagtaattgatagaaaacaattcacttataaacttataaaacctgttagggataaatgtggcttttgatattaaagtaaagtttgcctcaggattttttgtgtagaaaatttccacatgaggaaaaaaacctaatcttcattattggagcaatagagggttaaatttaaaccaattcacctcagcaaatcacactgtaggttcttgaactaaagaaaatattttcaccaatttctaaatatttactatttaaacatacagttcttacttggacaaaagaaattttttaatgagaagaagatttataaattatatctgactgagagtgttatatagaggacttactatttcatctgccaaataaactgttgagtagtcaaaatatgtgtgatttaaataccatagtatcaaacctaataccataagtattttgagaaaaataattgagacatggtacttatcatgagcttctcctgttttcccattttataaactagaacattgggtgacctcatgttttcaaatatacttataaaaaatttaaggccgggcgtggtggctcacgcctgtaatcccagcactttgggaggccgaggcgggcggatcacgaggtcaggagatcgagaccatcccggctaaaacggtgaaaccccgtctctactaaaaatacaaaaaattagccgggcgtagtggcgggcgcctgtagtcccagctacttgggaggctgcggcaggagaatggcgtgaacccgggaggcggagcttgcagtgagccgagatcccgccactgcactccagcctgggcg

SEQ ID NO: 42958 - DNA, 2493 bp, Homo sapiens
agatacatattcattgcacatcttcttttttccatgcccactcatcttccctacataagtgggcataactctagttttgtctacaaatcattaagttgtaaacgtgacagttatctgattacgttgattaatgctgacgagtgaaagatgcctcaagttataccatggattcttttttaggcctgaaatgctgctccaattaactggataattaccagatttccatttctggttttggctttgtgttgattaaattaaccacgtggctgctgagtcagacctttattttgtattgtttccgggcattgatttgctctctaaatcagcatggctcttgtacacacactgaactgccacaagaaatgtgacaccttgaaagtccttctgaaatttgttgtatatttctttacttgtttgttctccagtgtgtcatttcctagccatgctctgtcttagatagatatcaaagataaaattactaatctttgtttgctgggattctttttattatttttattgtttggccacttaatggaatttagtctcctcttattcttaaaataaatataaaggaaggtgtggagaaaggcatcttcttcctaaggaaaaaacaatatgaatgatgcctacctatttcaagaggaaactggcccctcatatttggctggaagaggcactgtaccaccttcccagccattttacccagtctccctctagctgtggtttccttgggttaaagacttcgtttgtaaccaggtcatacctgctgctgctctttggaagctctgagtactgtaaatttagataagaacctgtgctcttggatgttcagaactaatttcattgctgaatgaagtaatcaactttatggcctgagtataataaaacttactcagttcctgttgtgaaataataaatttaagattattgctgtgacagccatgtggcttgaaatgcaaaattctgatttcagattattattttttaaatgattacaaggcagctcaattctaacagttttgacatttagctggtatggatatcagtactatcttcactttggatctcatcagtctacactaaagaaacagaatttaggccctagaagtagcagtcatataaaagaaaaagagatgtgttcatttttctagttctggggaagcaataaaaactaatagaaaggattaaaaaaacttttttcattgtgtttcacagtttatatctatcattcagcctgccaggagggaaaaaaggctctaacaccattttctaagggatccagaggtcaagatcaaaacttgatccattgcagtgggtcagtaacagataagcactgaaccttatgcacagtccaaagattaaatccaagaactgggtttccttaccttttaggtaaaactttaaaaatagctcagatacattttgtagcctggaaggaaagtgacatagtggtgacaatactggtatttttcccacttaggagatcttgctttctaaagtatttaaggttcataccaaaaagacatgggccatatagacatgtgtgcattgccactgagtgaacacttctgactattttggggcaatctagttatgaacttctaatggtcatgatacctggagatacacttccaaatatttgaaaaggaaattacactgtgattattagaggaaggagatatagtttacaaaatagaacttcagaaactcaggcttgggtctgagatattgccagtgatttgtttgagaatatgatactgtgaattttcagacactgaggtcattattccagttcctttctaagtcggacaaacactattccaacatttataggttagtccagtctaatgactaaaactgattgccagataaagtacctagtaaatccatcactaggcagagtatatgtaggaagtaaaaatagagatttgagacacttgtttggataattcaggaaaagtattctcttcttctaaggcacaagataattttcatgtagactaaattactgagcttggtattatttggattcattgcatagctattgagctttatgttttactttagaagctatggttggttttaaagagtactaggaaggcattcaggatatttctggtagaaatgctcagctataattatcatagaccttgggaatttttacagggaacatgtatctatcctctatttctaaattgtgtgatgcatatcaagtctacagggtgaaaaccaacaagctgattttcattaaattcactttgtacttttatccttgtttcttaaacattagttaaattatcaaaatggcaaaagacacttatcatctctgtgcctataaatatcaaagatgataaaacaaaactaagtggcttactattcctgccaaatcatagtcaccctcctcatttcaacctcctttctctgccttctgatggtaacctcaaagcagtgcctggggcaggttatgcagcagtagcaatctcaacctcaaat

SEQ ID NO: 42959 - DNA, 1021 bp, Homo sapiens
accttttggtagtactgtagtcagagtactatgcctttctgtcctgaggaatcacaatctgttttctgatatgtactttgaaatgcaaaacatccaggggttaaagggctgggtatggaggacagaaaatatgtaggattcctatttgttgtggaaataagtgtgttagccccctcatggtgtttatcgacttttttttttttttttggctagggagaaaagtttgacatggaatggggtgagtcatggcttagagaataccatgtcctcacatagcagcagccttagaatgactctgccaacacctttccatctacttttagatgctctgcaagacagctgatgcgttgtatatgacagtcctggaaagactaagagtctgtaggatgccatcataaaatagaaagctcatggttttcatagtcagacagaaggggtatgggtcccgcctctgacatttattagctgagtaaacttgaaaactttttttgcctcatctacaaaatgggtaatatcatatgtacttcaaagagtggttgtgaggattcaatgaaaaactaacccaccttatattcaggcacagaggtttttgtctgttttagtttttgtttttagctgttgcaaatatttaagtttttggccccttgagaagttctagctgcagctcagaagcttcaccattatttacagagcaggcagggagcttgcgtcatgaacattatattgattttatccaggtggttattgaagcccaaggactggaagccttaatcgcagccacccctgacgagggggaggagaaccttgactcctatgctggtatgtcagccatcctctttgatgttcagctcagacctgtcacctttttcaacggatacagtgatttgatgtccaaaatgctgtcagcatctggcgaccctatcagtgtggtgaaaggacttattctgctaatagatcattctcaggtaattcattcagtctgtgagtatttattgagtccctaaaatacgccaggcacgtt

SEQ ID NO: 42960 - DNA, 1680 bp, Homo sapiens
ctaccctgtgtcaccagggagtttaactggatgacttcccacggttttaggaccagaacacatgacagagttcaacagggatgctgggtcagattttccctttctccacgccggcctgtgcccagacagaggggaaaatcaccgcacacagctggcaagctatgctcagagttgtataacattctggaaggccttgggggatactagagtaccctgacacacagccaactggcctgccctgagagatcagccagctagctcaaagaggactgcagagctgtgggcactgcctccggtttggggaaatacagagcaatcctgggcacaggtccatgatgcttaccctgggagtctgcattgataagggctgattttctgctctggtgaggggccctgagaagataaggggattctgaggcatttatgaggatctagtttcaagggagcttgaacacctactacgagcaatgtactatgtgctatgtcttctgtcatggttttataattcagtcttcactactctcctgaaatgtaccccattttacagatgaggaaaatgaggctcagtgacaacaagtcacttgcctggactacactgtgactagtaagtaagactagttacttagactagtaagtaacagtattagaatctgagttggggttgcctgacttcaaggcacacgtacttgtgatttagtaaaagccacacagcttcccttcaactaaaatgctttaatccactggcatccaagaagatttcacccttacctttacagcgcacattcttctgctttacataaacaaaaattctcctacctctgggagccacagctcctaggagtccttaagctgtctcaggtttctttttggggcatataatgttctaaggacagctagttttttaatcaaatgaaaaacacacatagagttttagtatatgcttaacactgacagattcagggtcagtttcttaccttattccctttccctgccctttcccccaagccacaacacacacacacacacacacacacacacacacacacacacacacacacacacaccccctccgcggcagtaaaacggccagaagattctatttcctctgaatgaaacagaaatttggaaaattagcagcagggcagccagtcaattccaactgtgttcttttccaccatccacaaggactttaatgtttcatataattaaccctttaacgtactgatgtggccgagaggaaaaatgcaatggctgaaaaattttggagaagttaggtagtgggaaagtcctgacacaaagaacaaataagagaagagggacaatttacaacaaagaactgagaccagcgagcagagaataagacaaataaatgagcaagggggtaatctataagagcacgggccacggagctccaagtgcctggatttcaataggtgttgatctgggataagttaatgtttaatttgtcaaacagagattaaaaatagtacctatctgtgttaattcaatgatgttaagtcttggtatatactaaatgattaatacatactagcttttacttttaatttcttattaattttagataagttaaaaaagaaaatgtaaaggtaatggaatcgtgaagaaaggtacaaaatagtaagctagaggaaagccacaatgcaattaaagggaaaggga

SEQ ID NO: 42961 - DNA, 1481 bp, Homo sapiens
tgtcttaaacagttttaacccaatcatataataacaacacatgcaagaggattctttcttatagatgttgtgcatatttactattttaaaaatggttttaaatgagaatgaccaccattcctgcaattaaaaatttttaaatgcagaagagtccaagaatggtagcttgttttttttctcttttgtttttgtttcttaccagaaaaaaagattcagaattttagattatccctcattaagtcttgagtttctggccttgaaagttaagcatgtcttcagctctaaagaagcagattaagccagttgtgctggcagcttgaagcatttggaagctggccagaactgccaaagaattttttttgccctttttattctcttcctttccaccaggctagctccgggagtccatctgcagaatcaaatgaaaatcaatccctttttatgcaaaccttcctgaaacagcaaggctatgtttggtcacaagggcggaggttcgtgcagtggaagccctggtggtgatttctcccagctcagggcttgccaaagtcgtctccacctcatagtgatgaaaggctggatcaaatggctctcaaagccaacttctattagacttgccttttctaaaaatagtgcacttcagtaaacaccattgtgagtttgcagtttacttgctggggagtacattgccacctccaccaaaatttcacgcatgcatgtatttatttatatcttattggaccttcttttatcagttaaaacccccagcaaatttattttttgttttaaaatctgatatttaatcaattcctgttcaatgatttagaaaaagtatgaataaaaagatctctgaatcagagcaggttgaatgaaagaagattaaccaaagataagattgaagtttctgcagttcttggaaaatgccaactgaggttgcagagaaccactgccctgtgtcctcatggacagtttcacagtcaaaaaaaggattgggtcaatcaaattaaggtagtgcattgcttgctacaaattctcctgagtggtgtttacagattataaatatgtatcctgttttattgtctgaaaggaccctaacagtggaggtactgaccttatttttggtttatgttcacctttgatcctgacagaaactaaatctctctgttctgtagccagcacctgatccttggacttcagtccaccctcacctaaaaaaagatagtggagaaaaagcacatcaagtgtgcaaagctcagcactgatttaggacaggaaccaaggaacatgatctccagtggaagccacggggatcaccaagggaggatgtgatggtttaagctgactttagcccaaggggtccccatgctggtgggagagatgtgggaatctgaataaccacaaatgggcagagtatactctttgtggcatattggagaggtgacactatgaaaccagcttcccccaacattagggtcaactgcatt

SEQ ID NO: 42962 - DNA, 2345 bp, Homo sapiens
agaactgttgaattgtggcagtcagaagaatggcagggcttaaatgttgttgcgtcatatcctgagctttttatttctaggccaacctgaaatcttcccagtgggtggatgaatgagaagaattgaggaaatacaccttcccctgtctcagggaaggaagaggattatgggcctgcattattacctttaggtctgagacacagtgtgggtgttggttataagggagtttgcatgctaatgaatccttttggagcttgcattctgtggaggggtaaagaaataaggttataagtgaaggagcaattcctgtgatgctacaaaagtcctcctgagcaacaatctggcacttcgaagggaggcaacaagttcagtatagaaggacacagagactttttctctctctttaaatccttatttccttacagaaattgctattctactgccctctaggagaaggctgcccaggacaagaatttccttgttaacaaaaattatggccaaaaaacaaaacagtagcagagatattaaagaagtatctggtttggggagctgggtggatgatcctaaattaattgaaattgaaaggagatatatgactgcgtttttggcctctcttttactgtcatcccagcccttaggtcatgttttatgttcaaggcattgtgatcatcattcacctttgactggaagagcaaagtcactcctactggacatgggtaaatatagtaagacacttgaaatgcaatgcccttgagaagccggcttcttctataaggagcaactttatctcaataacaaacagacaataaagggaactccagctggcctgatgggtgttttggaactcaaacagctgcttccggatgtatcattcccacctttcacagcctttcagcggaaatacttattggctcactcagaggatagaaaatctttccaattaggcaagttggtgtaaaggcctgaggtgggagctggcaatgcttcccagaggagcccacctcgaatggtagcctgagttcacgctgaatgcaaggacagcgctgtatacaaccgaggcctttagtcacagatgtgggacaggggtgccttcgatgggtcttgctcattttttctgtactattccatatctagtattggattctttaatttctccaaaccagcatttatgaggaaaaaacacaaattctccctaggcaggcagttgtaagtgtgtgtgtgtatacatctgtgtgtgtatgtgtgcatatgtgtgtatgcatgtatctacatatttggtgggagagaagaaaaagccagtctccttctccctggagactgattatttgtaattattcaagacatttataagtaaaaatatttataatattgtttgaatggctcaaacataagaagtagaagagatgtactaaaattaaaagtgtgtcttataaaatgaactaacttagtttaaagagcagctaagtttaaagagcagcttttttttctctatcacctgcctaccatgccccagccaacacgatttgccaaggccagtgactcagcagagcgtgcattcagcagctactgaatgacagccttggaacagttactgcaggtctctccactcctatgagcagtatagtgaccaatgagtcatggatctttgctctcactgttttcatcttgaaatgcacacccactgctgtgtgcatttttctgcacgtttctacattgcctcagtgttataaaacaatgcagtaaagggctgttctagaggctgcctgaagtcttctgtctcaagccagctatttccttatctgacttggcatttaaaacagctggatggctctgacaaatgtgtcttggagctgtgcaccaggggtacgttgctttatgatatgattaagtaaaagcatattctttctcttgcattgactttctgtgtgccctgaactgaaatcagtccaatcagtaaaatcctgatgcagaaaatgataaaccccaaggcttaactactgttactgagaaagcccaaactcagctcccttgacacccttgagagagtttactgtttacctggaagccatgaatttctctccttgttgaaaagcatgcaattgccattagatggagctcaatgaaagaaaaaatagaggatgggctttttctgggttagaaagaggtttttcctggaaagtctattggaattgttacaggggcagtctcagtctggtatgtgtttcagagttagcctccctataaacccatcagacagctctgtccatgcacaaccataagcattaacatcactaaaactagtaaatatgagatatagggccctagaaaattatataaaaatccaa

SEQ ID NO: 42963 - DNA, 788 bp, Homo sapiens
tcaaggagagaaaatggaagagaccctaagaagaagccataatatatactagccaggttaagttcagagatagactcctacagcctggtgcccagaatgacatcgtgtgaactgatagccttgaaaagggattaaagcaaagaaagggagaactcgggtttgcttaaacatcactgcacccagacccataggtggaaatggtgaatggtctggcaggtgaggaaggacagtgcactggagggagaaagtgtcctaccacatgagataatttttgcatctttaacctcagctttattcaacttaaaagtggcactctttttgccagctggcatactgtcatgagtgactcaaccttttagcaactaattctggcaaatttgtttctgaagtgtgagtcatcctagtgaaccctattgcagatcttctgagtaccattcacagcatttttctatgtgtgccctggctgactcaggccattgcagacgtcaactattttgacactgctgctatattatttgactgctaactgaaccctaacttgcattatttcccttctctctctacttttcctgcttccaaagcagtctcttaaagaattctgctttcaaaaaatctgtttatgcaaaaatcatacacacataaatatatatatatatacatacattaaaatgtttacctatactagtggttgtccctggatagtaggtgcacttgtttcccattgacacggtttggctctgtgtccctacccaaatcttatctcgatttgtaattcccatatgtcaagg

SEQ ID NO: 42964 - DNA, 1377 bp, Homo sapiens
caatttaggtatcaattttgacctcacatggattaatcaggtatctcttgttttgagcatccagcacttactattctccaaacccgactgatcattttatcctcctacacacacacacacacacgttaccatgtttctaaagaggcatgggttagaaatcatcgtaaattgctacaataaaccaaatgagatattgttatcacttactggaaaaaagtattgtgggtacatgtcctactgaccaaattctgacaggaaaagcagcaaaccatcattcagaatttcaaatggtaaatatacagagcctctcttatgccccagctggactggggagtagggagaacctaattttctcagtctcaagcaccttagtgtcctacacccccattcgaggcagaaactcaggatcctgcaaattcattcatattagtctcccacttcagatatcagagaaaataattaactgggatgggtggggctgggaggatcaaaacaaatttctgtttgggaagttctacctctccccgctcagtatgcccctcaaaattccccactctccccttcctcttatgtaggggtgtcactcacatccgccatgatgaacccccttctctcgcaggatcaatctccacgcctggaagagaaactcccggtgactcttccctctttggcttcctcgtcctccccacccacaacttaatacgcgagatcagccctggtcagaaccaggtaaaacccccgcggttctagggcttggcccagcgagcccagtgggagtcggagtgccccagcacccccacaggtactcagctggcacaccttacctcagcccaccccatccctgcccctccaccccaaagagctaggcccaaagaaaagaagagagggtcctctccttctgtttaatctcaccacccgcgccacctgcgggactaggcctcaaaaccaggcaaagtagcgccagttacctggggtttctgggctgcctggttctctccgctgtcacttcagggacagctttaaagacaggttcctcctcaagccaccgtcacatgattcatgacctcgtctgcgctccaggaagcactttctaagccgccgtcgccctacgatacgggatttccggaggggcccggcggaagctgcgagggcgcgtccggcggccgcgcccctcccctcccccccgccccgcacgcgccccgcccctcccccgcccaccgcgggccgcgtcttgcgcctgcgccttgtgtcacgggccgaaggaagtcagctgtggggtagatttgtacgagatcgctggaccctaaggaacccagaaaatgcaagcaaggttatgtgttacaagacattcttgtgcagagagggtgtataaatgtc

SEQ ID NO: 42965 - DNA, 2031 bp, Homo sapiens
ttcgagtctgaaagttcagctactattctgactttgctactaattgttgtgtgaccttgggtaagatactttcattcattcgctaattcattcattaattatcagaaagtctgtttccacgtgggtaaacctggtcaaatgaatcctgcacctctacacagaattgttctgaggaataaatgaaataatccatgcaaaatgttgggcacaactattggcactttgtgctcaataaatgttggctattattactccgaagcctatcgagtaggaaaataaataagctgacttcaactaaaggaaacccagtaccatattcctcagagatttggttcgtcgataatcatggtgttatcaaatcagatactcttcagcaatcattactgactcttgaccattcttgccgaaagtgtgctcttctcttttaaaggaactctctcccagggaaaagcaatgtcatctcaggtattcgatgtttgctttgggaacagttttctacagatctcagaaacatggaatctgagattagccactagagtacaccattcctctcacttcgataggggcctaggccttatgtaggactgagaatggggagggagggggccacataaacaacacagatacaaataaagcctcactgtggtaagacgggaccagacaagtctcctccagggagaatgaaacccggacatttaggacagcggaacgcggagccggcgggcaggcgggtgcagaggaacctcgcgcagcattccccgagccccagcccggagccggggctggggccagggcgggggtgtgtcgggatgctccccaccgggcctggggctggggctggctcagacaggccgggggccccgcaggcctccaggaggggccgaggtgggggcaggggcgggctacgcggtggtctggggattgggcaggaagagaagggacgctgaggtctcaccgcgggccgagggcagtgggtagagcttctcggccttctgcaggaagcgctgggccttctcgcggttgccggcgttcagggcctcccgggcgatctcgacacatttctcagcctcatccctgttcccctccatagcttgctccttcttccgtttcctccggcagcgcagctaagaagggcggaagccgccgccgcggaggaggcgaggcgggaccggctgggggcgtgcggcggcagcggggaggagcgcaggggaccgcggcagcggctgcgacggcccgggcggacgggcgggcctcgcagctccgcctcctcacggcggcctccccgccccccgcgggcccctagggcgcgatccgcatccgtcccggcccaggaccaacctcctgggccggggcgtccgagctgactcggtggtccgcgcacggcgccagcaggctcgaagcggacctgcccgggaggcggacgatagcagccgggctgcccatcgcggggaggggttccgcccgggacccgattgccggcattggtagcgccgtgccctgtgacctccaggcgaggccctcgcagctcaggccaggaggacagggtccgggaaggggacactcgttttcagtaaaattgccaggacttggaggttccgcctctgggcccctcaagcgagggaggatgcggtcaggtgaggaccaaggtgtcagtccagtctcagcacttccgggacacgttagagcgtcgtttgaacctaatcttagggcttgtatggcagccttatttcagctacattttttctgacccggatgtctggctatccaaagtacaaagcagtttaatttgtagcttgcaacgagtggtgcagatcgaccttaatcctgtgtagccaaaacaaggcaggaatcagcccctcaggggctgccctaacgaaagcaaacttttgatttcaccttttccgtcccatttggataacattaccacttggaagtaccgtgtcttgttagtcttcgcggtgggggtggggggaatgtttgctatgtgcaaattttttaaaaaaaaacatgacaaactgtcaaaatgacctg

SEQ ID NO: 42966 - DNA, 1225 bp, Homo sapiens
taaaatgttagaagttaacataccaccaccagcaattgtagccttgatgagagaatccaattcttcatctccacgaatagcaagttgcaagtgacgaggggtaatacgctttacctttaagtcttttgatgcatttcctgccagttcaagtacctaaaaggcagaatctgtcagttgccttccaactttcctttggccaagattcagagaacagaataaaaccctcacaaacgcagatctaccaactggaatcgttcctcactatctgactggcaagatatacagggggcacgcaattttaattccaagagcagagaactcaagctcagtaggatccttgttgaacaccagctccctctagcgttctcttaggcctctcgccgcgttcagggcctgggagttttcttgcatcactttcctccttccctcttgccgcctccccgccccccaaaccttctccggattataggcgttcacccatttacctctgcggtgaggtactccaggatggctgcgctgtacacagcggcagtcgcgcccacacgtccatgactggtcgtcctagattttaggtgtcgatgaatacggcccactgggaacttaaattttaagcatacacaaacataaatgcacaaaaatgagaactagagatggggaaattatatgcgcgccaaagcaaggggcacgggcgcagcaacgcgtcccgacatcgaaacacgtgattcctcccccccatatttatcgtatgggcagcccaagtcgcgacaccgcatcacccacgcatacacaaaacgcccatcgagagcgatgaataacaaaaaaggaaatgcaaagaaaaacatcatgactcccagactgcacgaacaactactgacctgcaagccggctctctgcgagcgggaaaccgcctttgtcttggcctttccggagtcctttccagccttaccgccagcctgcggcgcgcacacgcccgcgagcggaggaggaacggagaatatagaattaccaaggcggcgcgcccatcccccaccgcggcgcgtcccgccgcgagcgcgtccccgcaccctgccggggtctccggcccgcggcgcgccgcaggggcgaccccgcccgttcgccccccgccgcgcgctcgccacggccgcgcgcctccgcccgccggcccccagcggcgctgcgcgcgccacccaaccgtcgccgcccgccgcgagatccgaggctgctc

SEQ ID NO: 42967 - DNA, 1308 bp, Homo sapiens
aaacacctccccccactcttctaaatcctgtctccgcgcgttcccaaccgtcgccacttcacccccatccctctgtgtaacgggtttttctctcgccggcaaaaacccgcggagtcatcgagcgtctctgcgaagtttaccatttcgaattccgctgaagctcaagcaagcaaggcagagaaaaggctaatcggacccacggtgagatcccaccacctactccttcgtcgcaccgcgattcaaactgcgctgtctcccgccttccctgctccctttatactgcagaatgttccctcatccgggaactcggattgctcatcccaccaatggctgccacccgccctcgggacgcgtccttgagacttcagccaatgagcaagcgaagaaaagggtggaggggcgggcgcttctaatctcaagccgcgattggggcgtggggggagaggcgggggaaggcggagggatgggaacgggggagaagaagggcaccgcggcgggagggaagaaacagagcgagctacgctgcaggagcgcagttaccagccggctgcgatcacgtgcctgggaggaggagctgagacctcaggggaggggcgcgcggtagcgtcccgggtcccctagcagggctctagagaccacgtgaagtctcctcggtatgtagcacgccgcccccaccactcccagccccattcccagcgcctctcgggcggagacctgcgacccgcagccgctttccggggccccggacaccccttccctaccctctcaatccctggcggctcctcccgtctgacaggtggcgcgaacgcgtccagtgagaggagtctgaggtttgccctgacgccttccacagccttagtagagattccgtgtttcttccgtctaggcgagtccccagccaccaacagatcacgacccgctgctcccactttattttcagccgggtcttccacctctccctcactacttatgaaatcctccacggaatagttctgtgacagcaaacggtgaagccaagtcacctcactggtcacgaaaccctttttgtctatacttagggagcttctggcgaggcagtattctttaatcaaatcataaaccatattttttggagactacacatcaatgggttgtacctgtagcctggtgtgtaaagctcatttagtgaaacctcagagctattatgtgtcaacttttctacagtaagtattttgccacatgacaaatgttcggcaaatgtcgatggagtaactctgacatgattttcaggcagttagagggtccatgcaatgcaatcagttgcaaatg

SEQ ID NO: 42968 - DNA, 601 bp, Homo sapiens
agttggtaggtataagccacaatgcaaaccctggtccgttgagccagtgctttattcttgtggctcactatggtttggggattgctttactagtatgagtgtgggggacttccaccatcactgccactcactggagtttcaatgctttatgctcctttgtttgggcataagagtgtcacagaagcatgtcctgatggtgttcgtatggaataagtcagatgagggtggagcaaaagctcaggattctaatgaccttgaactctgttgcatgtcactggtgatggtagtggctgttgacacaggaaagagtgaaccaaggggaaactgacttgcaccaggctcttgaatgaagtattggatggtgttgactcaaatgatatttgaacagtctgcagaggatgactcagctcatacacaactcctaggtgctttttcctgtccatgttgcctatttaagtcgggtgacactctagaccattgctattctaagtgcgcagctttgttacacctgggagcttgaaagaaatgcaaaatcttgggctccaatccaggcctcctgaatcagtgtttgcattttaattagattcccagttgattgata

SEQ ID NO: 42969 - DNA, 717 bp, Homo sapiens
gccagcctggtctcgaactcctgacctcaggtgacccgcccactttggcctcccaaagttctgggattacaggcatgagccaccacacacatcttgtctgatgttgatattccatgaaattgtttgtgttaaataggaagtatcagtagcagtaacatgcctgccaacagctgacagcatttgttccttctcaggtgggaggaaagaataaggacattttcaaacatgcacagactcagatattttgccttacaaacactttttcctaagaggttacttaaggaggtgcaaagtgcaacaatgggatgaccaagactaaagaggatttagaatccaagaaatattggcaggaacccgggatagcaaatattgaccacagaaagggtgaggggaacctatgagaggaacaaagttcgggagaaggtgagtcagtagaatacctgtctgaaatacagaattgaaaatatagggactatgataagttaaataagaaataaaaagggaaattagatactctagaaaacaaatgtaattaaagtaccttttctagaagtaattaaattccacactctgaaatagttaaataatgtaaactttttttattaattctattagaaataaactataggcagtgattagaacacctcggtgtggatattttcaaccttgacaatataaaaataaaatttcagatgacagaagtctacaggtaggaaa

SEQ ID NO: 42970 - DNA, 1226 bp, Homo sapiens
acgtgcttcgatgtgaacatattgtgtgacattgggcatgtaacccaaactcactaaaccacagttttatcagtagcatgggatttttaaaaactgtgtcataacattgttgaaaatattgaataaaataccactgtttgcacaaaataaattataaataaatggtaactattcctattgaacctcttttgacgaaaattgcttagagtcaaccctagaaacatcagtcagtagatatgagtattgaagtggaaaggagatactttagccagtcaaggtgaacaattatatccaggaagtataatgcccctggggctgggaatcattgagtataatttgggagtgaaggtcaaaatgatttgttaaggacagatgcaaagaagagtgctacataaaaatgtctgcaggaatgattttgtggctggagatgtaactgaggatacttctctggaaaaaaagaccagcttcttctataaatgctgtcattgactcaaaatcatctagttttgtggaatttaaagacgattatatgatcaaagggattatctgctttctgccgagtggttcacatcaataaatttatttaatttcaccacaactctgtgaggcattacgtcttttatacagaaaaggaaagtgaaacttacaggggttaaatatcctctttatggttttatggctcgttcaagtcagagacaaggaaacccaggtctatctaacttgaaaactcaacttctttccatcctatcatattttctcccccaagaatgagaaactcaccaacgaaaaacacatctatattctggggatttgttttggtttggttttttgagacagagttttactctgttgcctaggttggagtgtagtagtacaatcatggctcactgcagcctcgacctcctgggctcaggcaatcctcctgcctcatcctcctgagtatctaggactacaggtgtatgccagcattcccggctaattttttgaactttttttagagacggggtcttgttatattgcccagggtggtcacaaatccctgggctcaaaagatcctcttgccttggcctctcaaagtgttgggattacaggtgtgagccactgtacccagcctacattctgtttaagaaggaaacaagataagtaaaaaatgaatgtgtttcttcagggaataattcacacacacacatacacacacacacacattcagatatcatagtatttac

SEQ ID NO: 42971 - DNA, 813 bp, Homo sapiens
agaagctttaagaatatcttaaccaatatatttaccttatgtattccattttatatgtgtgtaagaatgttggataatcaaaatctcaagaaatttaaaataaaaattctaaatcattgttcaattttcagtgttttttaatgatacataaaacaatgatattagggttctctagagggacagaatcaataggatataagcatatataaaaggggttttattaaggagaattctctcacatgattacaccatgataggccatgattacaccatgataggccatctgccagctagggaaagaagccagtagtgtctcagtccaagtccaaaagcctgaaaaccagggaagccgacagtacagcctgtagtctgcagccaaagacctgatagttccagggaggctgttgatgctgatgcaaatcccagagtccaaaggctgaagatcctagagtctgatgtccaagggcaggggaaaaggaaggaagcatcaggtaggagaagaaagagagagccagaagactcagcaagcaagcttacctgccctgcttctgcctgctttggtctagctgagcttgcagccaattgaatggtgcccacccatattaagggtgagttttcctttcccagtccactgactcaaatatcaatttcctctggcaacaccctcacagacatcctgaggagcagtgcttcaccagccagctacgaatccctcaatcctgtcagttgacatgtaatattaaccaacatagatatatcttacaattaatcattatgtttgtcctccaaaactcattttgaaatttaatcccc

SEQ ID NO: 42972 - DNA, 722 bp, Homo sapiens
cctcttcaggatatattctgcctctttgaaagctgctgactgcaagcaggtgatgattggtgtgaggtatataaggcagttcctaatgaatccaccacaccagagggccaggctgctttcctctctattgacaatcctaaatcccctttccaaattgtaaaatgtcattaaaatctgggaacattgaactccctctctacaggtccaactgacacctgggattaaggtcagatatatcatggaccctctttgtataaaggtaaaatgatttttgaagtgaaataatggatttaaggcactgaagcaaaacacagctccatgcaaacacccagtgacatatttacagaaccaggtctggctggaaacaaggtgaaaggaacagtaattctaattgcagccagcaaaataaaaaagcagattggatgaaaactggccaagctcttaccattaaaaataccacagcattgctgccaaaagagtattgagacaaattgccagaggtaactgttacataagccagagctcaccctgccaattagccagaaaccattgctacatctcttctggccacaattattctgataggtaacttgcaggctgtttagctctttaaaggactgtaccagaataaatcagtttttctgtgggaaaggagaaatacacatcaaggacaaggcagtctgtggatttagttcctcggggagtggtgattctgccccact

SEQ ID NO: 42973 - DNA, 1208 bp, Homo sapiens
cccagacttggtctagatgcagtggctcacgcctgtaatcctagcattttgggaggccgaggaaggtggatcacctgaggtcaggtgttcaggaccagcctggccaacgtggcaaaactccatctttactaaaaatacaaaaattagccagacatgttggcgcgtgcctgtaataccagctactcaggaggctgaggaagcagaatctcctgaacctggtggggtggaggttgcagtgagccgagatgcaccattgcactccagcctgggcaacaagagcaaaactccatctcgtagggggagaaaaatcccagactcagccagcagaaaggagaagcagctggacattggagaggagcggcttgatggcataacttcagtgaagaatccagccagagatggctggacttcaggaaaatattaccttcccaccctgtccccttttcagcttcccttcccactgagggccactttcatcagcaataaaatccccacatttaccatccttcaattcgttcatgtgacctcatttctcctggatgctggacaagagctcaggagtcacgagtgtggatacaaaaggctgtcacactgaccctttgccctcacaggcagaaggcagctgcttcgcatgaaaagacagagggcccactgagcggttaacacttaagctctctgtgaatagcagagctaaaagagcactgtaacaccccatctgaggcttcaggggtcacaggcaccccccgccagatgctgccacagggccctatggaattttctctggctgacacccaaaagcccttgccctggcttctgcacccactcacctgcatgctccctcctgtgaggggtggaatgcagtggttttgagtgagcgaagttcgcccctgccagcgccaaagtggccatcaggttccagcattcctgcactccagttcccaactcattagctagcacattccttcccacaaggagttgaaagctgcaggctgagtaaacgagaaacccctgtcattagttccgtgaagcaatcagagaaatatcctgcttcaaaacgtttttataaatgtatgccagctaataagtgatacagaaatgataaaatgtcactatttacaatccttaattagttaatgaatttagcttctaacatgacaaagtagaaaagaatcaggtgattgcttacctacaaaacactattcatgaaa

SEQ ID NO: 42974 - DNA, 1828 bp, Homo sapiens
tggcctcccaaagtgttgggattacaggcgtgagccaccgcacccagccttatgtccacatttctaaccctcgcctctctctgaacctccagggcagaatttctaagtgcctctacataaatgctctgccaaattcagtgcatcctactcttcccgataaatacctgttaggtatttaaattgaaaagtacttcctcttctttagacaatggcatcctatcaatggcatagactggaacccctgtagaatattctggaatacttcctctctcttgtagcctctcatataggtaagggttctcacagccaacaccggaaatctattctggctaattttaacaggaaagagatatattaaaggtattagagagctcacagatccagagaactgggcttcgatgctctgtagctgggaagggtaacagtacttgttcatactgtggggtgggctccatgaaaggcttgccactgatgttcacagccaatgccagagctcatactaatgctgtgtagttagctcccaaaatgctgaggtggaagctcttccactgctggcccatgagattccacacctgacaggacaattgttgtcctgccttgctgcttcctcatgatgctcaatttgaaacaaagccttgcttacatgcatttatctgactggcaaaccctaggcaacagacttgtattttatctgcaaggactgctgaaagacagttttctggttcccttataaggttgcacatttccaaaacgtaagaaacatgttgggcaagtatacctgacaaatttgtaccacattccacattcattaatcacgtcctgttttcccaaattccttgtatttgtcctttcctttgcacttctctccccatagcctggtccagccttttgctgggattacttcaaaagcttcctaaatggtttttttttttaatttacattttattttatatttattcacttttttcattatccatacgtcaccttgctagccaatcttcacgttgcaattaacatgtatagtgaaacatgggttagagcatgcctctaatctcacgaaaataattctacaactcctgattgcctacacacacaaaaattaaatgttttaacatgctattcaaaacactcaaggatatggacttcagtatattttcagtctccttttaaactagattcctcactcaccttcatgtcttttgctagtcagtcctttaatacatttagaattcattactagactactagtattgctaagaatttatactagactacatagcacagttttgagtaagactctcattagtgttgctccccaactgagggagtttggacactctgcttagcctctctcagattcaatttcctcacagcaaagtgaagtcaccacaaccttgcaagcttcctgtgtcgatgattgtcaaatgtgcataacatggggcatgaacctggcacttagcaagtgccccataaaaggatgccattgatagtgctcttaggattgtgtggctgtgctcctgataatttttccacttccaggaatgccttcaccacatctctccctgccctggaatccagcctatccttcacagcactcctccaattttaacctctttatgaacactccagtcaggaaacacaaggttccttcctgtctaatgccacagcagggtatctattcatgtagttatttagcacacactttttttttctttttttttttttgagatggagtcttgctctgtcacccaggctggagtgcagtggcgcgatctcggcttactgcaacctccgcctcctgggtttgagagattctcctgcctcagcc

SEQ ID NO: 42975 - DNA, 995 bp, Homo sapiens
agaaatttacaccagtcttttgtatctgcttacacatatgatgatacatgtgctaaatccaccatcttagccttctaaagcaatgatataagaattataattctttataattctatcttcccctttatacctatttgctggatgatcaataatatgtactgaatgaaacaataataaagctacttcatagacttcagtcacaaatgcaaacaggaaattgagacgctcacttttgcacaagggcaattaattgcaaacaggaactacagataagcagttaagcaattatacctacatacaaaggtcaacaaccagccttgcctgttcactgaagatcaaactgagtgcctagtatggtaatcatgtataggcaatttaggaaagtgaatatattacctaaattctaataaagctcgtaagtgaaattcatcacttttaccttctacatggatttagcacagtgcgtagagaagatgctcagtcagcagcaaagacaagaatgaatggtgtgcatgcccaaggctactacaaatgaccactctggctatgtcctacagtactccagagggcgctatttaccaggctaccatgtcatgagacgtgtagtgcagacatgcccaaccacctgtggcaaccctggggagcatcagtcagactctgacttttatcctaaagctgaaaagcaatcacggtaatggcacatatatgctaaatatcctttgagatcaacataaactgaaacaggcctaaagaaagagacagttattaaatgcctacctatgggtttgatttttacccagttctataggtgaatatgttttcagcatctgattataagctgctaaaaggcaagtagagcatgcaaatgttatataccagaagaagtaaatgcctttttttttttactgctgactcttatgtgatgactttgcaaccttagagaaatctgtaagaagaggcttcaaaaaatgctgactcagaaataatttacaaac

SEQ ID NO: 42976 - DNA, 663 bp, Homo sapiens
aaaatagtgtatgatcaactcaatcctacagaatagtgtgttacaatgtcctctaatgaaaactatcaaaatcctttgccctgtttaactctatttgatatctcaaaatcaaaaatatttgtgattaaaaatatatgaaagcaattttagaaaaaaattttgattctcaaagttacatgctataaaatgggcactgtgtcaccattatgaacaatgcatctcatcccttttcttgatccaagtttttttatttgatgttgtgtgaaagacagactggaagctgttgactttctctatcaaggctattgcactgctttgcttttccacattcttgcttcaataactcatcgctcaaccctacctgattcatcataaattatgatacacttaccctatgaaccttgtgccacactgctttgagaatcactactatgaggaatggctagttacagaggctttctaactgtaagtagcaaatagtgcatacattctacaggcccaagctcacaattatgggaagacaaaagtagctaggtcagaaaaaagagaagtgactcccatagacttccactggtctgtaattttatgtcctttgactcaacagggaaatggatcaaagacacagagctaacaccacaggatcaactgaaagagaaagaaata

SEQ ID NO: 42977 - DNA, 919 bp, Homo sapiens
atctgggaactcagatactcaaattctcaggccctactccagacctactaaatcagaaactctggaggcagaactcagcaatctgtattttgtgaagccctacaggtgattctgatctatggtcaagtttggaaacactgactccacctgtctcccttttcacatttgtaaaaagcgtttccaagaacaaccttgcaagaccagaggtgaacagatcaaaggactttggctctcatgcagtcaccttttataatataatcacttttttaaccaagggctgaaattaaggagtatatggacatcaaaatgatgtgtggctgccacaggctgggactgaaatgtgctgacttgccagcagtgggctgggtaccaaaataggtctctggctgcaggacaggccctaaagatttggccactaaaatcacaagtgggcaaaatgccccagacaaaatattttatctccatataaactaaggccacattgcttcatagtgacaaatgacactatgaggagaataaacactgatcttttaggtcccagaagacaccagattcctatccctgcttaactctcctcagagtgcaggcaaggggaattctcctaattgacgtcagctgctgtaagggaaggactgccatgaccttaaacttggccaccagtccactctcacatccaggaacaaagccagagggttctcctggcaactgcctgacatgctaaatggcaggccccggcactgagggaatcctctgctgacccagggacaaatcccccactgcaggaaacaggcaaaccagagagattagcagtttgcccagctgatgctggcctatcccctctgcccagagagcagaacatgagttctaaatcattctattcaaaaaacctaagctcccggtctgcttttgcattacaaat

SEQ ID NO: 42978 - DNA, 630 bp, Homo sapiens
tggatggaagggatcctgatgagacggggccctttaccagttaaacagatggcaaagcctgcagggaaccaagatgagcagtaatgatgccaaagactgaacacagagatgccgccagccagtgaaaagttttctaggacaaaaaataagactgggctaatatttgtgtatttgtgcaccttttggcttcataaaaagcataccagccttacaaaggtcacatttatttgctttctctattcacctagaatcctgcatgaagacctgtgccaaatactgagcaaaaactatttagaccaaagaatccaatcagcttggaaaacatttatttaattaattcattgtgaaagttgctacgcttaatacaacaaaattggatttccccttccttcctttgctttgagtcttacaacaagttgctttcattgatacatgagcaggccaggactagagaaattacgtttgtgcacattagtaaaaattcagaaatagctgttgatatttgggctggctctttccaaaacaattttttttgtaactgcctgtaagcacagaatatagtgctaagacttcttagaagcatcctaaaaatagatagaaaccttctcagctttctctacttcacaattc

SEQ ID NO: 42979 - DNA, 523 bp, Homo sapiens
tgaattttcacaacagtcttgtgatttgggtactattattctactttttatattccaaaacccaggcacagagaaatgaaatgactttgccaagatcgcacagcaaataagcaggggaagccagggctcacatcaggcccctgctttggggctgtgcttttaacccttgctatcccctccctgtagataagtgactcatccaatgatccaaaggtaattaagggaagaacccaaagtacacatccagttctccagatttccctgaatcatgctctttacttttgagttcactattccctacccagagtgatggacatagaaagccttaaaaaaacatttgtctagtgatttactggtatatgattcacatctcaccacataattttctaaatgcaataatgtttattctgcaagcacagtttgctccttgaatatcttatctggctcttctgcctgcttaatttaattgctcccagccttaaaagagaccaaaatgttacaaggaacaactggttcagtattc

SEQ ID NO: 42980 - DNA, 603 bp, Homo sapiens
tacatatcaaatcacttgatacatgtttttgtacggcttaaagagttcccccttcttatatcacattgcacaagccggtgtcccacatcatctgaaacaaagagatacatttcaaagaattaattgatactaattcctttcccttccctttcaaatgccactgtgtgtatgtgtgtgtgtgtgtgtgtgtgtgtgtgtgtgtgtgtgtgtgtgtgtgtgtgtgttttctaatacatatcgatgttggctactcctatctcagggaaacacctctcccaagatggtcaagcacgacccacaaagtcaacaaggggagttcttgaacttatcaatgcaagctgctatgaatcatgccattaatcaatactagtgtgaatcaccacaaagccggtccagggaacacagaccaagactttgcagtcattcgacaaaagttttggctgataatttacacaatgaaaacagaaaggcaaaaacagcataaactcctacacctaaattgcaatgcaaaagcacatatactttaaagcagtggtccctaactgttttggtgccagggaccgttttcgtgtaagacaattttttcatgtacaaggcgggggt

SEQ ID NO: 42981 - DNA, 3575 bp, Homo sapiens
ttaatccaagtggttctgctctgttgcctcagccttccaggattcataggatggttcctcccccactacacctaggaatacaaggaggccgatagattcccgtgcgacagagtgatcaaccacagcctgtccccttcctcactccgcacatcccagtttctctttgccagcaacctcagtgcatccttgccaggagtttatcatcccgtaggcggcgaagaggaggcaataataggaatccaacagcccgttacaaaaaggatgccagggcacggaggaagcaggcggaatgaggttatcacttgggaggtgtgcacgagtggagaaccctttaagagcaatgacaggtcggcgggggacagccggggatggcaagagaggctggagaagtggttttcgtgtctctccccggggcgtgcgggggaaatcccggggcggcaacggctggtgctctcaggtcgttccccgcctcccgcgccccccgcggccaccctccagccagcgaccgcccccgcccccgccccgcgcggaaggaagcgccgggctccccccacgctctcccgctctctcgcgagtcctgtgcaggcccttccagggggagggggagggggaggggggcgcggagggaattgctgcaatggagctccaagacaaccctgcccaagtgaggcagtcggtggaaagccacggccacataaaaatgccgtattaatttttaaaaagccatcaatcacccctccctctgcagaagaaaaccataaacccgatcccatgcaagcctgtgagcagagccacccacttcctatttctgtcacagcagctacaccctaccagcaaccaccccccgggcgccccctcccaccaccgccacccccgccgccacctccccgcggctcagccatttgccaactgacgcccccgtcaataaaaatgccccaagtgaggctgggtgggacgcgtgggggaagggcgccgcgggggcggggggttcgcggggttcgcgggttgcacaatatcctagaaggtccgcggctggagcggacagaggagaacctggggcgggggaggggaggaaaggcgaggcgaggcaagctgccctggcgcctgcggcacacggtgcacccaggccaccgcggcgctccgcttacctttcaccaccctgtcggtcgtcgacaacttgggatcaattgccttgggctcggacatctccagctgccggaggacagcgacgcgctgctcgtccgtccgactgcacaccccgaccggaccggcgggccagacactcaacgccgccgccgccgccgccgccgccgcgctgcaaaccgctcggctggaggtctaggctctgagctggctttaaagttgctgccttttccgcgcgtccctcctccgccgccgccgccttcactcctcctccgccgctgccgccagccccgccgactcgctccgggctgcgcgtgtgtggtggttatttatttattttctgagcacgcctcccggttcttcttttattcttgggggaagggggatggggaggagaagcgcacacacgagcacccaccccggcacggagacccagcaccgcggaatggagccccacgcgcgcacacacggccaggattaagaccgatcacatggggaaggccgggggcgagggaggagaggcagggccgccgatgtcagtgccaccagccgcaccttggcgtccccggcggcggagaggcggccgccgctgctgccgctgctgctgccgctgccgctgttgctgctgccgctgcccctgcttctccacacagagcgccgccgctggtgccgcggccgccggagacgtcccgccgccgcgatcgcccgcgctcgcctctgcctccccgcgccgctcctccactcaccaaggcacagccgccgagctcggcagacacagtcccgggcacaacctacccccctccgccgccgccgccgccgccaacaccgcgcccgcctccgcctcctccccttcctcctcccggcccccgcctcttgcgcgcctgcagcctcctcctccccactgagcccgcccccgacctcccgccccgacgccggagttcctcgcgttcattggctagagggcgcatcactcagtgccaggtggcggcctccccgcttgtcccgcctcccgctcctcctcattgtccccgccccttgctctgttttcttccagctgccggaccagcgggcctgccgcctctacggaccagtccctgctcaggtgtcacttttgctggcaggccgagattagggcaggagagtgggcaaggcgtcgcggccaggaggagaagggctctaccacgccaccctcctttggcctccgaacgcggaccccgcacacacacacccgcgcctctttggcaagcgtgccttgtcggctgggttaagccgcagtgtgagtagccaagtgcagagggtgtctccgggtgtgtgcgtggcccacaagagggcaagaagagagaaggcggggataggagggaagagggtgggggtgagaggcagccctgagagggcggaggaaggaagaggctgggagctcggcgcccgcggcgcagctgccgtcgctgccgcagctgtccagggaggatcgccaaaacggcgacgaataaacaacttaccttgcggagaagagctacgactgcgatgcggtgtacggttgtttttgcttttgcgttggcggcttaggggctgttactgtgtcccacccaggcgtgcacaccgagcggcggggcgctgtggaacgcgggagcggactagcggaggaggatgcggaccaagccccagcgacccagggcaactcggagctacctcgggcagccctgcgggtctccgaggagaaccgaggagacgggagaaacatgggagagggtggccttttccctgttcacacacacatgcacgcagccactggccgggacagttgacacccatcttccttccctgctccttccagtcattctacacccgcttggtgctgccagtgcgggcagggccttggagcccaaagcggatccccacacttgtccctacggtcggaaggaaagtagaggagagaaagtcaggcgcggcagggctaagagcaatagtggcccaaatgttcctggcccgcctgctgcgccacagagtctgaaaagcgggtctccgtctaccagaaggtgacctccacacagcccctctccccgaccaactgcagcacccaaggactggcaacgtggttggagcttttggggggaattatgaagaaatctgaataaatttctcacccttcatgtttcctgttttatttccaaagtccttcagtatcaggtttttcctatttcctcaattggaccacgggtccaataaaaggtttaaaatacacacacacacacacacacacacacacacacacaaagaaaacaaaaacaaaaaaaaaagtttagggagctgggagatgaagccaaaagaaatgttttggagacaaggattagattaaagctcaaacttgaaaatcaattttgagtaagagactgattgtgctgcagcgtgactttgatgtggactgcacggaa

SEQ ID NO: 42982 - DNA, 2437 bp, Homo sapiens
aatttcacatttagattttttaaagttacagagtcaactttcgtagagagtggactcaggccttgaggatgacagatggaattcaggagtttagtttttagcacgaggtgtgtctctcacacatccgtactgtaagaataattacttatatagatccaagggaagacacagtattactcatatttcttccttctccaaatacacaaagggttctattgtttgcttgcaacatctaagctattccctggtgataagttaggacagatagcagcaattttcagagaggaagtggatacggtttgggttatggttgtttaggagcagtcctcaaaagagtttccctctctatttcagggtgttacctgtgcccagcccaaagaaatctagtctgtcttagaaattgtgttaatatgctttagggtgcccgtcctgcccatatccctgctgtaggtaaaatgcctcagtagcctcacctgccaagtgatcatcaggtcacaggtttaattactgccattacaggggattggactagggtggatgaacatctgactagggggtacctatgggctggtaacctttaacttccctaatctaatttgcacaagtaagctagattaatcagatgccttctgtgaagggcttgcccttaaaattcaaaggaaagtgtacggttattgtttgaataaagggaaatgcaggctggggttaacgtagccactagcacatgattcatgtgcaaggcatgtaaacagatgaagccattctgggtagaggggtaataggtcagattcaacaggggcggagagagcagaaagagacatttcaaaatctgtgttctttttgtccttccaaggcatcattgtttaatttttttctggatatataaacccctcaatacccttacaataaaccctattttctacagctagtttgagtgttatgttccttacaaccaaagacccctaaaaagagccactaagattgttactttacgccctctgtaagttttcacctactgattctggtgcttatggcaatgctcttcttcagcagacaatgaccatattctaccttcatccttgcccataccattgtttctatagcacactcagtacaaaaaaattaaaggagaaaaattagtatggatggaaagagggatagatagactctgactaggcagtcttggggaatttttgagctattgactgaatattctccatgcctattgccatgtcatcatcaggcaggttataggctatgctgcagtaaaaatggaaaatcttggtagcttaacaaaagtttgaatttctctgcaggtctgggcagccctccaggctgactcagcattccagcctcctacaatcagatagcacaaatattaacacctggttccacagtcacccaacagggctggagagggctgaaggtctaagccctagcaatcaaatgcttctgcctggaagtgatactcatgaatgaccacactcacattccataggctgaattcatcatttggctaaacctaatttcaagggaggcagagttatgtgattctcccacatgtctgaaattagagatcaaacatttataaagggtaataatgccaatcagcgtatctaaataacccatctaatcctgtgggacccatatgctactcattacaacccagtgactaggacatttgtcttatctgtttcacatgccacagttagtcctggaattactgtggaacatacgcgcacacacacacacacacaaaacatattactaaaaattaaagtttttaattaaaattttttgggtaaaaatttactttttgttcctcattcatgacctaagaatttctgttctgctaaatatatactacctacctcccgtgtaattgtaatgcatagtcagctatctaaggttggagtacctagatgcggaccctgagataaatattcatataaaggtgatttattaaaaagtgttccaaggaaaaaccaggggggaagcaggaaaagtgacagggaagggaagaaagccaagcaagggtgatatgtcaagcaaagatggttaactttggcccaatcctgtgggggtcctctggagacttataagtcacacctctgagctgttcccatcagggagcagggagctgagtatttgtaccaccaggcttgtgtgatcagactgcctcggagagatacgaattcctaggcacttcctgctctctccacgtttgggcaaaggccaaggaagcctgaggacagtggtctgacaaagatgcagatacaagcacagagggagctgctgtggaaatggaaaagtttgggacaggctcagggttgaggcactgagagcatgtgctagtcagaattgatagccacttggatatagagggatggtgcaaggaaaatgaccagatcaccgacttaaagatgcagtggggaaa

SEQ ID NO: 42983 - DNA, 656 bp, Homo sapiens
gaaggatggcttggtgatttatccatacagtgaagtcttgggtttgcacctgccagccttcttagaaacattaccactttggaaaacactttttgtattaactttccagaccatggttaaatttaaatctctaaccttgttaaagcagacctttggatacagtttgaggggagatttttttttttcacccagagccaagtatgacacaaagttcctttgtcatatccattttcaagtgtagagattttaatgaagctcacactttcctggtggatgatgtccttcaaggttcaaagttgtatgagtcaccttcattccaactcatcaactcgcaggtgcccagggcttcacatggcctttaaaggccaagcctcttgattactcagcccagcaaagcctctatgactgccaaattgccagtgcctcattataatactggttttcaatttctccttattttggagacactaggggtttcgttgttatttgtgaactgaaacatgtgtttatccaagattgcaacagatttgtttcaagaggtttttttttcactatcaaatataaaaaaatcctggaatgaaaagctgagctcaaaactctcaatgtaaaaccatacactaggtttttcagtagctgatgatcactgctgagaaatg

SEQ ID NO: 42984 - DNA, 2486 bp, Homo sapiens
aaactacactttgtctacttaacaattttaagaactacccaatcacagagtatttattatagaaataattaggaataatttgattttatgtttacaaagaggtatgatgtttaactgctcctacgtagtttgaagcttgttcttaaacccaaggtattgccaaatgcctagtagtaccctgtttattactgaaaaaatttttttaatcattttggataaatactagaatcaaatatttgacctgacatatgacaaggaactaacaatataagcctagtctaccaccatctggatgaccaaattagaatcttagtctcaaggccgcccctgtttcagccctgaatgcctcatgtaatgtacacaggagccagaactacattatatctcgttttcaaatagcactggttacgcaccgggcaactgttaaccagggtggcatgtgataatcttccttgctaaccttgtaggaagtgtgcgagccgttatctttctggcaagatttaagtaactcattcctatctaaaaagcatctgttaaagtggcgtcacaccctcaactacttcataaagttttctataaaatgttaaaatcaccagagtcggacctctcagttcatcaggcgtaaaactgcagtttccggctgccaaatcccttaacaacgttaaccttttaatccttcagcctcgtctagtgaaaagcaagtgtcaccagataccgccttctacttgagaaatataacaagattctttctcctgcacttttcccaaataaaaacggctcatatacaaagtgaagtctagggacacccacagtacggagggctgcccggacctggcggccttacctggttgaagtgcagctggccaggctccgggacgcccacgcgggaggcggctcccatctgctccagcaagtgctggagctgcgccgccgacaggctcagattcgcgccgaacacgctcagcacatcctcgctgaaggctagccctggcccctccgccactcctccgaggccggcggccgccagcaacaggagcccggccaccgcgcgacccggggccatcctggcctgggcttccccttgagggcccgcgacgggctgccgcgcagagggacgcgcgcgggcgcactggcgtccttgcccaagggcgggagcgtcagtgctcggcgctgctccgagtcagaggtggcgcgggacgcccctggttctccgacgccttcgaaagaacagcagctcgcgacctgcggggcattgaagtggcagcgtagccgaggggagcgataggcggagtgggccccccggcctcctggagagcctgagataaagaggacaaagggggacagagataaaggccaccagggcaccagccggcaggctccagaaacgctgcgtggcagtagccctcaaacgcccggccgggcatggggccagacgccccggatccgggtttgcaaacgccccaggatttgcgtacatatgctcctcccggatataaagccccaaaccacgccacttcttaggaaaaactaaaaccacactaactgtagaactccacctcctcttcctgtctttctgctttattctctccgccgcaaacttagaagtgagacgtgcagtccccaaggagctgcagaaaagggctcttccggagtcctggggattgcgcgtttaaaggggaccctccctctccccggatcttctctgagcttggcaagttaatcggaagcactcgctggcctctcacctctcctatctgtttgtttgtctgtctctgcgtctttctctctgcgtgtcaacgtaagactcggtctctggatctctctctctttctgtctcccgcccccacaacctctgtatctctgacaggtccgcggtgaaactccgcgatccgctccggcgctctttacaaataaggggaggagggccctgtccccgcctccgtagcacgtggtgacccatttccccagcctgaactcccgcgcgcgtccacgccggggcgcaggaccgccggccttccctccgcgggcgctgctcattcccagcatcagccatgccctcttccccaccctcactcctgagggttacctgatgccacctccgtgtcggggtccctaactcctctctggtctcggggacgcatgcatcttttcgtgatcttgatgaaaccaacttgctgaaatggagcctggagacccttgcattgtctacataattaacaggaattgcttttttttctcacttcttaaaatcagaggagaaagaggaaatccaatggtagcggtggcgggctagctgagccagcactgcccaagccggcccttcctggcgggatatccgcagatcagaggaatgtttatttgttcatatgggagctcaagaaaagctgacttaggtgtgatgtcaacaggtttgtgtaaagtgagtgtggtgtttgaggcaaagtttgtatctggtggatatagtggttcaagtgtaaagtgaaacc

SEQ ID NO: 42985 - DNA, 852 bp, Homo sapiens
gagtgaatttaaatcaaagacaaaatacagaagaacaaatttgttttaaaatgtcgattcatttaaaacaaaagtcaaagttaaaaatcataagcaatacatatttcaaatttataatcttcttttgatataaatattgatagagatgatcaagaccattacctattaataagctgatctacatttgagaaacaaacaaacaaaagaatgcctactgactgggcttcttgccaagagcccaggttaaagtacaaagagactgcagtgtttgatcagcctatgaagtttgttatgaagaacctaggtgtgcttggtcacagtgtatttttaccttcaattattttaaaattgttaaaatacttgcttttttattttttaattgttctttaatctatatcctaaatatttctttttaaaaagttgtaaaactctatgattctcaactttgtactgactacataacaaccttcaaaggacctgttcacgtgactgtgcgctagtagcctctggcctatgacgtgagcttatttaatatttagatagtataagtatatatggaaaaagaggcattttttggccagggaatgccattagaaatgttgtgaggattaaagtagatagtatatataaagtgtctagcataaagccacatagcagaggctcagtaaatgtaaaatgtataaaagtatgtgcatgtgtatctcaagcatggtgctatgctttcatatacttctttccttttccagtatatcccacaatgccctaaaaggatactaatgatgattaggacattggtctgaatttcatatcagaaacatttgtggccagatgcagtggctcacgcctataatc

SEQ ID NO: 42986 - DNA, 1336 bp, Homo sapiens
atggaaaaattctaacagttacagtttgttaaaacctgtaaacaaatacccaattagcagcaatctcattgagactatcagaagctgaaagaaaccacactcaacttcataactcaagtagaattccccttgcgaaaaaaaaaaaaaatccatggtagtactggactcaatacacaattttgctaccaggtaaccaacaacaaaaaaaacagtttgcataaggtcaactatctctaaacacaaattcacagttttggcaaatattctccaaggtttaattggtttatatcaaacaactccaaacagcatgtcagtcatttttattagtaaggggcacatttcacaagtaattttctctagagggttcactgagaagctttcaaactcagacatttctcagatggatttctgagatttttctcggggtaattctgctttgaaaatcttccaggctaaaattgccaaagccacggtctacagtgtagacctttggaactttgttgattgatctgcccctatcctggagcagacccagaattgtattctgagaaaaatctattaactgtctatagtgctcctaggccttctccatgcagaggtaggccaatgtctattcaagacaaagtctagcttaggcaccttaattttcataaggggacattaacctttttctctttgctcaattgatctctaaaatacatactttttgaagtatattagctttataatacatgtgcttcaatcataacaccaaataattgctctaaggcatttttcagataataaaatacctgacagtcactacccagcttttatcaaaagacgtaagaaataatattcatagagaatccataattaattcataattcaaggagataaagtctacccagcccaacaaatagtttagatttttatccctggatcaatccaggcatgcgatgtggctgaagtataagttacgggaagggagaggctggagaaggttgtaaagagacagccaggcttgggattatatttcaaaggccttatagcccatttattcagtcaccatgaaatgctgtgtcatcaaaggatttcagataggtaggacgctgttacataagaccaggtaaaaggtgattagtatcttagcagaaacagttataatttgaatttaaattcaataggactgaaaattggttgaatgtaggagacaaaggaaaacagtcaagatgactcccgtagcatgggccctgaatggagaatacagaagaaacaggttggggcaagaagttaataagctcagtgttaaaaatgctgagtttgataccccatagagtatccccagaaatgactt

SEQ ID NO: 42987 - DNA, 954 bp, Homo sapiens
aggaaaaaaaaaattatgaaatgagcagattaggagaagaccaagaagagattatcagaaagcggcaaacatcaaacagtttcaagaagaggctgtgaccaattttcccaaatttggcaagtagggccaataagatgagttaaaatgatcattggcaacattcacgaattgtattagtctagtgatgggagagaaaattagagatcagtcagttaaggagtgaaaagggagtggaaaagcagtggcaactcatggacaaaaaggaagaaaaaagatggaatgaaagacaaaagagaatttgtggtcaagaaagggctgactttctgtttgctgtgtttgttttgttttgtggtcatgagaatttattttttgttgttttggggtatttcgtttgttcattttttaaggatgagaaagatttggggtgtatggactcaggattggagccaacagaagggctaaggtggaagataagaacagagtgggaatgactgatgaagcaacattccaggaatggagatggggaggaaagaaatggaatcaagggctccaggagagggcttggctttgtgctagaaggacacatcatcctccaaatatgtggaaaggagttaagaaagtgtctatatattagtaagtgctgggcagggtggacaattgatggatgactgtaactttctcaagtaagaaacaaggtggtttttgggagcctgaggcaggagaatcgcttgaacccggaaggcggaggttgcagttagccaagatcgcgtcactgcactgcagcctggcgacacagcgagactccatctcaaaaaaaaaaaaaaaaaagaaaaaaaagcagattaacaaggtggtttactgagaacattggcagttaaatgttgaggaaatgatgaagatttggaatagaagccaaagaggatgataaagaaagctaagcaaaacaagtaaact

SEQ ID NO: 42988 - DNA, 2357 bp, Homo sapiens
tctcctaagtacaaacacagtatctctgaattttttagactaagagattaagacccagaagaacaggaaaatttctttttcccacccatgttagtcgagttcgaagaggggaatttcttcttccaaccattgttagtccagttcccagctaagaatctcctcttctccgagtggctgacctcagggattagcactcccttgaccagagatgatgtctacccacaggggtgtggcctcccagtctctacaaagtctcacaataaaactgactaaccacctttactcacacagaagacagacaaaaacagtatacaaatgtgtattttgttatatccccaaatcccattgttacagtgtgacacagcataataattattaaatattttccttttcagaggaacacttcttattctaatctttagttcaccctgcagtaatgttggggaacagctgtggaaagaggaaataatccttctgttccccaccccaccacctctatcactattaaacacatttttgttttcagattcacgaatttctgaacatgtattctccatacagttttacaaagtgactctttttttcagctcttgaaattaatacctcttgaatttagtatgcaaacatatgcaagtattctggaaatgcaacagaccccagatgactagctaaagcttagagactgtatgacaaagcactttgagctccccagacacatcagggccttcccagagagtggtcttcccatgcttgtagagttgggttaacatttcctttgggtaatttgaatacttcaacttcctcaggctgcaggtcctaaagccttttgtatacaggaagaatggtttactacttctttgagttctggcttattaattatagcaattattttgttcacctatacagcatgtcaaactgttatttatctgcttaatcagcacatcaggaaataaaaagccattgcctgtgtaagaaatactgacctgatgaaatatcttggaggcattcctcagtaccaattaaaataatagacattgtcacatggtgcaattattttccagaaaacagctgacgtgtacacactaagcttggcaaaattcctggctaatttcgcaagaatgtttattccaaactgagatcatctttttaaaaaaagaaaaaagacacagacaaagagggtaaggagggagggggagatgaaagtggagaggcagaaaaggaagggtaggagacagaaaggaaggaagggtcgaagggagggaggaagaaaacaaataaggaagggttcttcataaatcaagagaagatgttagattttaaagtcgtcttttctctatctgaccagatatctacctaatcctgcaacgaaattttattaattacagaagaggtcaaatatttcatctttaccagagattcattaatttaaaatgttctaacctcaaattcacattacaaaatcatagcattaggtctttttcagattttaataatttccctaattaacacaaatgattttaaaggaaattaatcaagaaaaactttatttcagagaggttcatggaagaggaaaatatagagtgaacatttacaaataaaaacaaacattatagaaatgcagagtcatgactgatgcattccaaccttgtgcatgtctggaatacatctgcaaatcatctgctcagccttcagaatagtctgtacacacacacagatacagccacacatacacccagagaaacccaggcattgtcaagcctggaggaagccaatgttgacatgtcagtcctttatctggtaagaaagaagcatgaactgctctatcacacttagtttgtttctgatttctggatcctactaaaaagcaaggaggatgaaattttttttcttttctattgattcagaatctggaattttgactacaaaaaaatttttttggaaatcttgccattagtctaaggcagggggttacttaggggttgaaatctattagctgctaatgtttttggcttagtgagaataacaggatttggggttctgaagggaaatagagtttgtagcttgcttaaaacttactgtagacccccaaatattaagattttaacatttgtattattaatgataatattattctttttaaatctgcgtactgtttttctaaatgttgggttctagagaaatatatttgaatagcacttgcaacttccatgagtttcttaccaatagtaaagttatatggtaggaatcccagataatggcttcacaactcaatttggaagattatgtatagtttaaagatgttatgctaagtttgctttaagtgctccattcagcaaactatgtgcaaaaaatgcaga

SEQ ID NO: 42989 - DNA, 1532 bp, Homo sapiens
cttttagtaactcacattgacagaagggtcagatttgtagaagttaataatgcatctttattttgtctttcctttcctcttggttctgcacttctgctttccagaatcatatttctaagtaaacttccggtacataagtctttgtctcaggctctgctttggagagacccaacctatgactgggatgttattccagcacacattaacccctaaatttgccccgatctattattgcagactcccaacaaccatgcgtctacaatgtagtcatggtcccctggtcatacctgataaaactagggaaagaagcctaacagacaaggtgggcaactcagaaatttccccaggggttgatgggaaatggactgaggaaaagttgttctcactgtggtggacgaagcttaatgactcgctttgcaactttactggagcacattcagtgagctgatggtcagaactgaggaacttcatccataagcagttgtcaaaccattgggagttggaaatagaccacggtgaaagtacctacattagaaaaatcagcaactgttacaaatccagtctttttccacccagacagccaatttgctagcacaccactgccttcttccctttgtagtattctaacacctgagaaaggatgagtgcctttgttctgtttacagagcaaagtacagatgaagcaatacgggtcaggcaaaatcaaataatctccaaactaagagctttgttaactcctgttggggcacacaactttgggctgaggtctctcctgaaatgaagacctcgcctgaaacgaattcttcttatgaaataattttctctgggcccacagggcaggttccaattgatctagtaacctattattgggcttagaaactaaactgagcttgccagagaccatctttggtctggtctagttagtaccaggagacaaaggacaagtgacaacacaggtccacgaattaacaaaagacaggagagacatgggactgtgccacccacaatctgaagccatgacctcaccactgcttagcaaacctcagtgtattgcttgatgtcactagtaacacaaaccagtcctcctcctatgaggaggaacatgccacaggaataggaagaaggatggaattgcttcctctgttggggttcagaaaccaaaacatggcacttcgatatgctgaactgaagaagcagccttaaggtttatttgaccttccccctacctcctttcgctcaatcctgtctctctcaaagcacaaggtgaagttgttctctgaagatcccttgtctgcctgaagtctagacctggcaataaaggaaacaatgaccactgttttcttctttgaatttttattaaccgaactaatacacaggaagaaaagctgaagtctgtcaacaaacctggacagaattttgtcacaaaccatcgtaggctcttcaggcccaatagattttgtcccaggccattatatgttctctaagcccattgaattcccctgaaaatcagttactaccctccaaaaatcatc

SEQ ID NO: 42990 - DNA, 2582 bp, Homo sapiens
ccggagctaaatgagatcacttaaaggtcgactgttggggcctccaaggtcgcctcggagactcacctcataggcaatcaaatggatcgctgggtttttgtgtgtgtgggttttttttgtttattttttttttccagaaaaacactccaccaagaaggtttttataacctactggaggaggaggatggagagtgggcacgaaaggactaggatgaacatgccataagcaatctaaatgccactgcaatattgcctggtgaggacctgattactgatgttttaaagctaagctttcagttgtcactccacccagtagtgaaacaatgagctctaaaatatatatttcggctcaagctttcttatgtggggaggtaatccacccgaaggtatccccagcctgtacctaatacagtgcccagcactaaagcagctcagatgccagtgaatggtggccactgggaggcctgtcagtgggtgccagtagcggtctcttcagagaaaaagaaaactcccctctgccagatcagtattttatgagctgtgaaccaaaaccattgctaccaccatcactataattctatccacagtaattatcataaaggcctaacaatgccttgtagatgaacattctgagtaactgctctataaccaggagatttaagaccgcaccaaaaaccagtagagggttatactttactgggcacaagtcgtttatgataacgaaattgtagtttaatctgtgaagagatgtgaatgtaactgagacacgcttaaatggaatatacagatgagctttatttttatatctggcatgcttggatccatgccgaccctccagctgctcgggcctgcccttaggggctatggaccgcatgactctatcagcggcactgccaccgccgccgcctccgtgctgcctgcgttccccgaccattgattgggcccggcaggcgcttcctgggggcttccctaccggctccagcccttgggattcgggagcgccctgctaggaagccagagccccgcaggggccgcggcgtccaggccgcctaacgcgcgcccctcgcccggcgccccgaagcggccccgaggggcgggagccgaggcgagcggcaaggccgggccgggggcgcacagcgcccctagaagtgcgggcttcccccacccccggcagcgaccctacctcccgcccccgctgcgtgcgcgcgtgtgtccgtctgtctgtatgctctctcgacgtcagtgggaatttccagccaggaagtgagagagtgagcgagacagaaagagagagaagtgcaccagcgagccggggcaggaagaggaggtttcgccaccggagcggcccggcgacgcgctgacagcttcccctgcccttcccgtcggtcgggccgccagccgccgcagccctcggcctgcacgcagccaccggccccgctcccggagcccagcgccgccgaggccgcagccgcccggccagtaaggcggcgccgccgcccggccaccgcgcgccctgcgcttccctccgcccgcgctgcggccatggcgcggcgctgactggcctggcccggccccgccgcgctcccgctcgccccgacccgcactcgggcccgcccgggctccggcctgccgccgcctcttccttctccagccggcaggcccgcgccgcttaggagggagagcccacccgcgccaggaggccgaacgcggactcgccacccgggtaagccaaactcgggcgagtgggggcccggcaggggacgcgtggcccaagtcctgccgcccagccctccgcaccccctccagccccactcggacttcctcattcctgcgctaaccgctgggctagaccgtgggaggaggttgacagtagctgagaggcacatgggattagcgacagcggggaaagacacatccggacctcgcaggggctagtcggccgaagggccgcggccgcccggcggtcatttctcttcacgtccctccgcggggcgggaacgcgaaccggaggggaactcttacaaacttttaaaatccccaaccccagccccacctgggggatggtgagaaggttggagtgcgctgcggcgcggaggagagagggaaggtggttggtgcagtgcagaaccagatttcacctaagggcgttccatgaaatgaaagcagaagtgcttgtcagtcctcttggctgggaaagccctccccagctccccagaattgaataggagagtctattcatccctctcctacttctaaaagaaacctggctcgctctctgtctctctctctctcccccctccccccctccgtgcgcgcgcgcgcgcgcacacacacacacacacacacacacacacacacacacgatatagtcacctgctataggacttgattctgatcctccggggcctggcatttgagagagaaaataaattacctacctggatacttagagcactttttagacttgattatgtaaaactcttggacagtgccaccatgcattatgcatgaccgctgaaacaaaaataatgtaaaaacaaggcctatcctaaatgcaagtttttctatggtccttaaaaaca

SEQ ID NO: 42991 - DNA, 3463 bp, Homo sapiens
acgtgggaattgtggaagctataattcaagatgagatttgagtggggacacagccaaaccatatcactcaatcaacagaggtcccaaccggctaatcacttaaaaacaatccatctgaacacctgcctccctcctttcatcaaaataatttccaaatatatcaaaaattaagccataaaaatattagaagtactagacgtcattgattgataaataatcttgatatagggaaggcttttctaagcaaaacttttcactggtataaaagcagtttaggttcttcattttacagcacctcccaaataaatagaatctcaaggagaatcctacttatgttttctattacattgccatttctccacccctacccagcccctacccagccccactgtaaagtgaaaaaatacagctctgattttcctcaattcttaattttccaacaagcagcccatgcctccacacctctgcgggttcctttctgtggcagatcattgttttccagctggccactacaaagcctcctgacctacaacatgaggctgacactcctcccactgaggggaggggcctgggttccttctctgagaatctaagcaaaagtgacaaggacggaggagatgctaagtgacttccaaggttaagtcataaaatggaatacaacttctacccccatcgtgctgtgccctctgtcttagaagctggtcattgtgttctgagggagccaagtggccacatggaggaaccaagtgcaggtgttcagtccacagacttactgaggccctggctgatgccagcatcaaccaagagatgtgtaagggagtgaagctttcagaagattccagccctcagccattgagtcaccccatctagccctcaaactgcctcagctgatgccaccatcaaccaagagatgtgtaagggagtgaagctttcagaagattccagccctcagccattgagtcaccccatctagccctcaaactgcctcagctgatgccaccatcaaccaagagatgtgtaagggagtgaagctttcagaagattccagccctcagccattgagtcaccccatctagccctcaaactgcctcagctgatgctgcccagaatagagacaagctgttctgcagagccctgcccacattgcagattcgtgagcaaattaaataatggttgaggttttaagccttaagtgtggagtggattgtcaccatgctccaggcttccaacttgacagctcacctaccagaagttcacttgaagtgaagctgacttgaggaggaggaacaactaagcaactcatgccaagatagaaaaatcacattccccttctttcataagaagccccatttctcttctgtcccaaaaacttactcttcctcccagatctcagtgctggcctgaacctctgtgtggtgctgcaacagcaaggccaccagtgctgtctgggtctctgtgaaagtatctttcatattgtaccagcagatggagataaaccaaaaggaatgcaggagatcaggtggaaagctataatgggcctgaaataaaccttcccagaaagcttgtgtcacagcaggaggccatttaaaaatagcttcctcagaacttcagtcatttttgaggtttctatactctgcaggcataacccagactttttcaggatcagcggtctttcttttcagcagaacgaagccctgctgctgctcatttacctatctgcgtcttctgaagtagctgaatgtggcacagacgttcctggtcaccactatggaatgcagctgcacaaactggactttgtacattttaacaggaaaaaaggaggaggggaaagatccagccagcatggagcatttattacatgccagcccttttggattaataatttctaatgataattctcaagacacccctattaggtatatatttaaccccagtttataaaaaggaaatgaatgatctgaagttattaaataactcgccccagattcaaatgccggcccatctgattccaaagactattctttagtgaggtttgcagtcctttgacaaaaacatgctttatttaaaagagaaagaaaaatgcatacagtcctgtacaaagatgatggagtcgtcacgtacccaaccaaaatgcaaaatgaacccaaagtataactaagaggacatattgcttggagacttgattttccccctaataaaaggcaaggatgccttaaatatgaattattcattgactggaagttattgcatttctttcagcctcctattttgtgcttttgggggaaattctgtttctgacttgtgcttccccagggaatggacatgggaggcacaggagtcaaaagaggatgaaactaaaattctgtttattttcttgaagatcacagaacttggggttggttaagatcttaaagatcaccttcctaaactatccaagtttttctgaatgcctacaaagtgagagtgtctcttctccattggcctcactgtggctggctgcttcatgtaaataccaatcctagagactacaagttcctgtccattggttttccaggtttgtcatttggttttggaattgggggagacactgaggagaggcttgaaattaaatggatctccttcaattaccatggatttcattatgtccacaatagcctttttctgttaccctggacaaatgaatagttccacaagttgttcaagcttcttaagatgaaagggaggaaggggctgagatagcatcatcttacttctgtcaactagcttttccacgttgatacctctttccaaagtgattatttcattgaactatcacaagagtcttcaaagaataaagatatgtgttcaatcaagatttcttgggcatctgttgcttgccaggcactacaatgggtggtcatggggaaactgagacacatgagaggcatgactgcaggatcacttgactccagtaacaacactgcagcagggtcaggggtgagtagtgtctctcttccacttagccacacatggatccaggctgacagtcattcttcctccaacgcttggctcctaaggtcttgctaggggcgatagccccagtcagccaggagaaaaatgttgagagaagtatgtgagggagttttgaatgtgtcacctcctctcatgttgtgctggagaaaaacttcagtcccttggtcacactaagagcagtgaagatagaagggtggtctacttctgttcccagtattaagagagctgttgattttggaacaggtcacagcctttggcacaggtaataatcccttcactgagggaggctgagccataaggttctttctagttgcaacttgtatgcagatattcactctgaaagtcacctgcaatcatggtaaatggccatcactaaaggcaagatcatttcgtaggattaagcatgaagattgcattgtaagcacaaagtcacagtttttcttaaggaaat

SEQ ID NO: 42992 - DNA, 1341 bp, Homo sapiens
gctacattacttggccaaattctacttatccctcaggacacaggctctgggaatcttcccagaatgcccctgctctgcacttccatggcactctctacatctctagagtgctaatatattccaatggctcatttaatgattgaacttcccaatcagatcattagttctactaaggtctcagagagaaacagaaacagtgtcttagtcacagctctatcaccagcacctagcaaaatagccaaaacacagtaggtgtgccctaagtatttactgaatgaatcagcctcaaaaaatagcaactctacggcagccacagccaaagagcacatttcacacacatgcattaactcaaggtgtggggcagttaaacatcctccttaaagcaaactcctgttgctgctcgattcaaaggctggcatctttatgtgtaatgaacaataatacagtcatattagcctgaatgtaaaagaattatttcccttagaaaaagacagaagttcctcttctttctctgtagtaagttggaatgactcattattttttacattttcatgaaaacaacacacaacaaactcactgtgtgagacagcacacatcctctcagccaagaggggtacgacaagagtgaatgctttggcccttaagacgggtccaggatgttctccctgtacataactctgtgcatgtgtgcgtgcgcgcgcacacacacacacacacacacaaacacacatacactctcttcccctctcacacacacatacacactctttctctctctcccctccccccttacacacacacacacacacacacacacacacattcacagtgtctcagaaaatacacagcatgattgaacaaaagaaaaacagaaaatgcactcctgaaggacatatctccatccttagcatgttgtctggcccacaggagaggaaataccaaatgtaagaggtgacaccagccaactgtaaacaccgaagctggtgtctgggagaggaggagatctttgaagagggttaataccatttctactaactatatgccatgactcttataagccagatccaagccatctcgttcttattgtccctattttacatattttgagattaagtaagtagcctatagctaataaataacaaagtgcagttctttccaattcctagtgctatatcctaaaatgggtaaaactgaaaaatcagaaaacaccagtagaagcaccttattcagaaaaatgaagaagaatgtcagaggaaataaataaaagttaaaaatggttggttctggggagtaggaagtaagaataggaagtgatgggcaagaggtcttatttttcatata

SEQ ID NO: 42993 - DNA, 1477 bp, Homo sapiens
ctaggtcggtctctaactcttaggctcagggaatccacccactttggcctcccaaagtgctggaattacaggcatgagccactgcgctcagctcagaccacttctcacaccagattctgttatttatacctgagaaaacgtatgggtggtagcatgggatgaagggagattaaaccattatttgattttagtagcgaaaatctttagttggattacacctcagaagaatagtttgggaagcactaaactagagaattataagcacagccacatttacatgtgcaatttaaattagatcttttaatgcctttttaaagtttaaaaataccaacagcaccaaataacctcctcaaatctaagcatctatcatttgctttcatcttctgccttcagaaaatacagatttggctcaattgaatagcaagctaaggtcaccagggctctcaagataacagaactcttgaactgacacaccacattctttcttactgatttcatctagttaggcctccgtgtgattacactgagcattgcacgctctcatttaagatctcacttgcctccatcttcatccttcatttccctaacttctcaaatcctcactgatctttgattttctggctcttatcttggaaggttatttgttttgtttggtaattgtttgtatctcccctccccacacatgaagggatcagtgtacctactctatttcttttatcaaataaacacagcgctgagcaaagaaagcaacaaatatttaaccagcttttaacttatccactgacatctgtgagatttctgaggttctatttcaatgctccttgatattgaatagttgcttcaacttaaaaagtactatttttcaccttagaaatatttcttttggccaggcgcagtggcttacgcctgtaatcccagcactttgggaggctgaggcgggcagatcacctgaggtcaggagttcgagactggccaatatggagaaaccccatctctactaaaaatacaaaattagctgggcgtggtggcacatgcctgtaatcacagctactcaggaggctgaggcaggagaatcgcttgaacccgggaggcagaggctgcagtgagccaagattgtgccactgcactccaggctgggcaacaagagtgaaactccatctcaaaaaaaaaaaaaaaaaaagaaaagaaaagaaatctttcttttgccctgtttaccttccagtttatttttaactcttcacaaggctgttgtgtcagggcccttgtgtcagggccctcagagtagtgctctgggttatgaagaaaatgtacagagacagaaagccagtctaacggtgtgagcaaagcaagaatttgacactaaaagtgactacagaggcagcaaaaaggagcacagccagcaggcccagttctttcaagaaagaatacttatctcaggaaaacttggcgctgctcttccattttattttttcctttt

SEQ ID NO: 42994 - DNA, 2017 bp, Homo sapiens
aatttctacttcttaaaagaaaaaaatattttcagaacagttaattaaaatgtgtaaagctataagttcagcttttaaaaaggaataagtttgggtcatacattttatggggggaaaaaaagtaacaagcaccagaggaaatactaaaatccttctagatggagtcatttgtgaaatagaacctgaagatttggccaaactgttgtcatttgggtattatttccttagctctgtactcacctaagatagagacaaatttgtttttactatggagaaaaacaaagaactaaagttactttatagcatccacatctgtctaaatttaccacttaagcaccagattctcatattcagaatgaaaaccatcttggggacatttatgggagaattttagtatctatttgtaattttttcattggagatagggaaaagaaggagagcaaaataatcaacatcttatgagggagactattttccccattaagagctacaaatcactcttaacctcttcaagaagtatttattaagtgccttctatgtttcaggctgggagtacttcaatatacacaacagacacagctcttctgcttataatgctcacagtcaagcacgaaattcaagcattgaataaataattacaagtataatgagttttacaatggaaataggcagggaacatacagtgagaggttgaggaggatgggtatcaagatgagttttcctgaaaaaaaaaaaaaagaccctgaagggtgagtaccgtttatccactgtgagcaggcaggaactttttttttttttttttgagatgtctcactctgtcacccaggctggagtatagtgacacaatcttggctcactgcagcctcaacctccaggctcctcccacctcagcctcctgagtggcagggactacaggctaatttttgtatttttttttagacttggggttttgtcatgttgtccaagctgatcttaagctcctgaactcaagtgatccacctgccttggcctgccaaagtgctgggattacagtcatgagtcactgtgccggcccagaagcattcctttcagaaggaacagcatgtgcaaaggtctggaggtgcaggacagtctgatgcattccagaagctgaagagagaacaatgggaagaggcagggagatgactggagaagtgagcatgggccagacagagctaagacccatggacactggcctaaaggcaatgagaagctgttgaagagtttgaagaaaagcagtgctgtgatcatttttttctgaaaagaccattctagctgctctgtaaatgattaactagaggaaggcaagtgaagtttcagggatgccagttaggcaaccagggcaatatttcatgcaaggcatgactgaactcaagacacagtggcagaaatgaaatgtgaacagactgaagagctattgaagaggtactattcacatcatcaagaggactaagcaatagattggaagagagaaaaaggagagaaaggtgtcaagaaaaactcaagtttctggcttgagcacctgttgtggatagtattccattcagcaagagacagaaccctgggagaaggacttaaatcacaagtgcggtgtggcgcatactgagctttaggtccctgtgaatcagacaagtgatgatgctaaataagcatctgaatgtaaggtctggaattgaagacaagttggacggaagacacaatattgggagacaatggcaaatagatttgttatggaagaaatgaaaaatgagatagcctagagagggtataaaatgagaaaagagtctagaacagagaaaggccctataatataacttttaggagaacaaggatgtggataaagagacttacaaggaacggccagagatgtaaacggaaaacaaggaagatggcatcaaacactggtaagagggtagcagaagtgatgagtcccactatccattctggacagaaaaggaagcagagacaataggggacttaggttgctacagggaaagtg

SEQ ID NO: 42995 - DNA, 1854 bp, Homo sapiens
ttactatacagagttgttatgaggattggacaatgtatgcatcccacaagtagatcaattacaagtacattttgccccaagtaaagacaacacgtgggaacgctgtgcaagagggaacagcaaaagcagttggaggatggaagtcagtttgcaaacctatgcgcacaggcagccaaacacgaaaacgttccccacaagtagtctgtaaattggagactccattgggatacacacacacacacacacacacgccctgagaggaaatagcacctttcttcatcaccaagttagccttaaaaattatttacccgttgttagccacactagcactgacaaacccaactttactcttgtaggtcattctccacaacgtctgtgctgcgtcaatcccaaatctgactccctgacgcttaacagcgaaaataaaaaaccgagacattactcaatagagttaacccttacttaacaaaacgctgttgtcccctgtggcgtgcagacagtagagacagtaattcccgaccttatgcttgtcagtgacggcatgccctttgtatacacgcttcagtagagaacgactgcagtaagtaaactgctagtagcaacactgttcccctatctaaacttcccctttccagagttactgatgtcccaacatgggtcggtcgctcagtctccgtcaagcccgtaccccatagcttgggcatttccccccgcagatcacaagatgcaaaggggaagttactaccaaaccgacgagaatggcccagagctgggggctgccaggcggttcctgggcccctctcagcaccagaagaaggcgggcgcaggctcgccgcgggtcggccgcacgccatacctggatcaggccctgctggaacaaggcgctgtgcacgcagccagggaccgccccgggcagctccagcgagccgttcccattgcagatgctccagttgccacgcaagctgtaactgagctccgcggcggtggtgcctgcaccgcacagcgcgagcagcaggagcaggtggaggcgcatcttgagatcccgcgccaccgagatgtggagagatcgaaaggcagcgctgcaagggaccggcggtgaagccactcaccccctcggaagtagccgaggctttaggtccccgccccggccccgcccctaggtcagctgagcgctctccgggcgcagccgcgggcgggaggggaacgaggaggctgcgcctgcacccgctgaaagccgggcgtcgcgggtgcgggagctgcagcccccgagaatagctacaggctggggggcattgcggtctgagccttccctcggcgcttcttcccgccgcctcagtacatacaactggaggcaagaatcttgcacggtaattgggacagaaagatccctgggcgcgcagtggcacaaagcctcgggagatcagagaccgactgtacgtggagaccatagctggagagtcccctcactccttcagagaacccaaactgggagacaacccaccacttcccttccgccaaatttacacagaccctcgtctacctggtagcgtaacactcaccccgctgcagctcaactcgcgggtctcagagcctaccccgcccttcaaagagtaaacaagtactagcagtatctccatcagaaggttgttctgagggctaaccaagaaaatgcgactatagcatgcagcatggagcctggcccagagaaggcattcacgttagctattgttactagcggcctgcgtccttatgtttcataaagccccacggaggtttctgaggttctggaacctgcactaggcgcgcagctgagtttaaaatcctctgcactcactagctgtgggacctgggcaa

SEQ ID NO: 42996 - DNA, 497 bp, Homo sapiens
ttgcagccatcagattcctagctgttcatattcagaggtatcttgatgtgatgggatactttgtttacccccttcgcaggcaggaactggagtggttctttcactctgcccaccgctggccactcctccgctcaggagggagggtgcgagcgagcaagtgcaggaactgaagcgaacaaacactggaactggccagagtccaagcatgttatgaccaatactctgtcagatcagccgtccagggacaggggagtgccaaccagctcactggagggtcaaggtggcagcctctgacctctcagcacccaggttcttgtccagcatccaggaagaatcaagtcacatgaactgtttgagaggttgatgaatgcagaagactttattgagcagtggttggctctcagcagaaaaggagactgaaaagcggtcgggaaaatgatctctctctccctgaagcccggctgcccctctctgaagcagccctgtctgaagttagc

SEQ ID NO: 42997 - DNA, 1085 bp, Homo sapiens
agcaagaccctgtcttaaaaaaaaaaagaaggaaagggaagaagaggaggggaggggaggggagggaagaggagaggggagggaaagaaagaaaaagaaagaggcataatggtttctgggtttctttggattttggagaaagcaaatactatatactttgagtggggaccagaactacaagcaggtcaagacaatcatgcaagctgttcaaacacttgtgtcatgacatcagcagatctgctactgctggagataatcctgaccctgaaactgctgactaggctaggttaggaggtatagagttccacccaattagaagttatgactaataagtgtaacaagtggagtcactttgggttactcattctattgagcaaacaggtgaaaaatggagttaatgcactggctagggtaatgaactctgagctagagttactactacctaattaaagcagggaggatatgtctggaaccgaagggagtcagtggagcatctcttaccatttccatgcccagtgttaattgtcgtcgggaaattacagactcagatgaagttccatgccacagcaaatgggatcgggcttttccagtaactgcccaaatgttcttcccctctttctcagcctcacttcccttttcttacactcttactattctgagatggaacctcgccccccaaaatattaacaattaagctttgtttgagtctctattttccagaggactcaggcaaaggccccttccaacttctagtctttagtcattcaatcattctagggctgtccagtaaaaattagacagcctgaggctgagctgttcaatagaaacaatatgagtgtcatataaaatttttaaatttctagtagtcacattttaaaaagtaaacaggtgaaattaattttacttaaaccaatatacctaatatgttgtcatttcaacacatatttaatataataatgaaatagtttttttatattaaggtttcaaagtctattgtgaattttatacttacagtatatctcaatttgaatgttaacttatcattggaaatacttgatttatattagatttcataaattttacaa

SEQ ID NO: 42998 - DNA, 5297 bp, Homo sapiens
agtactaaactagaaatcaaagttcttaaacaaaaacgatttttaaaaattataaattgtgatattaaaatagcagtaataactaggagtgtcatgtgccaagagcctgttcaaatttgcacattaatccatttaatcgtcaaaacaaatctaggaacttaaaatttgttttgttcactgctgccaccccaatgtctaaaacagtgcctggtacatattaggcacacagtcatttattgttcatattacaacagatacccttcttatagaggcacataaacttgcccagagctagaattctaactggagcatttctgctccaatgtttacactcttaaccactgttatattgtctctctaaagcttttaaatcatttaagtggtgtcacagcagctgggtatgacctgtaagagaaaaaaaatcagaggccttcctttaacgtgttctgttccacatgcacaaaaagctatggatctggtactattccacattttagtggcctgaactaattccaacagaaaagatttttatttgtactgaatgttatgctctttgtgtaaaccacactgtaacatacaactaggcttctccaatatgttcctggcctttaaagtggtcacaaaaagaggtaattatttcaaaataatttttactttaatccttaactcctaaaaagcgtttcttcctcttttctttcatttcacaaagatttaaatttgtatttcgcataacccaaaatgacgatgttatgaaggcccaaaacaaaattcacgatttcatatcaatacatactaagagtgaagatttaaaccttcctctttcatgaaacaccaatcttgccaaataaactccagtcataattaaatacaggcaaatgtagtatcaggtctattttagtaaaggcaaattcttgccattcctctcagaactctttttaaaaaagtaatctattaaaaccaaagtttctaacactcaccgacactccacaatttttctagtaaggctgaatttattccatgacatttttttcaagttagctgtaaacactccaccctcttcgattgtgcaacaaccaaacacatcacacaaatacaagtcacaaaaaagggaaatacagtttaagagtttgaatttaggtaagttttgagcagaggatcttagagcagtgcacaacgcgatataaaagttaacatttaacaaatcatattaattcacattattacgaaaggagatgccggaaagagcctgaaccagttaaagcagccgccatcttaaaatgcgggatagaagttagagcaagaaaatgagactaaaccaccggaggtggaggttccgctcactcccagagctccgaaaaatcctagttttttttcaacttaaatcgataatatactatcaaaccacatttcaagtaacgaaacaagggtgttattaaatagaatgaggcaaaaataggtacattagctttcccttactgccatcgcaccccttatccacccccactctccagccaaaaggaaaagggagcttccagaatgccttttacatcagttcccggtgtccctcggataaatagcttcgggtgaaaagctgcaactacaaaatacaggaagtggcaacactgtgtcattccatctcctcccaaacccacttattcggtgtaacctgcccagagtcgactaagagtttctactagactcactgactgaccttcaatacgcaagacttcttctacccgaccctcagtcaagttcgggactcgccagattttttttctctcctccgagttttctttcttacccctagaaggcctagataaccttgatctcacaactaaactaagttttcaagcaccaagaataggaagcgccatgacatctgctggagcgtctctccgcaattcggacccccaaaaaaactccttcttaagcagcaaaaaaataaaataataaaggcgccttaagtcactctcctccacccctaatttgcaccgattccactgaagcactcaggataacacctcacttgccacaagtgttctccgtttcctagctttaaacttcatttcttcaagaagtatatctgcgttctccatccccccatggaagaagtgatccaagaggtattttcagaattatgcttccttcccacccccacgctttcctcttggcccgagccttccttttctcctaccaccccatgcccttgtccccgcgggttaccttattaatccgtttcagcgccatagtgtgtgcttgtcgtctggctcctcactctctcggtgtatgctcaaaggtccggccaaaactcttgattatcccggcggcggggcaggattgtctcgtctcacaccagctctgccagacacaggcgccttttgcaaaaacggagcagatcagcactcgcacaggccccgaagagcccctgatgaatccaggtcccttaagacagccgcgatccggggtgggtggggtggcgtggcaaagccaccaacagcctctgtaccgtgctttcggcccgaagtgggggcgagggtgacgggaagagcggaggtggtggctacaagtttaacttcccggcctctagaaaggaagagacccgggtgggagaggaagaggcgtaggagaaaggggtgggtgcggggcagggtccggagcccagcagaggaggagccggggcctagtcggcgctataccggcgtcactagggcaaagaaaggcaaggggggagggggaagcataagactccggacggacgccgggctgctttcggtttctgtccaaaggtgcggccgggaaaaggaaggaaataaaggaagggagacttgatgtgtattgctatcctcgcagcgagctattctgtgtcacccctgacgccaccgtacactcactccgccttccagcgcgctcccgcgcgcgcccgcccagccacctccaccacgcgcccgcgctgtccctgaggctccggcttaggcgcgaggacgcgcccattccccctcctcctccagcaggagaggccgcggcttccccaaccttcccaccctaacccaccgcacccaataggctggccgctcaagccgcccaggtcccgcactgcccctcttacccggccggccactgggccggcctcccttccctgccctagccgtccacacccacgcgtacagaggggccggggcctccctcaagctgcggcctcggcctcctccccgcgcggcagctggtgcctccccggccctacggggctcacgcgcacgacacagccacaagatgtccgctctgacggaactactgccagctgccacgctccgcccctccccctcctcctgcctcttcaccgccgcggatcagtccgccaacgccgccgtcccgagcacaagaccgatgtgaggccgaagccagacggcttgcttcccacgtccggggccgagtgaatacgtgtcaagcccttttccttcttctcggaacagcaccttcttactaaacagatcggagattggaccaggagggcgggggagggaggaggatcatgagctggggggagggtgaacgagtggcggaaacccttaggctcagagaagcatcgagaaccggaaggagaccatgggaggaaggtaaaggaagcagccgctgcgcgatccagccccacgcccctccccacagcgtcccccagtttcctcacttggtatcgaggagacgactctcgcgagaacttcgtggctggctaaccgaagcggtagctctgcaatgacttaagagcagttttgtgcgcttttcctgacggggttccgcctccaaaatgcataagttctcgcgagacgcagtaaggcaccggctcgaactggggcgggccactgccaggaaagcaacgcccctgaatgcttatgccggtggttggtagaggaaatggaattccccagactggtaagagcgcgcgcagacacagccttgtctcacgcgcccaatcaggagcgtgtggtgggaggtgccaaggattaattaccagatacctttagtctagctcgggccgggattttgaggtttccggtggagcaggtgagcagtatttactcgcctgccctcctgggctggttatgctgtgggaggaggcgcccctcgagatgggaatagtagttttaaatagacccaggttggccgctcatcagcgctcccacgtgctgaagtctagtgcacgtctgaccctaagggagcaatactgagaacagcagggagcaggctgagtcaagctcaattgagtggatggggctaggacagagagagttaggggcagggttttcactggtctccgtaatcagtcgctgccgtccgccaaggtgtagatgtgggaacaagcttaaattctcaaactttagcttctgttgctgtgtttcagttcttgagccagaaagtgttgagactaattagttaattaggtagagtttagagtcagaaaaacaatacaatacttcctgaaatatccaagttgggaggtgggatttacctcagtaggattggcctgttttagtcaagggtttaaagtatggagacggcagttatgctctctagtgtatccttcaggcaaaagaaagaccttaatttttatgaggaatttaaaagtgggtaagcactgaccagcttaaggttttttaacattccttaatgaccccagttaccgaagtggagatcttcaattacttggaaaaataaacttgttttaaaaatacacttaatttgaaaactgttgcagaaagttttacctaataaaaacttaacacgtcaacaatgatgaatataagtagtctaatgtatactgttcaagtgaccatgtagtgtcactagtgaagcagtgcttctcaaactagtgtccataggaaccacctggggttttgttgaaaatgcgactttgatttggtagggcagtggtggagcctgagagcctacatttctaactagctcccaggtgatacagatttttctcgtctgaaccaccccgtgagtagcaaagcactgaagtgcttacctcatggcctaactgctcatgaggctcacctcagtaacacctctggcccctccctcctccctgaataatctgtgttctctctcatagctagccagatatactaaaagcacaggactaggcatgaagatggagggaggaacccagattagttattgcttcccatttgcttgatattggcctggttagttatcttctaaccccgtttcttcaccgctaaagtaagtaataatgactgtcctttctcacagggtgattgtgtggttaaagtgtcataata

SEQ ID NO: 42999 - DNA, 2352 bp, Homo sapiens
tgtggcctagggaagccataaggaccccctgcgctagacttcagcagaagccttgtaacataaagaaaaccatacataaggctttagattcttttttttttttttttttgtgacggagtcttgctctgtctcccaggctagagtgcagtggcacattctcggctcactgcaacctccgcctccctggttcaagcgattctcctgcctcagtctcccgagtagctgggacaggcacctgccaccgcgcccggctaatttttctatttttagtagagacggggtttcaccatcttgacctggctggcctcgaactcctgacctcgtgatccacccgcctcggcctccctaagtgctgggattacagacgtgagccaccgcgcccggccagctttggattcttttaccactttcccgaaggaaaaggaactgaaaatatctaaggaaggactactacgaatcttctctgagtggcaaaaaccagaggtttttggagctagggctgcagttaagttgccaaggggcagagatgtaaacagttcctggtttagttaaaatattttaatttttatttttttaagcctggcctttgggtgaaggagtaaaattaggcactggggtctgggtagggggaggatactcatgggcgagtatgcaaccctagggccacagcacccaaactgtaggggaagaggcggggcgagaggggacgaagtagagacagcaagagactcacttttgaaaggcactttcggttagaaagcattctcacatgcttatctcatcgcacacagtatcctttctgctggtctccagcatctacagacgttaaaggcccaagaggagggccaccttcacacgagattccgaggagggcctcgctacccgccagttcccgcgcctcggcagtccgccgcgagcgtacgtcactcgcccgccgccaatcggcgcccggcaggtcacctctcctcccagggcccgccgccccgcccgccgcccaggccgaggccgccagtgcccgccggccgcttccgctcccggcgcaggcgcggcagcttggccagagcggagggggctcgggagaggagtggacgccgctggccaggatggtgctggagagcgtggcccgtatcgtgaaggtgcagctccctgcatatctgaagcggctcccagtccctgaaagcattaccgggttcgctaggctcacaggtaatcctcccccatcagccagtccccatccttgcacgttcgccaagcgggggaaggaggcgtaaaaatcctagggccaaggggcgggacggagctcggcgcctggcacgtgatccccgcgcgcagaggaaggtgggcgcgcgccgacgcagctgcctggggaacgcctgtgaggcagtctccgggtgcttgatgccccagggtcttttgtcctcggagttgtctccggtgtcattccgtggcaagataccaggtttttgcagagaaggtgctgagttgggaacaggccagtctctttcatctcctgtcctgctcatcgctctctgtagcgtacttgtttattttaaagcgggctaagtcgtcgttatctaaggcctcatgtaacaggcagccccagctaccggctgggttgtaccctcagcatgtgggtgggagtgtgtgggagagaaatatagacttacacgtaacacgtatatgaccgttttatttagtaacgaaattaggagataacctccattccctcaggttagaattgacctatcataggtggcatttgaggtcatctccgtttctacggtcccggggcccgctgcggtaacttaagttggaagaaagataccttacccaagaaagtattcgaaggccggtatgaggagtgaaatcttagaaaatgaaatttagtgaatatatgtaacgttctatacttaaggaccctcacttaacccacacaactcatgaggatttcacatctaaaggatgaaaatctccagaatgcagtcaacacttgggagattgtgttgagttatgagcatttcattgtaagggggatatttctaaacggaactcagaccgagtaggatggtgaaggaatcagcaagtattgaactcctatgtcctaggttatcagggagtgcaaacatgaattaagataattctgaggtaaatagggttgcttcgccgggaacgttctaaagatctgtagtacctgacctaaaatacagcaatcgcacagctgtctggtagaagaaaaataagatttgtgtagactaaaatatagaactgataacaaattaaccaaattagtgaaggttattgggaggtgaatttcagtctaaggaagatttttttttaaattaaagaatgctt

SEQ ID NO: 43000 - DNA, 1562 bp, Homo sapiens
cgagtagaactacaggtgtgcaccaccatgcccagctaattttgtatttttagtagagacggggtttcaccatgttggccaggacggtctcgatgtcttgacctcatgatctgcccgcctcagcctcccaaagtgctaggattacaggcatgggccaccagcacccagctgggtttttcttttctgttgcatcatcagactgcaaattttccaaacttttatgctctgcttcccttttaaacctaagttccgatttcaggtcatctctctctcaagtttcatcagtctcttgggcaggggcaaaatgccaccagtctgtttgctaaagcatagcaagagtgacctttgctccatttcccagtaagttcctcatctccagctgagaccacgtcagcctggatgttattgtccatatcactgtcagcattttggtcaaaaccattcaataagtctctaggaagttccagactttcccacatcttactgtcttctgagccctccaaagtgttccaacctctgccagttacccagttccaaaattgcttccacattttcaggtatctttatagcagtacccaactctctgttgtagcaatttactgtattagctttcacactgctataaaagaaataaaaacataaaataaaaatactaccccaaactgggtaatttataaaagaaataagtttaattgactcacagttacgcatgactagggaggcctcaggaaacttacaattatggtggaaggggcacctttttcacgaggcaggagagaagagtgaagagcaaagcaggaagagcccattttaaaaccagatctcatgagaactcactatcaggagaacagcatgggggagattgccttgatgatttaatcaccaaccaccaggttcctcccttgacgtggggattatgggattacaatttgagatgagatttggatggggacacagagccaaaccatattagtagatacttaataattatatagtaaatatttaatttttatagtaataattatatagtaaaaatttgtttaacaatgagaaattgatttattctttcagaaaatgtttagtaagcacttaataaaaatcagaagggggggattgattgggaaagtactacaagagcaaactttctggggcaatggaaatgtattttgtcttaggtggtgtttataggtccatatagttacaaaactcatcaaactgagcgcttcacaaacacaaagcttggccaggtgcggtggctaatgcctgtaatctcagcactttgggaggctgaggcaggcagatgggagtttgagaccagcctggccaacatggtgaaaccccatctctactaaaaatataaaaattagcagggcgttttggcaggcacctgtaatcctagtgactcagaaggctgaggcaggagaatcgcttgaacccgggaggcagaggttgcagtgagccaagatcatgccactgcactccagcttgggcgacagagcgagactccatctcaaaaacaaacaaacaaaaagcacaaagctcaataaactgaactgtaaatt

SEQ ID NO: 43001 - DNA, 1924 bp, Homo sapiens
gttatttcacaggctctaggacacccatagagggggagtgagggacctggtatggtcccgtgaagagctcttgtaacactactgattgatgtgacagacacagtatgtgtgcaactttcctttttccttcaaaagcactggtctaaagcagggatccccaacccctgggcagcagacaggtacaggtttgtggcctattaggaacaggccacacagcaggtgagcagggctagaggattatgcctgagctccagctcctgtcagatgagcaaaggcattagattctcataggagcacagacctgattatgaactgcgcatgtgagggatctaaattgcgccttctcaagagaatctaatgcctgatgatctgagatagaagagtgtcatcccatcttgccccccaccccaaactgtcttccatgaaactgatccctggtgccaaaaaggttggggactgctggaagtgcttgtcccctgggttaaagccaagaggagtaaacaggattaaggggcgtggatgtgggtgggtgggggaagagagctttctcaggatcggcaaccaatcccagaatctccagtcgcaggagcatgtatgtgaaggtttatttgcagggatccaccgtttgtaaaatagtacacgcttaataaaattaattttgaggtcaatcttaactgacagatctcttctttcttactggcgagtatttgtaaaataagaaaaacaggaggaaaagagaacaaacaagagagatgtgggatgacggagtaaggaaaggagtcacggagaggagagacaatgtctgtggctgttccctcagcgtctgggagaagagcccaagaatcccattgaactgagggggaggaaaggccctcctgcggcctaccgcaaggaaacgatcgcggcagacccgggactagcgccaaagggcttggaagggcggcgttaagaaaaatgggccgtacctacaacttctttcgcagccctcgctggcccgggagcggcccaggagcccagtgaccgttgcgtaagccacgcgccacccaggtgggcagggtggtgacgcgaaagcccggatagacttccgcgcaggggcggggcggggcgaggaggcggcagcgcgtttaagtgacgtcttggctgtccgcgccggcagaggcgagggttctggggtttctgggactgtctggtgtgttttctgtctattgaaccctttcctttcgacgtctcttctgaatattgactcatcgggttgtagaaatccagggacagagttgacatcactgggcattttagccaaaaagcagtgctcgggactgcatgtgccagaagtaaacttgtcaaaactcagattgtgtttcccctaaagtcagcttaaagtgcaatggtagaagagcacggtctctccccaagacggcctgagcttaaactgcagcgctgtcacttgctagctatgggacctaggcaaatacatcgtctccctgaggttgtcttctcatctgtaaaggacgctgtggtggtggtgtgagaataaatgagacatggcaagtgtctggaacaaagacgctgtgtacaaagtaaacacttaatatactgttatcagtataaaacctttgtgagttttttttttttttccgcatgaaatcttatgtggaaagttgtatgtgaaagaaatgaaagcggagctgcgttgatggtgggcccagaagctttggcctttcagtcccaaagtttccagtaatagaatccgcgcttcctataaaagacaaaaacaactgttattggagaaagtgtaaacttcttagaaagacaaactgccctttcctatctaatgtttctcctgacactcaatgtttactcttgaacactgtattcctttttgcctcagtgcgttctgtaaagttaattcctctaccggagtgtt

SEQ ID NO: 43002 - DNA, 1804 bp, Homo sapiens
tggcaatgatgttagctgggaaaactggtagtcacacctgccttggattgtgtaagtttggggataggagaattggtaaatgagtggtagaatatgaagaaaacacaattctatcacagcttagatttacctgtgcttcttgatgcatggagggcgtgtaattcattcctgtggatggttctgaatcttcatatgtaattcttttatcttcatcccccattatttataattaagaagatgacacagggaagaggaacgagatctgttttgaaagagtatagatatagagcagtaatttgaaagtcttgtgatttcaaagactttggattgtacttatttttttccctaaaaattccgaatggctaaactatttgaaattagactattcttaattttcaatggctggttattgtttttgcttgattctagtatattatcatcattcttatctacctttttatttttcttgaaaaagcctttgttgaccaatcacatttttatgatttctttcccatattattttttgagttaaacttaaaaacaatccaagcaatatcagtgttaaactgtcctctctcatgggccaactggatgaagcaggaagtctccaggtaactttccaatgttgatatgaggaatgagtcactaaagggaaatctctggatttcatccttttcggagaatctagagtcactaactcctgcctggttcttatttctaaattaaagtttaaaaatacaccacaattgactgagtagccagaatgtctcagacactatgatgagtgctatggtagtcactttttagtcattgtgggcaattcaaagattaccaaaacatattgtttgttttccattgacttatcatataccaggaaaaataaatttataccaaataactaagaaaacctgtaagactacggattggctcaataaacactcacttcaacacattctcccttggctttccatgctatacaggctacaaggcaaatacagcactccagttcctagccacttttgtaggtagaggtggccatgtgtcacagttctacatatgagatttaggtgggagttttgggggaggcctttagaagataatactttgtactttttgtcctctaacatttccctttctccttcctagaatgtagatacagtgcctggaagggcaacagacatctttcaagcatgagaataaaagccctctatttaggatagtagataagtaagataggagaagctggttccttgatgacatcttccagttgctccatcagccttggactgccaagcattggggtaattgtttaaaccactattaatcaagttttttcttcttttttaactagtaaggaaacttactcctaatgcaacaagtagaatgagtatcttgatagaggtacacactacaaacttgtggtagaatcaaagagaaaattatgtaagagaagggaaaatctaattcaacacatatcaaagtgcctaatgggttccaggcactatgctagacataaagacaaggatgaattagacaggacccctccctcaaggaatcattttctctgttcaacgaagtgccaagaaatttgcatttaaaacttcaaaaaacatcataatctttttaccacaaccacccccatttttcctacttacaaaacacatggtaaccagagtcccatctcaaaaaaacctttagtttgttttttattatacataatttgtaataaatgtttatataatgatatatatgtatgtgtatgtatgtttgtatatataattttttaaattaaaaaacttatttc

SEQ ID NO: 43003 - DNA, 2843 bp, Homo sapiens
aaacgtttggttgttttccaaatttccactcatgaaacaaaacaacaacaataaaatatcactactattgctgcctggagtttcatttctgctttttctacttgaagaaattcaaaatctaactcaaatgtcaccttctcagtatttcctaactccaacattgacaaactgtctccctcgttttcctctctgatgattcattcattcattcaacaaacaagagctattaagctcttgttacgtcccagtccttgagctgaggattcagaagtgaacggtcttaaatagttcctatattcagatcttgtaatctagttacaggatgataaaggatgataaatgattcctaagcaatcacaatgaaatatggttaagtttcaactttagacacataacaaccccatcccttaacaagtttcatttccttttttttcttttctgagatggagtcttgctctgtcacctaggctggagtgcagtggcacaatcttggctcactgcaacctgtgcctcctgggttcaagcgattcttcagcctcagcctccggaatagctggaattacgggcgtgcaccaccatgcccagctaatttttatatttttagtagagatggggttttaccatgttggctaggctggtctcgaactcctgacctcaggtgatatgcccacctcggcctcacaaagccttaacaagtttctctggtgtgataggcacaagagtaacaaagatgactaagatgcagtctgccctttaagggatggtcagagactgatatgtgtttaccaaaatcgtttactcttctgcctgggtccatagtacatttccagtctcccttgcaggtcagtgtggcatgtgactgaagtctggtcaatggcatgtggacataaatagtatgtgatttccagtcctcacccataagaaacaatcctcatgcaatcctctagtagcttttctttttctgtccgttgcctggaaactaaggactccaaggtcttaggggatagcaaagccataatataaaaggagtttgggttcctgaataattgagtagaaggccaacagctgaacacgtgaatggacttgacatgaacgagaaataagcctgaactatgtttagttactgagatgttttactttatctcttacagcagctactgctgtcttaaggttatattcttcagtcaatagcatacgatgattcttagcacctcgaggatgctaacccagtccacaaaggcaacaccccctctggttaatctgagaactaaaataaaagcaagcaagaaaacccacgccaacaccttacaacagtaaacagacacgcgcccgtcaccgggtgtacaaacagaaaaggctgggcccctcgctcgcgtctccggtccagcaggcctacagggtacccgccgctggcgctgggtttatttttacccttagtgtctctggggcctctcacctggcagtctccggcgaagtcgaccaggctccgtctgaacgattaggaaaggggctgtgggggaggcggcggagcccggtctagccaccgcgctctggggttcccgattcgcgcatcttcccaggctgagccgggaggctgcgttgactgcagataaacggtctcagggcgcggcaccgcgtgtagtcggccccgcctttcgcacgaacccgctgggcgacaccgcgcagggaggtccgacccgtcggcgccggtacaggctccggagtaagcatgggttggtccggggcccgcagcggcagccccgtgtgccctccgccgggtttcaggtccggcggcgcgggtgcagagccgcgtgcgatgcctggtgcgcgtggcttcccccggaaaggtggcgccaggccgaccatgggcccacgtcccggggcctcggagcggcaccgcgcggtctttcagctgcttatcctccctgggcgggtccgcaggcttctggggccaggaccagcgagctcccgggaaagcttcccggaaagcttacccagagagcgcggacccaggcgccgagtcttcccggagatgacgagacaccgcgagaggagcacagcgcaggctcctcgggactccgcggcgcaggccgggcagcccgttacttgttttatcgttcccgaaaccaacctctaagttgtctatcagtcctccaccttttagctgtacctcttagaagtgtcttctcagctgcggtgggaagataggattctttcttaaggtgaccaattaaatggccggataaaagacttgttctgcccccctttatcgcttaacacctgcccttcttgttgtattttagatttttaacccttctatcagcagtgtgattctatttcatttaattctcatttcatgtttgtgtcttccttttctctgtatttcctcttgtgtgtgttaagacgcgcgcaccccttacctgtttttcactcctgtaagcaagtgccaatcttaatcaccgcttttcaagcaagggagattatcctcaaatttctccaccagtcagaaaccattcattcttgtctctcaggtcctcttttgtgatgaacctattggataggttccatccaatacccttcttcagatcatctgaaatgattattttcctaaacggaactcttcctctcctaaagcttgtaaaaatttctagtgacattcagcttcctcttaccacaggaatgacatatatttttccttttagtcatatgtacttcattaatatatcacctgatttgattaacatgactttggagaacattgaattttttggctagattttacttcgtttttattgctgatagtgtttataaaaatgttttatagtttatggtcggctgtgaga

SEQ ID NO: 43004 - DNA, 1128 bp, Homo sapiens
actcccattttacagatgaggaaactgctgaaacatgcccaatgtcatagagccagtcaatgggaaagccagaactaaacttagacttccagactcttgctatgtgaacagtccagcccacaatgctgccgatcctcttataaagtttaagcatgcagtagtaacacattaacaggcataatcagtaatttctaaatgattgagaaacactgacaccggggctcatgtgcatgagatatttcaccagtgcttggattatagatcacaaagtgagagaaagagctagtagtgaggctgggggtggagaagagccaaatgaccatcaaatgaggctgtcttcaaggacacaggctccaagtcttgctgggctctgtcattaatgtgtgcctctgacctcatacgaactcacaaagtggctgctttgtccaaggcatcatatccacatttcaggcaaaaagaaagggaggagcaaaagccaaaaggctttcagagaggtctcacctttctatttaagaaggaaaccttctcagaaattcccacctgcagttcattcaccagatctatgctacttggccactcctagctgcaaagaggttggaagttgagacttttgtttccagctttgataaagtgaagaataggagaaagtgagttggatggtgttgatgaaccaacttacagtacatgcaaactagcctacacaatcactctgttccattatctgcctgattttgtacaggttgatagccttgcctaaagggcttatattacctagtcctttctctttgaacttatttcagttctctctttagccaaacttttttttttttatacccaatatgctcttccatttcaaacctccacacttggtccaaggtccacatggtgaagggcaagttactcctataggcaacagccactgaaggatttatggaaagggtgtgaaatgatcagattcgtattttggaaggactgctgtggagaacatacctgggcaggagcatggggtgccattaggaggctgctagggttatctagtgggggcgctggtgaaatagcagggctggagaaaatagcagggatggagagataggtggattggagaagtgtttcagagatgagataggt

SEQ ID NO: 43005 - DNA, 1440 bp, Homo sapiens
cttggaggagcagactaacacaattatgtaagaactggctccagggatcagcttataatcactgacttcctctgagtttgtccacattttttaggcgatggggaagcttggctttaacagtgcctgacctactttgatgcaatgaatttttgcttttttacttcttacacaaaagataaacatggaatgtttatcatttcaacatggaatgacagtttctaaagtataactttagaaagatatactttatcctccttgaatcctaagcatggtgcacaaaagctattttacaacactgtcattagtgatattgggtgtatggccctgtaaagcctccagtcaaaggttttgctaggaatctttgccaaccgaagaagcacttccagaacaaatgccgaagcacagagcagcctttctatgcactctgaaaacctcctcttagctggccttcctgtctttctgggaccagattttggggtcaaagccttaacatttgataaactgtaatctcaaactaaaacagatttctttgagaaaatgagagcaaacacggcctgaaatggtaaaacaaggcacctctcaatatatccaatgtgaaaaccatacatgttggcttccttagtccaaaagttagaatcaaaatgttgatttttgattagcagagacacaaacagcatattcaggaagccattgttttcaagagccaggaagaaaactcttcacttaggataccgtaagaatccttttttcttgggctactttataaaacatacataccacagagtttcaggctctttaaaaacccatctttacactgatctaactgctcagattaattttgaaacaggcaacgtgcagaaaaaaacaacatctaaaaattaaacctcccctctttccgttctaaagtttcatttcaaaagtattaggaaatcttactttaagcagcgagctgatggcgttctccagaactcggtttgagcaacaaacttgagacaacctttgtctggaagcaagtcaagcgcttaataatgcatgctgggatttgtagtttccctgctttcagagtttagtggctccatccatacactttataaatgtatgtgctgccatctagtggaattcaggtagaactatgaattccaagtggaaggtgaaaagtggaaaagcaccttagagcttacttaggatgcggaaatcatttccttcacttcagtctctccacttctctgttttgtttatgcctactatatgcggtgccagggtagacgagattggctgagctggaaactgcgtgtggaagatagcagagcaacaaaatagagggaacccaggtcactgaaaattctggagccttcctgtcacttggcctggattgttttaagggagagaaataaaaaaaaaaatcctttttgtttgagatacagttgtgatttttatttt

SEQ ID NO: 43006 - DNA, 856 bp, Homo sapiens
aacgatggccagcagccgagtcactagacagcagagccgggaagcagcggctcctggaaacatcgtaggcctcgcccctccggctcagggcggcgccgcaggcccagcgggcaccgggccgtggtgtggcccccctacctgctgttcagcggccgcactcgcacgcagacggccacggctccttcctccgccatcctatcaggctgaactggtcccaggaaaatggccaggaccctccgcggccggcacttcagggctcacaggccgccccgcctttaaatttaaaatttcccaaacgccgcatctgattgagccgtggcctcgtgacgtcatgggccattccacgtgcggagcagcgcgggggacgcaaggcgggcggcgtgaccactgctaaacaggagaggggatttaaagggcccagcagagagtcggaggagagggccgaagggaggggctcccaggagtgggcagagagtggtggtcctggaataccagaatactattatctgccaaaagctagcgaacgtcatcctccaccccatccttaaaaagtttggaacctgtagacgaaactaggtagagatacatgtatttttcactacccaaacagaattgccgtcttttaaagaaactgcaccaacagtttaaaataaactttcaacagcaagagttgaaattcgctgtccagtccagaaacgtgacaagcctgttgtgcgccttagaaaatctgagtttaggcttttctcctgtttctctctctctgtaactcgtttccattagctgtggcttcctcagaggttgaattagggaaaataaataccgaggactgaaaaactcattgagtaatgggttgata

SEQ ID NO: 43007 - DNA, 1437 bp, Homo sapiens
ggatctgattccattataatttcccagggtgcttattaaataagcagattactggatctaccacagattcactgaatcagaatttagagctgaggctagaaggctgcatccttagcaagtgcctttgatgactcctatggttcctgatgttttataacctttgttccagaaatccacactatctaacacgagacaatataacatacatgaagaggccacaaaatagtgagcaaaatcattttacagactataaatctttttattacattcatggcttagcccaaggatgaacccatagtagatgcttaatatttgcaagtaataatgagatagtttatatactagaacactgaatcatcatggtgacctaagtatttggaatttttaacatgacatcttcagttatttttgatttcaaagaaaagagccactccttactttttattttgaaatgtggcataaacctgtttgattttcacaattttaaaatgatgggaaaaaaattgaaaggttttgtgggagaagaagtacaaataggtccataaaatatgtctaagattgacttgtaaaaaataaagagaatctctaagtgccaaaagttttttctgtgcttactgacatatctttaatctcacaaaatgctctaccccgtggaagagggcagcagatataataagtaatgtattaatcatttatttgaaactctgttgatcctagtctgacaaaatgaaataaagattgatccaatttattaaggcctatgcctgctagaaacagaggcttaatgaaatatggtttatttttctcacataacaactctctaggcaggtgatggtgggtgttgttagcctctctctggtgtcatccagaatccatatccttgttatgtctgctccaccatcctcatcttgtaatttttagttttaggtttatcatttcatgggcttaaggtggctgctgcaattcctggctttatgcacatgtttaaggctggagggagctagcaaatgtgccattttctgtttttcttttttttttttttttttttgtcaacaaataaattttttcctggaaactctaaactggtatttgtttttcgacttgtggcccttaggtcagaaccctgtcacatggctacccattacggtgagtctgggaaagtgagtatccagctttctgaattctaaagtgggcagcaatggaagtagcagttgcaaaatgacttctgagttggctaaaggacaatgtctgccacaatattctctcattaccaatgacccaggacttggactctttaagaacaggagagctgagagctgaactactggaagggtagcttcactgctatgttaggcttgcttcttcacctgaaagttctttcagaatcttggttgtgtgttacctgctgtgcattctagccctgcacatgatatttgt

SEQ ID NO: 43008 - DNA, 1218 bp, Homo sapiens
tagggagcactctttcttgcctttgggatttaagtaattgaagttaatctttttgaaagagatctcagttggattgatctaagattgaaaaggtcattaagaggaaattaataaaagggaactctttaaggtgggtaacgcaggtattatagtcttagcccctggaatatgacccagtgggcagagtaagccctggcaaagcaaggcacacagccaaatgttagcttttcacatgcaaaaacaggattatgcaatagtacagactttgcaagtctattgtttacagaaggaattaagcaacatttgtttacctacttcattattataccagcaatccagcctgaaggacttagctcatagatgtcttctgaaatgtggaagaaatactttcgtttgtcataaaacctcagcaggagattggagtctggaagagggaggggagaagaggaggacctcagggaggcaagttaaacagtccagtttttgcatcttaatttccttctctgtgcttttgtctttcaaggggtggtgccgggcacaggtattttagataaataagtgggatggcaagagaaggacctttttactgcttacccatttattgggtgacaatccagtatgctgtccagaatgcaatatttttgagagtaaaagaaatcatactgggccagatcataaaacccagcattttttagacaaactgatatagtgtatatggttaacttactttgtacgaagaaggtataacaaactcactttagaggacagtggtacagtctgatagagtgagtacccagttaactctctgtgtgttatgtcagctggctttgtatcaggaagcttctggtgagtttaggtgaccccttagcagaggcaggtggaaaattccaggctaggaggctggatggagtagatggtaaacactcaagggtcagtggtctatgatgagagcacaagccaagaaccaaccatgaggattccaaggggagcctgggttatcagaagccattagagctgcagtgaccagattaaaaaggacattgccccaagagtgtctgcatgaaataagggatatccttgcttgtttgtgacccaaggatatgtaagccatacatttttccctttatatccctcaatgttagagagagaaacagaaaatatggtggctatatgggatatgaaatatttgtattaataaaaatgttaatagaaattgca

SEQ ID NO: 43009 - DNA, 1834 bp, Homo sapiens
tattcccagattaagtttccatgagtttgagattagacccatggatcctgggacagttaattttatgagtccacttgactaggccacaggatccgagatagttccttgaattagtctgggtatttctgtgagggtatttttgatgagattaacatttaaagttatagactgagtaaagaaaattgtccataatgtgtgtaggccccttccaatcacttgaaagcctaaatagagtaaaaagctgacccttctccaagtaagagaattctcttgcctgacagccttcaaactgtagcactggctcttcctggttctacagaagctactagttttacagctagaactaagacactgactgtgtggattttggacttgctactcaccacaattatgtgaacgaattccttataataaatctttattatctgtatatatagctcctattagttctgtatctagggagaattatgaatactacaagaactataatgctttcaaaaatttaaacctaagcttaatacaggaaattaatttgctgttttaatgattgccatcaaaattgtcccagctacaaaacatggattctagtaaaaagagtgtgtaaacaagaatttagtgtttgtggtattgataagattccatatgtggttttacaattggaaggaatccaagagttttctattaaatactcttcatgtgtcttcaggtctacaaatgcagccctgttgctttgtgttcaggagccatgtactcaagaacacagggaaaaacaacactgtaccacagtgttgatattaaagggtttaagtatacctggtgctaagaagtattaaataaacaccctacagacttaaaaattagggaagatttctcctttcatgtaatactccttcagtttcaattaggatattttgggagaatctgcattgttaataataccttgctgatgattttaatatctagtaaagaatgattagctaaagggggaaaagctaaaatctagcataaggcaactgatccaaaaggcaaacaactgtggaggatgggaagaaagagaagtaaatatcccacagtgttatgactaagggttgctgagtatttctgtgctcctgtgtgtactgagagcctgtaacagctgggggaggaattaatcattaactttcaccagactaaaataggttaaaaactgagggaagaacctcagcaaaaactgatagtcagggaaagggctgaagactgaaaaaagattgctgtattttagaatatgcttttcaaattaaaaagtggatgaagaaatgaaagaaccattgagtaggggaaaggtcagagaaagcagactgataatagagtttggcaagattaattaatttccaacttgcttcctttcggaaaggacaacaatctatatatgaaaatgataaaaaaaaaagtgtcatcgtagaagagaagccctgaataggagataataaaaattctcttcaagatcactgaagaggttcctgcctgccactccatgcacatatacgcctgtgccagcagcactgtgccattgcaaggcatgaaatcggccatgctccttcatacctctttgacaagccagaaaactaaggccatatttctaccaagaaccagcctttacatcttgcaaactccactttttctgctaatcaatattttcttttgccgaataaagtttttgctgaagcaccatcacctctaagaaaccccacattgtgttgagataattttctaccaattgcctcataccatatgtatatctctattattgtacatactcattttgtaatatttctattgctagtatatctctacc

SEQ ID NO: 43010 - DNA, 2296 bp, Homo sapiens
aggatgtgatgtgtccagtcctttgggcaagatgccccaccctttttaatgaggaggagggggcattttaaaccaccaagggaaaatattgagcatattgaatgtgaaacttctgattcttcaattacattatttttcccccagggataaaaaggagggcactctctctatcagaagggcggtgtcacgtgaagtgcagctggtgcgggtggtggagaggccaagcctttcgcaaaccacctacaactcttaccacctgaatgaagcttctgagaaggggtactgcatcttgaagccagacaagaatccctgaaggggagagggagtgaggagggaaggggggagactgggaaacaagaaatcatctcctctgacctctagtgaagtgccaggttttttctttagctcttcacattttctaaatttgcagatctggtgtcccgttttgcggttcctgcaactgctgcagacgccacagttgatgagcctcttgcagggcacgcagaccccacaccttttcctcttcttcttggctgggttggctccgccagctccccctgaggaggacgaggaggaggaggaatgattctgcgggcagtctgccagattggcaatttgaaacgcactgtctgtgacggctgctgaggctgctgcgggggagtgaagggctgtcatgacgatgacccctggaggtaatgagatgccccctaaagccgggatagcggaaaaagtccccacgcgctcggggagattcattatctctgcttcagcagcgccgcatttgagcttgttcatgcattcccccgccaaaggtctgcagtgttcaggggataaggtggagaggaaattagtatttgccatttgcaacgacggctctggcgggcagccagctttccccagcctctgggagtcgtttcggtggtgcatgctggtcctgctgccgccgccgccgccgccgccgccaccgccggcggggaggatcgccgaggaggaggaggcggaggaggaggcggcggcggaggaggatttcctgccgcccccaccacccccgcccccgcctccgccgccgccgccgccgccgccaccccccccgccgccgcccccgcccccgccgctgccccagagcatggcggtggcggcggcggcggtggccgcgttgtcgcagttccagggggacatgccgatgcgcgcggcggccgcggcggcggcggcgctgctggggaagatgggggtggtgatgcgcgcgatcttggccgcctgtgggaaggcgcccccgttggtcttgtagaaggaggtggcaaaggagcggtagcgctccatttccgagttgtaatccacaaggctgttcagagccccctcgggcaagtggctttccttgggcaagcccggggcctccgggctcggcccgggctccacgcagacattggtgttcatggtgcagggggggaagaaggggtgcagggtggaagtggggaccgcctggtccgacacctgggtggaaaagggggaaaggtgggggggagggaagggagtgatggtggtgttggggtgggggccgaggcgggtggggaaagtgggttcgggtggggagagcaaggtgagggctgctttattcctctctggggctcatttccacagacggtgaattcccaggcagcgtcttcctttgcattatcctccaactgttacaactaaaataaagaaagtcattccaacgagctgcacgaggaaaaagattaaaaataaacaacctccctcactaacccaccgcagacaccgaaagctcccacattcttccatcaggtcgtttgcataagaatcatcaagacgtgaccccccccagcccatcccccccaactctcccaacccccgctccctccctccccacagcaaaccacagctcctcccccctattcttataaccctcctgagaaaatgtattaatagccaggatacccagggaaagaaggaagacgggggtgacaaacgcctaaggaaaagggcaattggagtgctaaagacatgcaaatcatgggtgggagggcgatactacctataagcagagggcatttaaacattatgaaatgtgtgaacaagtgctgcctgggcatgcaaatgctgtaaagtagaaaacagcaatggccctatgaggaaaatgaacaggaaattagcaaatgaagtactgaaaaagtctacaatacatccgagtataaactgtaagcaaacacaatacaactgagagctaagagactgcccacatacaatctgaactaaagaggcagggaaaaaagaacta

SEQ ID NO: 43011 - DNA, 1863 bp, Homo sapiens
atagcttcagtttctgcgaatcacattgtaactgcaagaccataataactgctactcagtaaaaactagttatgtcaaccatgcattagatatcatcacattgagtggagggaaaattttcaaccttttagtcttttgaccttgttccaaataaataaataatttaacgtcccttttttagagtcttagagtggtgtttccaaacacaagctttccttgcttttctgattgccatcaccatccctcttcctacctcaaggtttaataccaccagaaactgtagaaaatgattatgcccagtatccaggtcattattgtttaatcaatgcatctctggagcatgaaaaaggtatctaagccacagctattgtttggattttatttaaaaacaaaataaaacacacacaaataactatagttctatgccaaagctaaattagagatccatacttcatgatcctgttttgcctttaaacaatgtgactttacatgcctaatactgtatgtctggtctaccagagacatagagatcaaaggtcatatttaacattcaggaggaggggcgggtgcagactaattaataaattaatacagcgacgctttttcttgctggagtccagcattaataatctactttcacaatcccaacggacagcaaacatttaagagaaaaaaaagccagagaaagagaaagaacaatcacttaccagtctctttttatttggggagccttagaatttgcagacgctgccagtctgcctttaattagttgcacatcaccccctaacacaaagaaacacaaatccagatgtgtcttggcagctcccaattacaactttaatacttgtaaacaaactgttgggggggggggggtaaataaatatgcggatcaaaaaaaatacctgtaaatggcttttttttcttgttgcagagagaaggaggaggagatggtgttagtggtgggggtggaaggaggaggaggtggggggagaggaaagagtcgagtgtgagtgtatgtgtgagagcgcgggtctgttgtcggtggtctctcctctcccagcgcgttgctctccgtccgtctccagtcgctgtgtgcgagggagggagggagccggggagtctctcctctctctctcccctctctctctctctctctcttcccctctctctcaccctccccccttctctctctgtttgtgtgtgtgcgagtgtgcggttgctgggggaggggagccacagagaaaggcgagggaggaggtgtggaggctgggggcgggggcgcgggggtgggggtgattggcgccgaggtgaggaggacgcagggacgtggacacctactgatgattggctgcaaattacacggggaacaagaggcgcacgcgggccagcgctccttttcacaaatcctctcctcggcagaggagccacgttttccctgctcgcctgcggatcgccctccctcctcgcgcccggctctccggctcagcccagcacacagggctgttgattattttcttttgctctcggagataattgtttggaagggttggaaagagggcgtttccgccactctgcgtgtggggtgtgtgtgtgcgtgcgtgtgcgggtgtgtgtgtaaataaacttgtctgggatttctggctgggttgagaagagcaatacaagaaacagagaaaaggtcatgtttgtttgaagaatgctcttagttcgtacccaatggcatggttttaaataaatttcctggtgtacccaggaagactttaaaaaaaaataccatttagatctttaaagtaagggaaaacggaccggtgtggttcttcagaccctcgaagtactattatgccagaatgtaaaaaatcggtg

SEQ ID NO: 43012 - DNA, 872 bp, Homo sapiens
gcacgctggccactgtttacattttagttgctggatcacaggatgtccacagttgtaaataataatacataaaagtgacatttcatctacctgattctgcaagtaggctctctactgaaaggaaaagttctttttgtatcccacctataattatttctatacttaacctatgtaattgcacagccagaagttggttataccaaaatactaaattttattaaatgatatttattgaatgattcattgattgaccatttgcaagtaaaataagatctaagtgttgcttacattctcagaggcaatagaagaatatagttatcaattgagcaatacatatatgtaattagtaacagagctgatttcagcaaattagagttctgggccaagaactgcctttgacttgctatctgacctttggcaaatcaattaagattcatgtctatcggctttccacacctctaaaaatagaaataagaatttcttcttctccaacaattgctcaaatgtaagagataaacattaaaaataacttcgagataagtactatataaatagtattactttaaatcagtgatacatataccagagccctataaactcttgtgagacacatgaaaatttctggaaacaatacggtagtctctccttatccacagtttcactttctatagtttcagttacttgtggtcaaccttggtctgaaaacattacgagatattttgagagagacgctattcacataactttgattgcactatgttgttataattgttctagtttattattaattattgttaatctcttaatgtgcctaatttataaattagtttatcataggtatgtatgtataggaaaaacatacggttagatat

SEQ ID NO: 43013 - DNA, 2434 bp, Homo sapiens
gcagtggtgaacaaaaattatcaaggcatatttaggcatcatttgggaaagttttagtttagcttgcataaaacatacttttattctttttctgccttctttggtgagtaggcagactgcactatactctcttatgagtgttattgtaatgaaaagaaaaaggatgaccatggcaacccaatgtccccattcacatctccaaagcctttacatttcttttaccttttgaaaaaaaaattaaaagtttaaaagacttttaccacctcttttgccccatcaaaaagaaacattatagcaaagtaggtccaacccaatgagaaccagcaaaaacacaactttctcactttcacgttcactcacaagaccagtgggttacacaggagttgctgggaaaagcttctctcaagagttattgagcagaaacttccaactctaggccctgaaaggtaaccatactataaaataaaacagaggaaaaatgtcctaggactgataaggagcaggaagaatatgttaattgtggtgaaaaatgacccgaaacataacttttgactactttttctgttttcttccttgtccctagatcctctccctagctcttacaacaaatacccagttcctgtgggtttgtaacatctcgttattcctgaaggaacagatctggaagaaggcagacttttctgtaagcccaaaaattcttcagggttcctggtaggttgatattatattccagaccaagaaaataagagaagaaaggcagaataaattttgtattattttctcacaaatatttacaggtcaaagtccctaatccttagctaccgcttagggttgtcgtgtgtcagcagggttagcctggatttgtttcatcttggttagaaagctggtatcagcaattctactgaatattagaaacgtgtttgtttcctggacatatggatcatacacacatcatgtctttttgtcctgtggagttttattctaacatttatgttgagacaaagataggccctatttagattctaaatcattagtacaagaagatgttttagagatcatctaatgaatgaaaccactcattttttgtggaaattgaaacaccttaacttggtatctaatattgcggaacagtaaacagtttaattttaacgtgtgtaagctacaagagtttcagtacctttaagaagaagaggaggggatattttaattactgtaaagcaactcatgatcacaaaacaaatattttcatactattttgtaaataacactaaactctttttatctccatcagcctcaaccacgtggtaccattttgcatgcagaccactcaggctgaggagcattaaatttaatttgtgctaaagttgaaggtggaaaagcgtgaaattaacttgatacatttttatggcattttctgtctcctagcttctctgagcctttccaatccagaatgatttgattggctgtgtcaggatctccccatccctggaacttccctctactctctgttcggtgaaactttgaggtctgtgcatgtgtagcccattctacctttgcccacgggtgacccagctgaagaaaatgctgatttatttggcttggtatttactttggccaagcttcagtctgtgctcaaggttcactcttcttggtgattcatcctttcaggaatatgtgtgtgaacagcaaaagatgagtcaactcattcaagaaatcattcagcatggtccaaatagcttgcaaagattttgagagaaagctaaaccttttataaggctatacggtaaatagtaactttccagcaatcagttgctagtataacacctacaaactttcaaggtttttacagatatgcctcaatctctggggataaagctgagatattccatattgtattcatcaaggaagcacttctacacaatttaaaaaacccatagagcaagagctgattgaaggcaattatgtttagagagagacagatggaaatgagactgtgggttgcctactgtagatttcatttagtgaccatttgttaagtgttataaaaaatgtctacaccaggaaatgtaagcactcctatcctattattacaagtcttggaagacattgctatcaattctgttcatcttctgatatgatcattcaaatagtattatttaaataacatggttgtacagagattttggagtttcgtgaggatagctttgcaatggggtatatttgcaatattgaagaggataataaaaacaaaaatgaaatgtataaataccacaaattgagaattttaccttattacattagtatttaaaaggtaatcatgaatgaatattttgtgcatgtttacagaaataaccatgtagtaattttgtaaaggtacctatttaaaatttattatgctcatggccatgtgtcttttccagtactggccagtttg

SEQ ID NO: 43014 - DNA, 1042 bp, Homo sapiens
gtattcacagtgcttccgtaggcacaagcttccagaattggtttagacatcttttcttccccaacagcctttcctatgacccagccccagttccagccacaagaccagctaatggaatctcagcaggcctcaatcctgctctctgtgaggaggggtattaaatagagatctagaattcatgacagacaacatcatagacaatttgaattgggaataaaagtgtatttgaacagtggctctcaagctgaagtgtggatcaggatcagaattactcaggtagttgaattacaaaggcaggttctcaagttctactctctgagaatctgtgtcagctagtctgaggtgaggccagagagtttaaatttttaacaagttccacagggaactctgttgcagatgtttaaatcttggaataccttgagagaaccacaacactgtctaaggtctccttgaacctaacattctatgattccttgaagactatggcatgggagtgagaggcttccctctgtcccctgattaggcccaccagaactctgagcaccaccatcctgaccttgactccagataagtcaccagatgagtcacgtatgtgttagtgatcacacaagtatgctctaagcaactcacaaaacaactacatttttctatttgttgttaggtacacaaagtgccacccttagcattcatagacatttataaaagagtaaatggtcaaaaatgactcaaaatatataatgtatgtcatagcaggtgtataagaaataaagtttgccaaactgcactgaaatttactccatgacaagagcagtgcattttctccatggctgtcatagatttcatggatcctgagaaatccagccatttttagaaatcccatgaaatttaccttttcactcgaatccacatgaaatcaaaatttttccctacgagtccccataaaattggcacatttcctcagaagaccccatgaaattataaagaatattgcagattctttgcttctagcccttgttgcacatcttaaagaaacaggttagag

SEQ ID NO: 43015 - DNA, 1018 bp, Homo sapiens
aatggtaatttttgctagatataacttataaacaaaagatttttatggtcctcaatagtttgtaaaagggtaaaacagctctgagaataaaaagtttgagaatcactgtcctagatatgaatcagcaaaatatggcctgcatataaaaaccagctcattgcctgttttataaagtttttttttttagaacacagccacaaccatttgcttacctgttgtcatgttgctttcatgttgtaatagcagagttaaataattgcaacagagatagtattactcccaaggccaactcctaaaattcttactatctggccttttacggaaagagtttgctgatccttgccctacagctttggttctcaatcctagctgttaaataatactaacgccgccttcccctcaacacatacacagaaaccatttaattaaatcagaatctctgggagtggtctttgagtaggaataagttttttaaattcctcaggtgattttgaaatgcagccaaggttaagaatcactgtgttaaactgtagagatctttaggcataatgtctgccttccaagttattccagacaacaacttataaaaattgctcccctttataacatagtttatttccagcccctaatagaagggtcctgcccatgggccaaacactaagtcaatgccacctgcactgatttgtatttttgttatatcatcaacaccctaccaccacattgaaattcaaaggtcatgttagagtgtttgctctggcaaatactttgcaaatttcagtggcttaacacaagaaaagctttatttctcatgcaaacggagtgcaatgtgcttggtagggatctctgctcctcttagggttctagctgcttctggctagagaccctgccatcccgcagtgcctccaagtactgtgccagatccctctacattcaaccagtagaagagagaaaagaaaaagcatggaggattacatgagaagtgttttaggggcccggataaggcacgcattaactccta

SEQ ID NO: 43016 - DNA, 2278 bp, Homo sapiens
cgcttctgctgaatgagattaaagcgacagaaaagggaaaggagagcgcgggcaacgggatctaaagggagatagagacgcgggcctctgagggtaaggtgggcgcaagcggaggtgtggtgcggggagaggtgccagtgggtggaggcgggggccagagcgagggcacgtgcgggtacactccggaggaggtgggtgcgcgcgggggcgtgtgcgcgggacctcgaagtggtggtggagtgcagaccagcaaaaagtttcaaagggaaatcttagatgtcacgtctttgtccaggcacccgtgccatcccaacctcccacctcgcccccaaccttcgcgcttgctctgcttcttctcccaggggtggagacccgccgaggtccccggggttcccgagggctgcacccttccccgcgctcgccagccctggcccctactccgcgctggtccgggcgcaccactccccccgcgccactgcacggcgtgagggcagcccaggtctccactgcgcgccccgctgtacggccccaggtgccgccggcctttgtgctggacgcccggtgcggggggctaattccctgggagccggggctgagggccccagggcggcggcgcaggccggggcggagcgggaggaggccggggcggagcaggaggaggcccgggcggaggaggagagccggcggtagcggcagtggcagcggcgagagcttgggcggccgccgccgcctcctcgcgagcgccgcgcgcccgggtcccgctcgcatgcaagtcacgtccgccccctcggcgcggccgccccgagacgccggccccgctgagtgatgagaacagacgtcaaactgccttatgaatattgatgcggaggctaggctgctttcgtagagaagcagaaggaagcaagatggctgccctttaggatttgttagaaaggagacccgactgcaactgctggattgctgcaaggctgagggacgagaacgaggtcagagcgcttctcttatgccgcgaaactctccctttcttctccccttcgctttttctcgggcttccagggactggggagcaaaccctgtagtgtcacccacaaataccaagagggaagagggaagcttcacaaattactggagcctcttcaacatggctgacaaatatagttttaattccctctaccccttttaaacctgtagttctgtgttctcttctctcctcctaatgctcgtcccctcatctcccagaaaacttacctttgtgcctccgacgagccggtttcccggccttttttaatcctcagaaaagtgatttttaaatttgctttcctttctaaaatagttcagctttgggggcactacttttccctttaatcctcttcccctgtttctttcgtgtaagtgaaacgagtctcccgtttatcctgaacaacctcagagagaacactgatagggtgtttttcgacccttttatcagctgtagggtctgggtctgggtttgtgtctgcctcctcctaccttcttatccccctttagggggctgtacgaagtgaatgtcacagggagtggaattggagtacactgagtgggttttttttttccttaagtccgcgcgttttgttagcggcgctgagtgaaagaggaaagaatagtttctctggttccccaaacaagaccagaactcacttttctcaaggtacataagtcagcgctgggctgagccttccagcctggggaatgtatgtaagagaatttatggacaaatctgtgtcccggctttgtgcttctcccgaatcagcttcgtttggttccttggtaagtgacaggcagacacaaaggcaggcgcaggcccggggagggggcgggagggggtggggagcgcagcgttggagttgcaagactgcaaggtcaggggcgcctaaagaaatgaaacccaatcccagcaaagaagtgaagagcagatttataacagtcccatccaaatttctctttggcttctctctttggtctttcatctctctgcctttctctctgtgtctcctctctactctttcttctctctctctcatacacatacacacacacacacacacacacacctcactcgcatcttgctgaatcttttcactgggactgcttgtctagttttattaagctaatagggtttgtatggagagttttctacctatgacataatgaagtgtggcctggatagactcctggaaaggccgaaaatgaaatataagtgttatttgctggttattcccctcatgatatacttttaatt

SEQ ID NO: 43017 - DNA, 500 bp, Homo sapiens
ttcttcctcttttttggaaaaaaaaaaagaaagaaaagacaaataaatcacccttagttagtgataattccttgacatctgtatgctcatttttagggccaaaaaatagtaggcttctctttggaaattgtagacgctttctctccttccagttacacgcggtcacatcaacatttgacacgtgggtaccgtgcacgtggcagcagtatttacaaacaccatcctaggattccagagactcttatgtaacagtggagagagtaagctttgagtgtctgtgggcggaggaatcaacacagtttaattcattgtccgggagcccttgtctggctctgatagggtcatgaaccaaagatcaaggtgtttaggtcaggatattccctaacgcatggttttcctaccaaagcctcaaaagctgtgcctaaatacaagattaatctttttctttctttctttcttttttttttttttttttgagacggagtttcgctcttgctgcc

SEQ ID NO: 43018 - DNA, 1360 bp, Homo sapiens
ttttccaatttctggttaggaaaaataactttgtctcctccttaattgacccacaaccttgtttgcaatgaagaatcaacacaaatctttcattaaaagaaataggggaggtgatgggggatatccatgagtgtccatgggcataattcagttgccttcattcaatgccaatgatactgcaaagcctacaaggcaaattcatgtacctacagacagactccatcctttttctcaaactattcaagataaaaaatcttgtttcattttatgtgaggatttttttcaccatctatcctcaaaaaatgaaaaatatcctcttcatttgggaaatgagtgcttataatagaaagtaatttgtagtcagctgttacacttagatgatttgtgtcacctctgacctgctttctgataatgcatgacttcattcatggctctctaggtgacctgtgtaccctgacctggcataaaccactagagtattaagtcatttcagtggcacatgtttgagggaagattgacatcccactggaagactatctacagtgagatcctctaaagcagctgcattcctagtgaggcatgattaagtttatcccactattaggttctggagtattacttgtcatgcccaagaggaaagtttttctagcatgcagagtatctggtttttaatggctactgagctgaaataaaatgtgcctactaagggttgttcatttgtctgtctcccttctttcactgttttttttcttggaggttacagtagttatgcctttctggtcagctggctgttgacctatcatagaaatgacactttcacatcttcaagtgtaaggaattagatgttccagccttcactttgtttctcatccaaaatcaatgacaaaactttcagtattgatttctcatggcctatgaacctgagtcaacttggcataaaggacttttcagacaagcttctctaaatgcagagtcagtggcttctttttgccaaactccactttgctcagtgataacattaaaatggtgatttgattcattcctagtctaaaaatacttcctcatattccaaaatctcagtcattaatacatggaggaaaatacaaattattacatgcctgtgcttctcggctgttgtagatagataaaatatatacaattgtgttctataattattgagttcttttaagttttatctttttttgttttaccaggaagcaaaattatgtttatttcagagcttatttactgcatttagaatctcatgacacttaaaaaacctttctaaaacgtaaatattctccatgatctccatggtcacaaacagtatttcacgttctaattgatattgccattttat

SEQ ID NO: 43019 - DNA, 658 bp, Homo sapiens
cggggtttcatcatgttgtctaggcaggtctcaaactcctgacctcaagtgatccacccaccttggcctcccaaagtgctgggattgcaggcatgagccaccgcggcctggcttcatgatccaaaatagcatcattaagcttctctttcaaaacatgtatataagcctgtgagtcatcactgtatttatcagaatattatcatattggagactttgcaaagctgaacaaagccagaattattggctactgaggaactatattctagcaagagactattctatttgttggggatcacctctttttactaaaggggactgttttgggcatataaaactagaattcatggtttctccttgatagtttgccagcttgattcccagtcaaccagataactgctggtagtgacactcatgtcctccaggactcccaatcttgtgccagctcagagagggaaatccccctagaactgctcacaccattccaagaaccacaagcaccaccttggtatagttaaaaatgtgataccaactcaaattctgataaaaacaagttctataaagcttaataaagttatattttttactttttaagttttgttttactattttaaacagaaaacagaaggtaaaaactcctctgccttcctcagtatttggt

SEQ ID NO: 43020 - DNA, 777 bp, Homo sapiens
aaaaaccctagggatcttttagtgatcagaagatccactctacaattttaagaaataaagaaacaaaggctttgagaggttatgacttttccgaggtcagataattaataaacaaaaagaggattttagaatttaggcctcccccatacttcaccatatcatgggaatgactgaaaccaaaaaaaaaaaactgtaagaggtcaaggttcaaaaaagagacagcaggttctcggtaatttaattccatctcaattataattttttaactcgatttgtccttgttcctcaactgcctcctcctacaacccatccctacatacctacacccattaatgaaataagaggaatatgatcaaaagagctaacttttcactggaatctctatcattgtcccactgatgcctaaattacttaagagcaaatggtcagcaatcttagaaagcgacaaggtccaaggccacaaatacagctgactaacccggcatttttcagaagagtgatgtaatgcagcaatgaagaacatggactctggagccagactggagtggaatgactggccatatgatttaggctagttactaaccatgccccatgccccatccacgcggtgcctcagtttctctatccttaaaaaaagagaataacttatcttcattgaagttgtgtgaagattaaacatattccaaaagaagcacttagcatagtttcttcttaggcatattgcaattgtttgacaaatgttagagctcttaggttgatgatgctgatatgcaagcc

SEQ ID NO: 43021 - DNA, 463 bp, Homo sapiens
tttttcatgatgaaaataatacatgtattcacttttaatacaatgataaatgtattggtgttctaaaacaataacatcttgttttaactactcaagttcaataatttcttctcaacccaaatcagcaactggctttagtgtttctgcatatctcttcataaaagcaaatatgaaaggaatttagaaaggtgtccaaagtgcaaagtcatctccattctgagtacgcaacagaaataaaatgaatagagttaaaactttttattctaacacttacgaaactcaaggagtcatgctaggcttatgtgatctagtttcaatacctctagttacaaatatataaattactagaatcaaggatgaattgcttggtataatattatagatgggctatatattgctcaatacagtactgagcaattcacacattagaatcagacagaaatgagttcaaactgtgtactat

SEQ ID NO: 43022 - DNA, 2938 bp, Homo sapiens
gtggaaaatgattacactttagtaacactgagtaacaattttaggccaagtatactacactcatattttttttgaagtgagacattagtccaccctagtactgcatacagacacactgagtaataaatatccaatctgtgatcatctttataaagggcaatttattcgttgctttccccttaccccattcgccctagagtggcttcgtttcactttgccctaccccttctagcaggtagtaaacagtcctggccagtgatgccatctggcggttagttcagaaattgtttaaccaacacaccttccaatcaggatcttaccatcgggaccctctccaaaaccacactcccctttcttccagtttttgcccatttaccttagtaaaatcgggttttcttctttcctgccctgtttatccaactgaatgaaaaacgtattttatttgtggcactctagttacagaaaaatcatgagtcctaagtacatttgcagctaaagaaacaaaccaacaataagaggccaacatactcccaaaaatgcccccattcgacatcctgtcttaacagagactgttagaatctccgttattcatccaatgccttcagggaataccagtgctgagaaggaccttgaggatcatcgtttcaaggtcaaaagcttcattttacagctgaagaaactggctctgtgagaaagaactgaagtaaccacccacccaacagcacacagcgagttaacggcagagccaagattatggcctaggactccccattccaaatccggtactgggtcaactactctgtgcgctcctggcttctcaagcctgtttttgctcaaccagtgtatttactttttccataattatagtaatattgtgaatctctgtactatgcctaacagtgtctagcacacttcataaatatttattatttgggtatctattaattaccgtacttattgcaaatctagaatacttgcagtagacaggccttttttcaatctgcttaaaaagcgaactgccacttcataattttttctgactattcccattaatcatcacatggtaaccttttagaacataatccattcagaaatttgagacttcctgttcacctgatcagtcttaaccaaagatagaagaaaatatgtggcatagggtgaaaactgcaaccaattttgaagaaaatagaaattctagtactagttgcattataatcacacgactttaggcaaactcttctttcccacaaaataatcctcgaccctaaactcatgtagcataactgcaaatctctcataaattacaaatatctataatgattatcggtattaacaatagtaatttatattttaggccctgtgactaatcagtttacatatataatgtcatgtaatacttgcagccctattttacggatgagaaaaaacaaggcttagcaacttaaactcgtccggggtcacagagttaagacgtgaagaactcgagggcctgcttagaactgaaagcctccagagccagtgctccgaaaaggggagcgataatgcaaggcccactttgatactaccactccaaggctctgcagtcagtggggagtgaaggcaagcgaccgacatcgctattttctgttacggttaacgtacacagtgaaacaatggggtacacggaacaatgagtcacgaagacctgggtcctttctctgagctcggcaactcagggacccccccgaagtcgcttagccttctgggcttgttcagcttggggaggaaaaggggctgctccggaaccaacgaggctttggatggtggatcacactcagggtgtaaacttgtgcgtaccaagtcaagcttctggggaaagaaccttcatcagagtccctccaaaaaaagaagacgcgctggattaggcatccgcaaagttccgcctgcctctccgacgtcagggagctcccgcagtaggaggtttcttacgcctctaggaaggccggcgtgtgggcgggctctgccttcccttcctcactgagttgtgtgaaccgggaacggcggccgggccggctaatggctgcaggccgccgcggggtggccgcttgcactctgcctacccctcggggagggcggctggcagggcacagggcgctatctaccccccagccggcagccctgcgcctctgctctccgctttggggtcttgatccgccgcctcctcgctggcagttctcgtgactcggtgcgcgctcccgcgggaagtaaggtggcctggaccgcgcggctaccgctgagggccccaaaaagagagaagggagaccgcgcggggcgtcccaagtgtcccccattccatcccccacccaggtttctccggtgcgccgctcggcgaacctccgggagctacttactaaagaagaggcggtaattctgcgagcagggctggccgcgctcctcagtgtggtacagggccatagcacggcgcgacccggtccctgcactggtccccaaccgcaggcacgcagcggctggggcacccgtgcgcagcagccgcagcagcgcgctcatggcgtcaatgacggtcctgctgtgcgcgcggagctacctgggggctcggccgggccgcacgccggtgccccctaccgtccggagtcatccctcccgccccggcgctcgggctgcgatcctggtccctgccagtggaatctggaacaccagccagttgtgcgcactatgccctcagcgaggccgcagctcaaagacgagtgagacaagacccaccacccctgaagagctcactgccactcgttaattcatacatttattcatgccttcatttatcccgtcaagaattactatcatgattttttagtatagtgatgtaatattgagtgattactctgtgccaggaactgctctagaccctgtccaatataggagatgagcgcacatgcacgca

SEQ ID NO: 43023 - DNA, 1333 bp, Homo sapiens
caagtagctgggattacaggcatgtgccaccacacccggctaatgttgtatttttagtagagatggcgtttctccatgttggtcaggccggtatgaaactcctaacctcaggtgatccacccacctcggcctcccaaagtgttgggattacaggcatgagccactgcgccaggccccctcggttgcttcatccagaaataaaagacgggctatagctgactgctgatttgggcgatatgtgttggcaatattgttgagttccaaatacttttatatataaaagctaagtataactaaaagataaaatgtttaaatgcagagaaagatcttacaaaaacaaaatgtgtccacaatgcattgcagagtttgttggtttaagaaatgcaaacatagaaagtgtttagaaacctgaccataaaatgatgcaagtgaagtttttgttcctacaataaacttgagtcaaaagagcaaacaaagatatctcataaggttgctcaactgtaaattctctgagagatttttacacctgagggagaagttgagtattttcactgacactttatttcacccaccttgcccccacaaatttgttctcaacaagttgttgagcagtattggaaaacctaagcattttttaattgacaaaatctgatgtagtacattttaaagtgcagcaactgaaacgtctgtgaagcaggttaagttaacattgtgattgagtcctggaatttagaactaaaaggaacccaaatgcatgttttagggatattcctttgtcgacgatcaggaaaaacttccttctccttgctaggatcccaaataattcatagattaattttataaggcatagaaggtttagaacctggaaaagcaatgtcagagcagtttttcatcagcatcatttttattttcaaggaaacattaagtgataattgggcagtgtccatactggtttgtcagctctcttacgcatgagatttcctcctgtgctctatttcacatactccaggagtaaaggacgtccctcacacctctctgccctcagtctcccccacccccacccaatcatttcactatgtataatacatcaaaatattatgttgtacatcttgaatatacacatttttaaaaagaaagggccacaatgcagcctcctcactgcagctcctctcataaggtgtcctgtcttcctctttcatatccaaaataattcattgtaatgacacgtgattgtaacttgctttttcaaatctggggcactgagaggcaggctgcttctactttccaatgcaaatattacaaattaggctggtgcagtggctcacacttgtaa

SEQ ID NO: 43024 - DNA, 2357 bp, Homo sapiens
cctgtaatcccagcactttggaaagatcagcacaaccaggaggattgcttgaggccaggagttcgagaccagcctgggcagcatagggagacctcatccctatttaaaaaaaaacagccaagtgtagtggcttgcttctgtagtccaggctactcaggaggctgaggtgggaggatcacttgagcccaggaggttgaggctgcagtgagccatgatcacgccactgtactgcagcctgagagacagagcaagaccctgtctccagaagaaacaaataaacagacagacaaaaacatcaaatatacaagaaaagtctttctttgaattcttagtccacatttgtatcaaatggactaagtttaccttatatgaaaatgttgccaatttaaataatctgctacattggtgagtcaaactagccccgctaaaatgaatgtcattgatagctgtattcttatatattttctccaattcttttttgtgcttttactttttgttatttttctttacttgtttttggcttcctatgaaactcttataagcagttctcagaattggtgtcttagaccatgccaggtaaaacttttccattatggtaacatttatggtcgtttatttggcacatttggcttttgctctcaatactgtgaattacaattctcaaaattctaactcacattttctaggttgttttatttgaattgtttataggttgttgatttttcacactttgaccttgttatttagctatctttcaatgctgtctgctctctgccttcctcattgtggactttaatttcattctattagttctctccactaaggtaatagcaattctcttaaggttctcagaattctcatgtcagatctgcctttttcccacttctcaaaacttttaacctttgattaagtaaataaatgttcgggtactcatatgactcttatcagcgtttatatgagtgctgaggtagttagttgacaccaccagttcattcagttcactaccttttcaatgttcgttagttctttcctgttctcacttcccttctggacatttaactaccagtgtctttgagcacaaaccacctgtcatcactgtcaaaatgtgtagattaacacatacagttttcagataactatagcaataatctgtaaaccaagcttagctaaacctggggcaacataaatattttacaactacaggttaagctaggagagaatttgggtatcatcggattcatcatcttttctctatacaaaatcaaactcagaccactcccagtaaaaacaaaacaaaacaagtcattttatttaagtgaaaattggatgaaggaagttgaaaactgaggaaagtaccagaagttcctggcttaactgagtcaccttgtatgagtgaatcagtgtacaaatgagtgattagatctagcccttgactgacaactgttctgtgacaatcgtgctgtaaactttaatcttaacttcaaggcttttctatgtcagacctttaccgaactgataatacatcaaactcagcagttacacatcttctttaatagcagcactgtgagaggttttgcaaagaaggcaaacgttatccacatcagttagtgttgaaacatttagtgggaaaacaggttctagttatttattatccaaacagggcagtgagagatactctatgtttttggctataagtcaaagtaaatcaaactagagtagactaatctaacaatggaaagggcaaaaagtgattgaaaggaatagctggaggaatttgagtactgtacttatttttatttttctttgttttttaattattttcagttgctaaaattcacatagtgcaaatctaccaaagatctcaagggggctatagaattcctcagctactcggtttcctcccctagaggcaaactccattaccagcatctttttacccatccaatgatatttcaagtgtatgtgtttgaatgcacacttggtagattttatttctataacaagaaagttatgtgtatttattttgaatttactcatatttggtttaatcatgtgccttatgctcaaaaatttgtgttttctaaaaaatggtttaaaatatatataattttgtattgacaggaattcagttggaattttctgttaaaattttgatatactatatggcaacattatataaataattttcactagaaaaaatatatagaggaaaataatcacctgtagtcttgccacttagaaataagcacaataattattttggcttattgtttatacaaacatactgaaatattttctggaataggaattataccatacacagttgtccctcagtatctacggggcactggctccag

SEQ ID NO: 43025 - DNA, 1102 bp, Homo sapiens
acgtttaagaataagggtacacattcggttgtttggaagaaattttatgatgtataaaacaacctcctatgtatcttggctgtttctcacgctatgcttgaaacaccagaaatccatgtaaactgtaaaacaaactgatgaaaaagccaagtccctttctccacttccatctcctattcgatccagccccacccactgtagagtaaggcagttcctgaggtcaaactcctcagtcacaagacctcacagactttagtgagtacagatatccaaaccaggctgataattccaaagtaaaagatgccctaaaagccagagaaaaacagggattttgttcactacattaaataaaaatctgagaaaaccagagcaattcctgccaagtataattaagatgctgggagaaatgactcaaaagaaatatacctgcctttctcattctactttgtattggcctttctgaactaaggtgctgacttgaaaatgttatactcttgctggaagtctgctttaactatcaatacaaatattcttcaatcctttacaaataccgattttcatgaagaataagatacattacaacaaaaaatcctgtaatctgtatgaccaggttagaactccattttttttttaatcaaagacttgattttcacactttctgtggaatcctagcatttattatatagtctgggccattgtttctccataataaggccagatacctgaggtctcataaagtcagaaaaaaaaaactcaataaaatttttcttgattttatgtaagtgtgttaataagggcagttcctatgtgttggaggttaaaaatgtgaaatgttaaatttaaaaataaaagtcacagtgttgccagccacaatgtgactgtgttaatacataatatctaactggcctctttctcaagtactgacactgagtcatcacacttcacttactttcccattttcccctggagggacgtttctgttttgtcaacctggaaaacacatagtttgctgtcatattggattcagatttagttgggtatgaaagtgatacatcaatattctagtatgtgaattttctttttatgggaaggaaatctctta

SEQ ID NO: 43026 - DNA, 755 bp, Homo sapiens
tttaagttccagggctgttggacttcttaactcagggacttctcgagtttgaacccagcctctttctctggctttgactgttgcctctgtccttcctcacacacatgctgagatttctgttccagaactcccactcccctttctgcaaagggactaacatctctgtggctaatgtaggtctgtccacattagtatcttctggcctggaatgttttctggcagttatcaggtaacttaagcatttatctgcaagattagttaaaagacttgctgtatagctgtgatattgattcaactcatagtttgactcaattagccagtttcaaatccagtttcacagcaggaaatttcacacatacaaatcagcacttttgagaagcctgatgaaataatggctagtttaccctgaaacgctttgtaatctagaagccaactgtctcagtaaatgccatagtaatgagttaattatcctagcccagtggttgctggggctttctgccaacatcctttttttccacttgctgcaatttctatctcacaagcagtcctcttctcaacttccttactaaaaaataaaacaaaacctactttatcctctcagaatgtccccagtgagtctccacttctcaaatgtttggtaacccatggcagctttcttccacttccaccttactgcagtctcaatatcattgggttttgatggcttcagcattaataatggatcaatctaatttagaggatgcatccaggcctca

SEQ ID NO: 43027 - DNA, 776 bp, Homo sapiens
caatatctatgcatcttaatgattcatggatctaatatggtgacatatttttttctgtgaagggagatttaacatatcaagtgtcattttcacatttggtagagtgaacagcaatggcagtaattagtctccaaagatggccctcaatggaccatgcctcctagttcacattgttatatgagtctagtgtcatattgactctggactggccctctgattcactattacaatgtggtgaaaatgacactgtatcagtaattgggcccaagccttagaaaagcctgacaatttctactttcataattttggaagcctgccatttaaaaagttgagataccttactggaagtatcatggagagagacagcagatgagactatgtagagtgagaaagtggcacagctatcccagaatcccagcagaggccagcctcccagctgttcctgccaaggcactagatttgtgaaattagtcatctcggacattaaaacccagataagtccttggatgactcagcctgagtggatgtcaagtgtagcaaaagaaccacagagttgagcccagtcaatctacaaaattgtgacagaaaataaaaatggctgttgtttcaagatactaagctttgggatggtttgttacatagcaataaataacccaatagcaatagtcctcttatatgtgtttgcatattataatgtttcaaagtattaaaacaagactgtcatgaacatgcttgagtctactttactggcttacctcatgcatagtgcgctgaga

SEQ ID NO: 43028 - DNA, 1319 bp, Homo sapiens
ggatgccaccttagcttcagaacagccccttctttgagagccccaccacaattatgacattgtcttccctggcactggacacagagatgatcacgacaggttcccatcctccactctgctcttttcctttctctgtttctctctttagggtccagctcccttcattggtccctcttcttcatctctcattccctcctaaacccaaccctctaaaaatgctattactgcatcaccagggacctcagaattgtcaaatccaatggacacatattttttctgaacttatcttacgctagtgcttctgaaaaaaaatttttaccagaatattcccaatatcaagagagaaatatcataagcctcaggaagtgtggagttatgatctgaagctagagccacaggcgtgaaataatttggaagtcttattttgtcgtaagaattcatgtcagttttccagtctactcttctaggaaaccagagtttttttcttcaaatttcttaataaaatggatactcaagggatacacttgttttaatcccatggctgcatgtcccacctgctgcctgtatttggtttgaatattataaccctagccagggtctcttgggtatccacagcagcagttttatcccctaggctaggtggaagctaaatgagactgaaggcaagggagtgtggcttctttaagcagcatatactctttcagtttctttcttctcacttcctctccttgttttatgctcccttggagaacagaatgaggctaggaaagaaagggagaaagtattcagatgatctggcatttgggctggcgaatctactgccttgtttagtcatggcagctgggctcccatccaaggaggataagaagaccgcggggagcaacccttgaacttggggtgaaagctgccaggaaagctctttcactggagatggcataccatggagctttcgctcagctgtgtgtgtcactcagggaaatgacagtcagaggcctgtattgttgcacccagatctcagaccttctttccagagagtgggccatctctaccctctgttcatcacacccccttctctgtattctaaatactctgccttgaccacaagttttatttagaaccacagataacttccttttgggatatatctcaggccataatttatacatgagattttaactaaaattatttttgtaaacattatcttagttggtttttagaattgaacttactgcatagtttttcttgttaatacaagcaacatccaactttatatcctccataactaacagttcatgtcatattttcatataatttttaaa

SEQ ID NO: 43029 - DNA, 621 bp, Homo sapiens
ccctggttataactgactcttaacttgtctggacattactatttgttcttattacccttctgtcttgatgtttcaaaacactatttctctattacttgttcactctgttgtttattcagtttctaaaaaacatattataatgctaactaatgaatttttatcagtgaaatctatgtacctgattaaatgtcctgtcagactttgccttgtcccaataacctagatggacagaaatctgagggccaaatttatcagcacactctaaagctggcttgatgttgagttcttgttcttacttggctctacagggactttggactgagcacctcacacagactttctgcctggtgtttgtagtatgagactgcatttagttcctactagctggtacttcaaagcaattttctccaagcaatcctatcaatatatataatgtgaattacatccattagagatttccattaccaagagaggaaaaaaatgagatagtatttcaaaacaaaaaatatattaatggcatatcttcataaattgttatttgctttctttttcctctgcatttggcaccaattcaaagtaggcatagcatcaggaatataaatataagcacatataagcatt

SEQ ID NO: 43030 - DNA, 1634 bp, Homo sapiens
gtacaatgttcctatctgtaaaattctcacaatctttcgcctgtcttgcttaattcattaatcccactggtctgtaaacttgatgacagcaggaacttgttttgttcactgttatttccctagtgcttgaaacttaataagggctcaaaaatatttatcgaatgaacgaactaggttttttgcgtaaatgtcaccttataaggcttctgtgatctctccagtctaaattgggcattcatatataaatataagtatgtgctttctcctagatccatttttcaccctacctggcaatctcaaaagaagtccaaagttgatcatatgcacgtgccccagatgaaggaaacagaaactgttcacatagagtgcagtattatcgttgccatttcataatggctctaaaaaactttgttcttcatgacttcgcaagctcttgcaaccccttccaataaacattattttaaagatgctgcctttttcattcctccactgagttcttggttctggataacactgataccttagggacacctggaatcgcaggagaaaaggctccgattccaaaccaatcaagtggctgaaagctgacagcaaacacttagaaaaggaatgtcaatcctttgatcaaagcatcacacatcgaagtcctagaatgggggatggtccttgacaggggagccaaaagatgagagacaatgagggagctacgtagagaagtcactaaaaccctccgacaaagtccgaggcaggattccaagtcccttgtccctagacctagaaatatgctcggtccgcatgtcccggcccgcaactccctcggaggaagcacagtcctcactgaaaggggagagcagtcagtctagggcacgcaaccgcccgtaaattatgattccccttgaggagcgaggaaactaataccccacgtagctactctcccacctcgctcctggcgcgggggtctcgagcctccaggaggccaggagcagagtcgctcagcataactcaccgttccgccccgccctgccgatccgtctgttcccggtggtcccttcggaaacggttcccgcactggccggctccgaaagcaggaaaacaaaggttcccacagtaggggcgggggaaacgtttggcagtgcgacagtaggaagtgacgttacttccctttttccggtccgccggattatgaatgacggccggcgcgagtattttccacataaggtggctgtcgtttttctcctggcgtctgtggaggcgagtggtctgcgggcagcagctcccagaggcagccttggaattccagctcggactgggcgggaaggcgcaggcggcccaggtcgccgacacgctcacgcaccctccctgcctggccgcgcctctgcgaccaggtaaagagggcgctcgggccgccggcttctcagcctccgcgaccccctaagaactggtcttttcttcgggggtctgcagggctgaggatgcgggggaagggtgggaaggacaagggcgtggtatcatcgtcctgatttttctcccgccctggggccgcctcaaactcctttttggccactcctgctgaaggtgcgggttgagggctctgggcttctcggtagtacgcgtttcccagtttccccctagcc

SEQ ID NO: 43031 - DNA, 781 bp, Homo sapiens
aattctgatcatagctatgtccataaagaccctatttcacctgtgggacttctggatattcccttaatactctaccccctattcttagtgtataatcctttcttttttctaccccaaatactttaaacaaatatgaataattttaagaattccagatatttttcagttagcattaatattgatttagcatgtcactcctgttttgtaggagtgttttttcaaaagtatttgtatggtctctaagacatttgtggtagtcagcctccaggatggcccccaatgagccatgactcatgaaattcacatgtgcattcttgagcaatcctctccaacacagaatacagttaatggctgacctgtgtaaactaacaggatattgcattgcaggaataacagtgtgtgtttgttgacactaggttaccaaagccactgtagcttccaccttgttttctttccttagattgttcactctgagagaagccaaccaccatgctttgagcatgtcaagaggcctgtggaaaggccctcaatgtagaaaagaattaagcctcttgtcaacaactagcaccttctttataagtaaaccatcttagaaacagatcacccaactccagaaaagcttttataacagatgactggaggtccagctgttatcttgactgaaatcttgtgagaccttgagctagaaccatctagttatgctattcctatgttctgatccaaaggaattatatgagttaataaatttttattgttgttttaagccacaaagtgttgaggt

SEQ ID NO: 43032 - DNA, 2660 bp, Homo sapiens
ttgtacataaaaaggctcacacacaaaaatacacacacatacattcacttacacctcgtgagtggaagaaaactaccgggggaaaaaaaacgtagagatgagagattagatgagggaaacagcagtgcaagcagttgggcttgaaaattcattcattcaacaaatattttgaagcccctattttaagtcagttgtttttccagctggtgggcaaaggataatgaacaagtcagactctgtgccctcaaagaacttagagttttaaacgactcgaatggggaaagaaagtaaaaaatagggcaaaagacgccgattttatcatgaataaaatttcacatttcttcaacaggaaaatgatactaattcatttattttatatatacattctctcaagaggttatttttgtctcaaatagatagaaaccaggacagggatccttgaaaagcagccactgacaatcctcaagtaacttccttcctctgcttcactttctcctactgctcaagggggtgttacactttgacgactgactaaacctcgagggccagaaacaaaccaaagcaaaattctgcctccaaggtgagtaatggaggggcggattctagattctctaacctcctttagccttcctttgaggcagtgacagagcgattactaagcctacggttcccaaacgactcaggtgaacctgatttacaggaaaggcgggctgtagctagggatggagacagtacctatcagcaagcggctccacagctcggttctctatctattctgaagacatgcggggccactcactgctcctgatagtcctctacctcccacagaccccacccactacgacacggaaaactggattacccaaatacctgcctctgagtctggggacgcaggcaagcacaaagacaagggggatggagcttctacacagggccccagcgctgtcgctgtggctgctgctgccgctacggcttagtgcaccagacgctgcatttcaggtgctcctacaaaagaggccactcctggaacgccgggagctcagacgctgccctttgctcgcgagccaagtcagccaaggttaaccttcgcggaacccggcgaggagcgcaagcctggccttccccaaacacagatccgagcttttcaccctctaccctcccctcagcctggccttttcttccgccctcacagccaccgcgacccaacgctgaggaaagaccccgacttgtggtgtccttccccttgcccaaactggccacgaaaggacatatagcgagagagaaagaggtgcggggggacggggggggtcgattgaaaatactgggtgagggaatggaagacgaggagcgtggtatggcaggttaatgggactgagcacaggaagaggaagaaagaattgagggttgaatctgtagaacactcaggctttcagcaaggacacctcattgggtcctttctcactgctatagtacgcgggtggctggacctacatgcttcctgctgtggctgtctcggaacccgtggtcctccgcttcatgtgagtgacgtcgtggcgggtcactcactcggggatcgccgattgcgatcgtaggggtcttccttctctaacttgcctccaggagagaggacctggcctgcgctgctaatgggtagtccgttcgcagcaggaccagccctggcctaaggaaacaggaaagagtttgagacttccttctaaaggagccacgtttgagaaatgggatgcaggcctaagttaagaatgctacagaaaaatatcgatccctaagcgtatttactgttatgtgaatgtgtgtgtcaaaggacttaggtgctttgggggagaggagggtgaagacaggaatttattcattgagcgaatagttattaagcgcccactctattccagacaccgttctaggcattaggtgaacagcagtgaacaaaacagacggaaatctgtgtctacttgtagctcacattttagagaggaaggcacatactaagcaaagtaattagaaacatactgtattttaggtcgtgatagtcctgaagagaaacgtaaagcagggaagaagggtataaagtgacacaggaaggtcttgctgaaaagatgacttttaagtaaagggctgacagaagtgggagatttaaccacgcgaatatcttgggaaagtgcagtcagacagagggaccagccattgcagaggtcatgaagcagaaacgtgctagaatagcaaggaggcctgtagggcagagttgagtgaagggtttagtccttcactggagattaaatcaaggcgagcaggtcatgaagatcttgaggacatctaacttttattctaaatgaaataggactttggagcgttttgagcagtagagtgatgggctctgacttccttttaagagggtcactctttaaggaaaatacacagaggaggacgtggtaggagaaaggagaccaataagaagagttttgcaataatccagaggaagcataatggtggtttgactatgggtggtaagaaatggccagttatattcttgatgcacttaatttggatatgtaagagtattatagatgacagggttaattttatttaattaggctttggaggacacttgaaaaatgaattccagtgtgagtttcagagtggcaaac

SEQ ID NO: 43033 - DNA, 710 bp, Homo sapiens
gctgagactgaaccaaaagaagggtagcatttttacaagttcttcttgaacagaaaagatctgttcaccattcagtataaagtttaactgtggagcttctaatagacctggtgtctctgagctcagtgactcattgaggctcttgagtaatactagtgaagtccagcagctaaatttagattgactcagactgaagaatcaacagattgaatagaatagagcagctcaatgaatagtttccaggaattgttaggaatagtttccaggaattgttagtaatagtctatacagggctgtgtggactattgttagtaatagtctacacagggctgtgtggactattgttagtaatagtccacacatcatatgcacacacacacatgtacacacacgtacacacacacacacacacacaaactcccaactccctccatctcctagctgtggtcatgtccaggcctcttatccagctcctctccttattcacagttgaagactgtgaataagcctccaacttagtgacctataatgaatgaacaagcaaacaaattggaatagaccaccagggaaaggtggcatgtgttatttatgctcaacctgaggtccctatggtcttcttttggctagaatggagcagtcacttatgctacaactgataaggcaagcaaagaatctgaagttctgaattgtttccctatgaataatgcata

SEQ ID NO: 43034 - DNA, 1392 bp, Homo sapiens
tccatgccattctttcagcttctggtgttgccagcaatccttggcatcctttggcttgtagatgcataactccattttctgcctccatcatcatgtgatgttttccttgtcttacggtctcttctccttttcttataaggacacaaatcatatgggattagggtccactctaattgaacatgatctcatcttaacttgattacatctacaaagtgatgttcatgcaagtccctttttttttaaactgtaaaatatgggacttggacatctcttctaggtagacaatttcataatctctaactcctcttattttgtttcttttttaagttcataattgtatcacattcattagcatgcttgttttgattatatatttttccaaaaaagaaaaacaatgaacaaaaccatatgaatttgtgagactgtctatgaagaatgagaaatgtagccatacgcagttagcaaacagttttcacaaagaatttggatgattcaagacaaggaagcaaaaatatttaaaaaatctcaactatttaaatagctcaagcctgttccgaccttagtactctgccatgtgctattctgtctcctggaaaggttccactctgactaacttctacacctttcgcaggttatagctcagctgtcaagcacagaaagcttctgtgacatctctcactccttcttcaccttttaaatggggttcttttagttattttcactcttaaaatctatttttttgtttattacacctattatagtttgtaatcacatatttatttttgtgtttttttgtttactttctctcttctttatttgactgtacattcctggtggcagagatcatatctgaatttattttaaatctgtctccctagagcttagcacagcaagtgttttgttcatattagataatcatttttcaaatgttcaaatgaatatatttagtcatattgtcactggttctgtattgctatatcaagaagaagaatttgggtttgtgaatctttgtataactcaatataatatgttacctttattgcctaagagtttgtcaaaggaatgactgagaggggctggatgaccaaagggtaaaatgtggccaacttcccttgattaggccatcttaaaaataaaatgttaagtattaaatgatgacactatattaagataaatgagattattttaaaaagtacttaattataaaccagggtttctcaacctctgcaccactgacgttattttggaccaaataattctttgttgtggggctgtcctgtgcattgtgggatatttagcagcatctctggattctacccagtggattccagtaacaccccttcagttgtaaccaccaaaattgtctccagacattaccaaacatcccctggg

SEQ ID NO: 43035 - DNA, 780 bp, Homo sapiens
caccaccttattctctacctttactcaccctacttattgattgatgccgattataacattttgaaaaaggagaaagtgggaaaacctaaagaccactgagatattctatagagcaaaaacttgttaatttctgaaacagttgatctatataaccaggaatggaaataatactaaataatacttgaaaatataattatcattttgaattattcctaatagagcctgcatagaatacacaatccataatgacccagagtccattagtctcaactaacagcacaaagaaatttcaaatactcttttaacgctggtcttcaggagtccaaaggccgttgtattagattcactctgtgaatggtaagcactgacctctagtggcaagcatgattaatcacagctctgtccttcagtgaccccagggaaaacacccacaccaaggtagaggcttccttacggaatacagttttggaggctggcaatgtcaaatgagatcaaatttatacctctttaaaaaaaaaccatgagcacttctcctacctcctgatggaaatcccaaaggggtgatgtgttgagtttgatagaaatactctaagaaactgagaataaagactctggcctttctaatatttagaatttggatgtatgacctcatgagcccaccacacagacatgaaaagcagtggagactcaatgatcatacatatgcctctgtttactcctttataatattccatgaggagcttctaaagacactggtcaattaaaaacagggctagaaac

SEQ ID NO: 43036 - DNA, 637 bp, Homo sapiens
cctgaggggtttcaactttttaagttgtttctactgatgtttgcctgcatgttttcaaacagcatgcttacactttgttatgactgtttaattttacatagtatataacatagaccttatttccacatcacttagacttcctaccatattcgagtatttaatgaggttcttattccccaacaggtacagtgatatcaacatttttgatgaaatcaatattcatctgtaaagtgaggattataatagtatttatctcatagaagttttaagaaaattaataaatgaaacatgtgaggtcttagaataatacctggcacacagtaaatatacaagaaatattagccactattatctctattttaatcccctttttgcacaactgtttttcctagagttaatgattaccttgatttttttccacttgcatagctttgccaggtttctgtgtaccttgctctaacctgcttcatgaccacacagtttaacataataataaaactgtgtgtgtatgtgtgtaaagataagggaaaaaatacaaaattcaggacagagattatctggggtggggggtggtggatgatggaaatggcagcgtaaaaagaatgggattggtggctgggcacagtggctcatgcct

SEQ ID NO: 43037 - DNA, 460 bp, Homo sapiens
gaatatataccattacagctttgaaatagagttgatagggaacttgctaagcatcatttacaagtaaaagctttttaaaaaaataagcaactctataatcaggaactccagcaccatggcaaacctaagtatcagtgtatgcatacagacacacacacaaacacacattaacctaaggaacattttatcaacctctactcaggggaatgtagtcaacaacaggggaatgtagtcaacagttgagaaagtaaacaagaaactggactaatacaaacacactcccagttatagagtacaaactgtaagagacccaagagcattgtggacaaggtcttattcatctttgaatacttggcaccaaatacataccttgcaaatagaaagctgaggactaaactctgattttttatcttgcccaaattcctatctaaggggcctggggagtcatgccctacaaacc

SEQ ID NO: 43038 - DNA, 1066 bp, Homo sapiens
tccagtatattaaaatcatctcatcagctttacaagtttagtgtctggaatagcaattaagctatgatcttactattctaactatccttttaaaggaaagtgtcaatgagtttctatccctgtctctcatcttattactcttctgtatctaatcgtcctcatctaggtttcaactaataaagttaatgattcctaaatctagatctcaatcccatacaactttcctaaactctaaaaccaatttcctagatggcccagtggtaatctccacttagactaactccactagcacttcaaacataacccaccaaaaatgaaatacgcatgtcctcccctcctatcctgtacttcataactcagtcataccaacctttattcagaaagcaccatgcttcattctgctctcccataaaatcagcaatcaagcaggcaccaggtcttactgatgctactcaagcctcaagagcccttaaatatgcccccatctttactagtcccattgctgctgcttgagttcacatcctcttccctgaaggagctggtgctacggcaagcctcctggctagtctcctacctccagaccagtctcaatccaggcttcaaggatgacctcactcaaatgcaaacccaatgataccaatctctgttataatctcaaactattaactccttttggggcaaaatcctttctgagcagtgcagaagtcaccacctagcctctgcaaattgatcagctccatctcccctcacaatcatccttcatatcagtcacaccaacctacctacagttccccaaaaaaacaaactgtctcacattccattgagcatactatactgtctcctctgtctgaaacagttttctccctctggtctaactagtatactctgattcatccttcatgactcatttcaagcagcagctcctctgtgattctctcataacacctttcacatatatgtacttcatcacttgcctcaagatattgtaactcttcacatctccgcattcccaccagactaccaactccttcagaataggaagtatcaggttaattttcagaaccaa

SEQ ID NO: 43039 - DNA, 1302 bp, Homo sapiens
atgaccacattgttgggtactctcctttcacactgaaactcagaaatggaaagacacggagatggacccaaacctgggccaaccgcactggcagagccaagaaaaaccaagaacgcgtcgaaggcgcccgcctccgccttctctgcacatcttcaggccactccaaggtatgcaggaagctcctgtttctgcagccgcaggtttcagcacccggaggtttcagcaagcgccagttcacgggtgaaggattttcctgggggtcttacctgagcggaggcgctggggagggggggcgttcttcccacgaacggtggctcggaccgcacgctgcgccaagctagggcgagatccccaccctgcgccgcgcccctctgcctcgcaaccacccacggccccagccgggaggcgccgcagccccggaacccacctccgcgctcctggaaggatggatgcggaggaggcgggagagaggcggcggctccggaacgagctgctcccacagcccctccgctcctcgccgtctcgccttcgtccccagcttacccagttctgcgcgttattgctcagtttgactttcttgcacaggctcccggggatctccatgaccgcggagcgcgctgagcagccggggttctctgcgccgggagggtagcaagaggagggcaggccagcgagcggggcggggctggagggcggggcctcctcgcgtcggagcgggcgcgcgctgacttaagcacgcgcccgtgctcgtggcctgggttgcgcggcgcatgcggcgcgcctcggaaatgggtccggggcagaggtctgtggggaagggcgaaacgccgggatagaaccggaggtagaagctgggggcggagcttcagcgctcgcgccggcgcgggcgcgcacggcgctcctccttccagatcccgatgaaggggcggggcctggaatgcagtcgtggaacctcaggtgcctctgcggcaccgagcctagctctgagctaacgcagatctctaagagcgagtaccagccgccgggagaaaggcaaggggagtgcgcggctcgccgcgcgcggcactccctcagcagaggctgattgggaggacgctgacgcggcctcttgcacctgtggctactcctccacagacctggctgccgacctcctgtctgccccttctgtgcccatgtcaccctggccaaatgttttaaatgttttacagctttgcaaagggaagaattgatttaccgaacagctcattctccacattaaaattctactcaagacacaattttttttctttttttgagacggag

SEQ ID NO: 43040 - DNA, 3459 bp, Homo sapiens
tttgcccatttattactcggactattagatttttttttcctatagagttgttggagctcctcatatattctggttattaatcccttgtcagatggatagttcccattctgtgggttgtctcttcagtttgtttcctttgctgtgcagaagctttttagcttaatatgatcccatttgtccattttctttggttgcctgtactgtgacgacatcttgaagttgcgagtttggggattgcctgccttgtatattcttttctgttaccatcatctttaatagccacaaatgactgttgacccacatgatatctgcactagaaacccaaagattcccgtcattatttttgttgattatatggaagcacccataaaccagcgcaaatcctaaacataattatcttgtccagaaggagacattaatgtaaaacttatgtcaagaaagatttagccacattccctcggattggtcattcctagttagagtccttgaggctgccatcgtttactttgaaaactgcccagcaggtgtatgaatagcaactccaggacaatgtagaaccattaccattttaaagacagcaatcccccttttaaaaaactactgaggccttcgaagaaaccacacggctgccttgggccccaaaagctgcggaaaagcgcagtattcagttaagcaaataactacttacactgtttattttggttacgattccttaagtgagaagtaaatcaattaacaggacaaatgacacgatggttaggcacgaaagggacagtgctgccacctcattagcttggagcaaccttccagctcataccatgcggactgatgactaaccttgccaggcaacgctgtgaggtttggaaacccacctctttgacctaggcccggtcaacaccgataaaccctctgaatcaacgctggcgctcccaagcccactcacacgccgtcaggaagcagtttccgaaacaggccgggtgcgggggtgggggatcccgttccagccccacccctgaaagttgctgggagtggcacccaaagaactttcccagattgatctctgttgccgctcagggaggtcagctccaggccctcagcctttcggccgggagccaaactgccctgcctgccaagcccctccttctctgcaccttaaacagccgcgaggggagagtcggctgggattttcttcttaagaagtcgcgcaggtttttcgagctccactctgcgccaggagagccacggcagcaggaacgggcactgctgccaccgggccgacgggtgagtcactgtttggaaatggagtgggcgggcgagggtgtgagagaatgaatgatgtcaagagcgcgctgggcgcagggcgcagggagcgggccgcgcgcggcgggcggggagagcgggcgcggggccgcggtcaacactgagcgccgcgccgtgggccgagtggggcggggagacccagccctcggcgcgcacggagcctggccggtgctgcagcgccgccgagtgcggcctcgggggcggcggccgcgggagggacccggagagctgcttcccctagtcaggccgcggcgtgggagggcgagaccccgagcaaactttctagcggcttcggcccgagggtggtgacgcccggggctggtcgcggcggctgcggcagcgggctccatcccctggcaaatccccttcccgggagcaagtgccttcagctgggagtgtctggagccctggccaccagcgggtaaggagcgcgcggaggggccaggaggaggatgggctggggagcggagagtcctccgaagcgcgggaggggaaaggtggattgcgaagcggggacgtggctctaatccggcccccaccctccccgcccagggcatgcttcctcgattttgtggtctggaggagagatgtgtgccttagtctccttcctctgagcagtcatctcattcatttgcaacccatttcgggtaccccggtcctggcgttggaagggcacaggttaaaccccagattgtccagaaccactccggaggtcagggctgaagttcagttggtggaggagggactgtgtgtgtgtgtttgtgtgtgtggtttttcttttctttctctttttttttttttttttttttgagaggcacttactgatgatgtgtgaacagtaacagcccagctctgggcagcccacaccgaaacccttcaacgtgtggcattccagagctgctccctttacggaagggaagacttggtttctcagcgaaaataaggggcggggaacccctgtcaacatccatccagaggtatggataatcattaattatccacggcttgaaaccaactcaaaatgttatgtcctgtagtcttttttatttattaatgttgccggtcctctatttcaagtcttgcctgctctgaaatgaccttaaaatcattttgacatgtgtgttatattttgaagagattcaactgtttagtgtcactggattcggcgtgggttttcaatctgtacctaacttttcaaatccttggtttcattaccagtctcctctattaacggtgggtgctcaggcacattaaacattctgaaccagtaaaatgggattatagctacttcagataataaggtggattaaataaggattaataatgaggataataatgaggattaaagcgcaaaagacttctcataatgtctggtacaaagcagaccccaacaaattatagctgtttatatataaataatagtgtgttgcagctggcttaggtaataaccaattaatttccacagaatgtcctccttataagcctggtgggccgagggttagcatgtgaaatcctttggcaagttccttagattgggaagtgatgttttcagcaagttaaacatttttagtacggatacctgagaaggttatggtttccatcctgtgtcatgggaactgccatttactgtttaaacaatgtcagagcaatggctgaaagtgacaacctggaatttacaggaagaaaggacgtgaggaagctaactttacctttaccttttttttttcctaaagaagcagtgcaagcagtgcaaaatttcctctttatggccctttccttggtcttctaatgttcttacttcacaatagtctggttgaagtgtttttttttttaacaagttaatgtttaatttggttcctttggtttcatttttaagtaaagctagttgacttgtgaacctagagggaaacacttggacaccttgaggtggctgcaccttgttctgagtttctcccctcgcagaatctcataaaagccctaggaaatgtttggaagaaactttagcacttgtgcacgttattgaagacatttgctcttaccataactataacaacttacagggtgaaagatctgggagctgtcctacgacagtaccgtgtagtgagatcatggacatgggaatccaggagacctgaggct

SEQ ID NO: 43041 - DNA, 1422 bp, Homo sapiens
gcatgactcctagttttttttgtgggtaaagagttgtagtgaatggtggtgtagtttagccattgattagagttgcccattagtcatcctaatggtgacagatgtcaaatagccagttgtgatgcagagacctgcattcaggggtgagatcagggccagagttgtgtcagtatagaagtgatatataaagttatgggaagtctagaatcaccagggaatattttgtaggcagagaggccctgaggaataacagttaataggtcaagtaggagaccatggggtaaccaatgaggaggaccgaaagaacaatgtcccagatgctacaggaaccaaatgtttaagacagggtggagtaatcagttctcttgttaagttcttaaagagttgagtaagatgagaacacaatgtttgttgggtttagcaatgtggaggatacttgagatcttgttgagcatttttagagaagtgattcaaagcacaaattaattacttccagcatcccctgcaggaaactttcctgctctctgtcttttccactttaccctgtgggctagaggacttcttcttcttcttcttcttctttttttgaagttacatattaaaatattttgaaataattgtgcatttacaggaagttacaaagatgattcagagggttttgttagccttcactggttactcctgatggttgcatcttgtgtaattctagtacaatatcaaaaccagtcctctttttgttccaaagttcgcaggcccttctttgtcactccactactatattataatctggttttctgtttatattgtatttcttctagacagagtgccttgagcagagtttatcctttttttttttaagtatttcctagcatggtgccacttcatacctgtttgctgaattaatgagttgaatattcttggatgctgctttttgcttatatcatctgctactgtgttctcttaggcagaagcaaatgaagagcccaggtttcctgttttccaatcaatctgctaacctcttcctgcaccatctgccttctgtagccactgccttgcctggactgaggatatctttgcccagaattacatcactccctctcctctctgactcttcctccaccacaaccaagccaattgccagtgattgattctgaaggcttgcttagctccattcctttcttcttggacatttcatttgtaccctgtacttttttgggagtcatatatgaaaacctgtggaaatccccttcttacctatttcagaaactccatctttcccccacctctgagttctttgggtgaagacatctctgaatttacttcatacaatttaccatttttgaaactttcatttgccccattgcacacttaagtatcttagagacctagaaagtttgggttctatttgcctggtaatagttg

SEQ ID NO: 43042 - DNA, 994 bp, Homo sapiens
ctttgagtttcttttctcactggtaaggttaaacactttctcactttaaatgttaaagtataagagtttattttcttttattgtgaaggtttgaaggcatttgtttaaaattatttaatttttactgttatgatattatatgaccttcttgtcatcgctcatgactttaaccttaggaggttaatcatttggatataacaactttgtgtcatgaaagaaagaacaagattgccaattgtctgggccatggaagacctaacagaaactgtagaaagcagagcttatgagacagaactttttaataggtgtgtcaggctttctgggcttaaaaaaaaagtcctgtttcttggatattttaattcagtctgcattgggcagagagaagtacagagttgcctttcaatatattttaaatttaacagtctataattagaaaacactatttgagctcttataataaactttcactctgaaagtacccatctaaattagtgggtcattcctccccactccttttctccctccccctcagtcacatctgccatagccatatccatggactctgcttctgtaagttcaaacttgtgggtcactgtttcataatattaaatgatattagtggggcttactccctccccttataagattacttcagtgacttccttatcttgagaggaactgacatgtgattctttaggaacacagcttatcttataaaatgggagttagtcagtgaacaaatatttataaccctcaattctgtgccagaaagacagcagagaatctgacacatgtgatcccttccctcacagagcttgcagtctcactggaaagagacaagtaaatctctacaaataactgaccaaagttacagttagcaaactgttaagtcagagaaaaagtagaaagtaacgtggagcaagggaaaggaaaccaaatgcggtctggaatggtcaaaaaaagcttctccaagaatgcacaggagttagttata

SEQ ID NO: 43043 - DNA, 2194 bp, Homo sapiens
aagtttaagcactaaatcagcagtctagtgttgggaggacgtcgtgctgaatagatttctgccttatatccgactgtacctgtgcctgagttgtcttcatcctgccaaacacaaacaagttgctaggcaacaggagtgattcagatgttctgaacacctcactgaatgaaatgtctaaccatgatgtttccaggaaatgccgcctctacaagtcactgggcagcctgataaacatttgcatgtgccctgaggtcaagtgacctagagcttctcgcttatgtgttataaggtggggccagctaatgtttggaagaatgccaccttactgggcaaacatggatagttttcatgctcctacatggtaactgtgaggaggaagagttggggacaggactgggagaagtgcagtctctccccagaagaactcaccaggatggaaatccattgcccttgggtcacatctctaattgtaaaaatagcccaagatcccagaaaatcacaacatagcatggttccaggagcctggactcagatgcgttcaaattctacctctgtcacttgttacatttctaacttcatacctcagataggggtggtaatggtgactaccctatacagtagttgtgtgtattaatgttagcatttggggaacactaaaactggcatctgtcataaactctgggaaagcattagcttgctcgccatgctctagacagctccttgagaggtgggggctgaattgtgaaggaatgaagaagaagagaagtgagatcttttccaaggatgtatttattcttttatgatttcaaggactgcaatcatagaaattttaaccataacatcatttaagaaagctcttcaaggtctttcagcactgcatactttgagaattatgtatcaaaaaatgacctcagggttatgcagcggaaaggccatgcgatcatggagcattgctttagggcttccagtggatatgtaatgctctgaagctagatatgggtttttgctttactgttttttccttctgttatatccccctttttatataagatataataaaaatgcagtcacaaaaagtaaaccacagtaagtcagatgaaatgtttgggctctgtgacatatatggaaaccatatttatacagacacattagtgactcatttaggaaaagaaaggtacctgaagctctctgggaaagggtaagataattctggtgtctttgagtgtgtgggctgccacattcattcaactgctattctagggctgggctgcaggttcttggctagtggccaggaacaccaacacaaacaggacatggactctatccttgcagctcataaccagcagaggagatagccctgtgttaagcagtgagcttttaaaaccctgtgctgggctgaagagatgtgtaggagcataggtatggggagaaagccaatggcattcaatctcaatctgatctttaagagttctaagttcgcttgaatttatctttgcaagggaaatcagaatgttagagaattgtgttgggaatgtgtcaccacatgccaggctagtggctctgcagttcctgagcaatgttttgtagtagtgactaaaccctgctctgaggaagtggtgacattaggagatgcaacggagagtaaaagtagttggaacctttcttcctgaacttgcagagtctctctctctggttctgtctttgctgactgagagatggtggtgtttcccaaggaagtagttggcctgaaagtcaaaaggatgaaaaggattggggagtgactctcagagttgcctcaaaagccagtcataatagttaattttgaattaggtagaaactctggtcagttgtacaacataagtacatgacgttttattcaacagctatagagatttctttaaaaatatgtgtttttaattgacaaataaaaattgtatatattaaggtgtataacatgatataatgatttatttattgccaaaataatggcctagtgtcttaaggttaacttttcaatctctataaaaagtaaaggagaaagcccgttgaactgtaaaattttccagctttccttgaagtcacaatatataaagtgcttcactgaatttaatgttgaaggtagaatccctgttttatatgcagtcttatgccttgaataacttcctataagtgtatgttggtttggggaaaatgc

SEQ ID NO: 43044 - DNA, 1934 bp, Homo sapiens
gttgatcttggaaatagaaggattgaaaaaagctaaatttccacaaagaacaagaacttgaccatctcctttttgatctgaagactaggggacaatggatatcatagagacagcaaaacttgaagaacatttggaaaatcaacccagtgatcctacgaacacttatgcaagacccgctgaacctgttgaagaagaaaacaaaaatggcaatggtaaacccaagagcttatccagtgggctgcgaaaaggcaccaaaaagtacccggactatatccaaattgctatgcccactgaatcaaggaacaaatttccactagagtggtggaaaacgggcattgccttcatatatgcagttttcaacctcgtcttgacaaccgtcatgatcacagttgtacatgagagggtccctcccaaggagcttagccctccactcccagacaagttttttgattacattgatagggtgaaatgggcattttctgtatcagaaataaatgggattatattagttggattatggatcacccagtggctgtttctgagatacaagtaagtaaatctaatgttttgaggatttgtcatgggtttgtttttgagtgaatagatgggttattgagattatttttcctttttttcccccaataaattcagtcttacccaaacatttgatgaaagaaaacagtagaaagctctaccacattgaataaattcagtcactattcagtaagtgtttgatgagcaactgtgtatgaaagtggcagtgtacagcagtactgtggtggatgactcagagttgatgaatttaaggtgcagttcctgacttccagcaacttggtgctatggtatttgtatgataaatcaagaggcttggaaaggaataacattcactcccatcatgtttgttatttcaggctcttgacaagtgggaaaaggaataggttgagaaacttttttctccattactcataatgtgatgtctgtattggtctagagtcaatagcctgctttaaggtttgcctagattcaattctcaaattttacatttctgtggggctgggtgtgtggatgtggtttcggttttttgtttgcttgctatctagttacaagtgtttaagagactgagtttagaaccagatccatgcggttttgatttttagatttctaaagtaaacttgccctctgattttccttggacaccacaaaggagctcatggttcactgggttcagcctcctcatttttggaatagtaggaaatcaagaagaaataagtcaggtacttttgctttgaagacacttaagaattggacatagccctgaagtggttatttctgcttctctatgtgaattctgactcctagtccataaaaacgaaggctccttaattcctcctttcctctcattcatcatttagacatttgttttccactgggatggtagtgattaaatcactaaaatatgattttgatcaaaacactgaccataatacagagtttaaaaatgtaatgtatgctaacttggatacaatctgaacattccaagtcaaataggatttcagtattaatgccacaagatcattcttagagaattttggctgtattgttttttagttggtaacacttttcattacttgatcaattatagaactctcaatgtggtatatccactcagaccctaacactgttactgttttgtgattagaggaattcagtctatctttgttaaagagttccccaaatgcaactttgcagtcttaaaaccttattccacaaactgcagtcattcctaagcattttccttaatataactcttcatgtgtttccttaatatgcttaagtaatagacttagctatgagttgtcttttacttaaaaaagtaacctgctcctgaaattgttaaaggatgctttatgctaaaagcaaaaaatgtatttatg

SEQ ID NO: 43045 - DNA, 1619 bp, Homo sapiens
ttatcttcttttcatatttctagctacttaaatccaccaagcaaattctggtttcgctatttctggatttaagtacattttctaatgcacccaggccacacgcaggaatggacacagctttcgctctccgcataagttttctagcccagggcaagctctcagaacgtgactcctcgtgcctcgctgcccgcccctcgctccccccactcccgccatcatcccttccgcagagttggctgccaagccgacacccacagattctgcattccacggcttcccagcatcctgctgtctctgcgtggaggaaagggtgctgcgaatcccagtttagataaggaaccccgtcttttcactactacaccgaagcatgcaggaatagggcgttgaccccattctcccagctcagggcacaggtgctaaggccgacccatctcacgggcctgttcaccagtttcccacactcagtacagatcctaacacggtttatgcacttcataaccatgcgtttgtgtttgtcaactgacaaacgagtgataatgacaaacgaatgacacaagggaaaccaacagccaatcagagcgcaaggttgtgttgccagcatcccagtttcagggacagtcaccgccaagcccgaccctgcaaagggtcgtaaccggacttcggggcaaacttcaggtcccccgcctgctagcccgccaaccccctccgccaggcagccggcgcgcctccaggttccgcccaggcgtcgctgagtggcggcggcggggagaatgcgcgcggcgcagccaatccgggggcgttcctacaccccctgcccgcccccgaccttccagagcagagcaggacactggcgccgcgggtcaggcagctgcgtgcgcgtctcctccaggcagcaaggggaacccgaggccgccggcgcccggaccatgtcgtctccggggccgtcgcagccgccggccgaggacccgccctggcccgcgcgcctcctgcgtgcgcctctggggctgctgcggctggaccccagcgggggcgcgctgctgctatgcggcctcgtagcgctgctgggctggagctggctgcggaggcgccgggcgcggggcatcccgcccgggcccacgccctggcctctggtgggcaacttcggtcacgtgctgctgcctcccttcctccggcggcggagctggctgagcagcaggaccagggccgcagggattgatccctcggtcataggcccgcaggtgctcctggctcacctagcccgcgtgtacggcagcatcttcagcttctttatcggccactacctggtggtggtcctcagcgacttccacagcgtgcgcgaggcgctggtgcagcaggccgaggtcttcagcgaccgcccgcgggtgccgctcatctccatcgtgaccaaggagaagggtgagcgggaggtcgtgggctgtgggtacgcggatgccgcggatgagtctccaggtgcgtgggggctgcagttcctgtgccccttccggccgcccgcgcccccaggctgcctcacacctgcatcctgaactaacaggtgatggtggtggcggcgcttctcctttctgatgcctttaagatcccatcaagtagtgacggacgcg

SEQ ID NO: 43046 - DNA, 2950 bp, Homo sapiens
caatggaaaccagtcacaacagtaaggtggacgggtcaggttataaatgaccctgcctcctttgttcggtgtactcttgtggcaaaactgctggcgagtgtactctttccgcagaaagtaaaaatggccttgctaaagaaattaattttatgttcaagtgctatttctttacggcaccaagaaataagcatttctagcagtccttaaccgccataatgccctaaattagaccatgaccaattggactcaaatactttgaactatctttattgcctgaactttgaattgtttaattttgatcagttcagtttgtggagactcctgttaaggtgtgtacctcagtttattgctatactccttctcgtggccataatagtctccctgatgtgttgttgtcccctcgagagtcttcaatgtctctatgcagccatcctttgtacaccaaatggtgttattacagttagaataacaacatgaagaaagtataatcactcaactaatttgacattgtgacttccatactgagacaaaacaaggttctggtcaatctcgtaaaactgagaggctgacccaaaggaggaaactgttattaaattaaatctggcctaaagttgcctccctacctagcaaagcataatcaaacctaatatgtaaataaactgcaatgtaatttgagagtacgttcttctaacaagtggccaagtcttggccaatcaccgcagcggagcttttagcccattacaggctgcaaaaaatattgtctataaacgcggcttgcccactgttaggggctggagctctctgaacctttactggctcaggatactacatgattcatgctttctttgctcagataaactctgctaaacttgtttgaagtttttttgttaacaatatttaaacataaagcaaataaattaataagaatcctatatcactaagttacagtaattagaaagtattcacctgagtgagaagattggccaagctgctatccagtcttccattatttgacaagacatttctttcctatgctttctaatagtattcgttattccagaaaggttgctctatgaccttaaaccgtccacatgttcactgcactgatagacgtccaacgtcaagatgggtaactaaaggtcaactctctctttaccttccctgagcctgatttttgcattgtaactcatggtcactagacatttgttttgggtgttcgcagtctacatttatttcccttttaggggaaacaatcactgtccacgggattaaaataatcccgagttgattatttggtgacatcaaccaacggtgcacattttgggtccattaccaacacagccaagcagcacatatttcttcagagcctagatatgcacatgtcatcaaaggatagcattttacagagtcaacaccactcacttcatagaacaaggggccagtggcttttcagaagaagggtctgttctcggccccacaccagaacgccagccgccaggtcccgctgctcagcaggtctcaagcccgcgctcactcgggctccggctgctgacagctgcgagcccgcgcgtgtatacccgctcaacgctgggacgttacagccagggccaatgggcagagcgggactcgaggccccgcccccgccttgtggcgtcacggggacgccgggggcgcgcgggctgcagggccgcgtaggtccccgcccccagagtctggctttccgcggctgcccgcctcgcgcgtcttccctgcccgggtctcctcgctgtcgccgccgctgccacaccatggccttcgtcaccaggcagttcatgcgttccgtgtcctcctcgtccaccgcctcggcctcggccaagaagataatcgtcaagcacgtgacggtcatcggcggcgggctgatgggcgccggcattgcccaggtgagcggccctccctgcagcgtgcccacgcgcttggccgcccaccctgaggtggaagctctggcgcgaccggccgcgaggggcctgcacccgcccgacaccagggagttttcaccccgcgcctcccgggtgtagttgaaatatctcgcgtctgggcctgtgagggcccaagtctcactcccctcaaaattcagggttctgggccgatcctcagcttcctcgtttggaaaattctggctgcccccagggcccgctgaaggttccatggagagtggcggtgaatgcattttggaagcgggccgtgcaagagaagaaagaattgtatgtgcacaaggttcaggcataacgcgtttgttcctgctcggctcaaacgggagtttgctgccaaagacatgaactgcgatcagttttaattctatcagttatttttgatttttattctgtaattgtgcagtctttgtcaaagtagttttctctcctaaacggcctcccggctctccccggtctttccttcgcttgctaggttgtaaagaatagtagtagtcatgacttttgtagcactttgtaaagtcacctaatggaagattgctgaggtcctggttttgacctttgaaatagtgccgtctgtgcagagttctgagcttgcgattttggcgctgcagcggaataagtctctctctttttttttttttttttttttttgagtcggagtctctttgacccaggctggagtggagtgcaatggcgcgatctcggttcactgcaacctccgcctcccgggttcaagcgattctcctgcctcagcctcccgagtagctgggattacaggcgccccgcccggctaattttatatttttagtagagacagggtttcaccttgtgggtcaggctgatctcgaactcctgaccaaaggtgatccgcccgcctggcctcccgaagtgctgggattacaggcgttagccactgcacccagccggaacaagtcttttatccattgtacatcttcagggcttttccattgttctgctga

SEQ ID NO: 43047 - DNA, 2410 bp, Homo sapiens
aggttatatgtttttcatgcattgattgctcactgtgggtcatgggttgggcactggggtttgtaaagatgattaagacttgaagctgcccttagaagttgctaaccttgtgtctctagggtatgactgtaagaaatgatggcaaggaaccttgcacttttagattgggttgatctctgcacatgggtaaaatgaaaatgctactataatttgaaatcacttgaagttatgctatagtggtagtttattgcaacacaataaattgtgacctgcatcactgacttgaatcattggctagatgggccttggtccgttgccacttaggggaaaaccttggtttggattgatgagggttttgcttttgggacgttgttttactttgctgcctgcccgcagcctgtggaatgtttctgctgatgggctggtttcctgcttgcctctgtccttgtatcaagataattcattccacgttgccccggttgcccagtcctggttgtcagactttttggtcctgggagcgttttcatgccttggttcccagacggtgctgatgcagcctgcaggtccacaggctcagacatgagcccactgtgtgctgctttctcagggagccatgagtgcagttgaaataaccttgcacttaaaacctgtcttaccattttgaaaactgttctttggaaatcttgccttgggatttgaacgtctttgcctttaggttttgctcttttgtttctgtttcttttactcattggttttctgcttttgagttttggttgccttgcttcaaaaatcttatatcacgaccatggtttgggactatttctgtcatctccttgttcttctctgggcaagttcattccagataacttgcccctctcctgcacactgttggtgtcatcgaggttccaaagcaatggttttgcagggggcttctcagatcctgagggatatctcagttctgctgtcctcttgcatcatttatgattatattaggtcatgcctgtcctcttgcttctggcctgaactaattcacttacacgtgcctataaggtgatcgaggtgacccaatgatcttcttttagccacaatacctattccatgatccttgctgaagctattgccagacagtgatgaaatagggattgatttgtcactcactgtgactaagctaagctggctgtgtgtgagcttgggcagtttcactaaacattccccttaccctaggattcctccctcagccagggtggcatggtgaaggcagggaattgcccatcctaaattagctgatcccaaagacttcattttcttgggagtcttgtcaccaaatagcccttggggacaggagtctttttgccaccattattagagtttaaattcttacctattactgatttaagggctgtagaagagagaagggccaagaggccaagctgtacaaggggctccagctccaaggagaaaaggatggtggctggggagtgggtgctctgggaacagcctgctgagcactttgaaatatggctagtgccactgaggaactgaatatttaattttacttaattccaattaatttaaatagccacatgtagctagtggcccctgaatggaacagtgcagtgttaaaatcagtacagagaagtatttagagcttggccttcagggctttgattcagattccggctctgctgtctacccattgagtgaccatagggacacttcttaaccttctacagttgtttcaagaatttgttgtattcaatataaagggtttagaacagtgcctggcaagaagtgtgtgtttagttaatgttgacttatcatatgttcactcggtattttgaatggaatggtagtagaattcatgtggaatatgaaatgccactgttttttggggtggggtgtgtgcgcgtgcgtgttatgttttctttcttttaaaaagaaattgttcttttgttgctctaggttgctgcagcaactggtcacacagtagtgttggtagaccagacagaggacatcctggcaaaatccaaaaagggaattgaggaaagccttaggaaagtggcaaagaagaagtttgcagaaaaccttaaggtaatttcttattatcgatgtcttcaagacaagtcctctgactgctttacatttgcagggcaatgggggatttctggctttctttctttctttttttttttttttttcagtttgttagtgtaaaactcatttttccataactttaaaccaatataataacataattactaaacattcagggggtactgattacaaaacaggagaagtaaataaccattttgttgggtgggatttgaggttgagaagaaagcttgtacatacaggtggtgaactcattctagaagaacatgagaatttggaattgaagaacacttgtttt

SEQ ID NO: 43048 - DNA, 2063 bp, Homo sapiens
aatgtaaaattttacatactgttttaaaggttaaactttaccacccatgaaaagcctcaagtagttctttgtacataatcataagattagcaaccatttactgagcacttcctctctataagaccctgtgctaagtgctttaacttcataatgcctttgatcatgacataacatggcacggtagttcctaatatcttccttttagagatttaagggcttgctcaaagtaacatagctaataattagcagacactggattaaaatcccaatttgtttgtaaagcttgtgctctgaataaatgacaaggaaagagaagggaaggttgaagaagggaaggttcttgaaggtccctggtccttgaaggtcccttaaccataaatgtcaagagttgggatttaaacccaggtctaacgccagagctggcgccctttagattaaaagtgcagtgtccatgacaacgaaagaagttgattttgtcccacctttgctctttgcggcttttcatttgcgtttgtttccacagcgatttccaatagatttctgcgtggccttgacacagacagctagtgtgaatccccgcccacagaggggcggcacgttggttgccgtacaacgtggtggttccctgcatctctgcccacgtcggagaggtgcgtcggcttccgtacaacacggatactctctctctgacgcaacttcctgtcctgcgcaattctatttgacctttgaactggcaaaggcttttttcttcctcttccggggacgttgtctgcaggtatggatgttgttctcttttccctgtctttatttccttaccaatcggctgccatccgaggagctgaggaagcctagagctctcagaagcagtcctttgagctggtgtaggggtaaggggcacaacagggaggttggtggtgaggaagttccttactttgatctttggaaatcccttgttcctggtggcacctccaaagccgtgagtagccacagctcaccacccgggactttgctgcattccaagtgtagcgtttggagactaacgagttgtggtttggcggtttgagtctggaaaatcgccaaacgttttcatattttacacccacgttttcacagcacgcctgtacgtgtccttagtctttgggagggcagggtccggcgagttcgggtggtttcgctatttggcttctgcgtccaaggcccatgtcaaggaagagaaaaatgtgttagaagtttctgtcttgcttttggagatgcaaacagaataatggcttcataaatcactcgcactggttttacgtgtcaagttttggtgtctggtaattctgttttagtttaattttagtgagaggcttgtgacaacaaatgaggtggttacaaggggtggaatgggaagattaaattagttcaagtattgattatgttttacgttgggtagttcccttaacgaagttgctcgtatgcatatctgtataaccgatttgctaaataacatcacgatgtttccagaagtgggaagaaagcaggtgccataacccaaagaaacttgtgtaatatcaaaattagtattaaagggtatgcctttacgcaggtggtgctttagggcaagacattgaaccctgatatgtgccaggcattgtgttgggacggatagcccacgtcgtttaatcctaatgacagctgtataaagtagacagaattcccatgttagagataaggaggctagctccttgccctttatattcccagtaaatggcatagctaaggattcgacttcagagctcactttttgtgctctttgtttaaagcggtgtttctccaactgggctcgtggcacttttctggacaccactccaaacaaaattagactctgagtaaggagcctggtcatcagaacgttaaggaagtgccacgtttgattaccatcaggaaagctaacattcttggcctcttgtttatcagtcacctttaaatacaagtagttttaaaatgtggaataatacatcttaatttaagggtgttacatacaaggatatgtatgtgaatgaaatagaccacatgatact

SEQ ID NO: 43049 - DNA, 938 bp, Homo sapiens
atatgaaatatatacaatttagtaaaaattcaagttattttaaactggagctctggaacactgttcaacctcaaggcaagcagaaagtgactcatgtggtattgtgcaaagctggagacattgagggtgggttgaatcttgtgcagttattttgactacaatgcactttaccttttcagaaagcatcttgccatccttcaaaactcacttctgcagacttaattgctctctgctcagtgtttccataacgctttgtttatcactgagcttctaacgtaccgagtccgtctacaagtctccctcgtcttctagactttgatctcctcaaaggcaagaactgggccttatttatttttgcatccattatacaatgcctgtaacctgatagctctataagtgtttgttgactgatgaatgatatcttacttaggcaaactagagaagcagaaaattataatgcagccagttccctaagagttaaattaagtctgaatagaaatcatcaccggttggatttgggaacaagactaagaagcaaaagctaataagattgagacctgataacatagttgaatattgaaaaaggacaaaatcctatttgcctctgtcgattagttaacagtgatgagattggcaaactcctgggaaagagccagtattctctgggcacataccaagctactgcagggaagcatgtcgccagaaagtgatgctgtggaattggggtgaaggtcattcagccaggtgcttcagtaacaccagagcctacagggcacatagatggcctaatccatctatggattaggataatccaaatatggattatcaatatttggattttatcttcttaacaatatgctagatttaataaatggttttatttatttactttattcattcatttgtttagcaaatatttataatgagtgattattgtt

SEQ ID NO: 43050 - DNA, 708 bp, Homo sapiens
tcagtatcctggtcagatgtgttgagttttcaaagttggtactaagagcttccattagtacagccctggtttctaagcactctcaaatgtattatttcattctcacaatcacctatgcagtagcttgcacatgtgttattattcttattttacagaagaagaaatggattccaaaaagcagtgactcactgaggtcacacagtagttgagtggcagagctaggagagaactctggtctcctgcctggttgaacagatcttgctgtgacctctgacctgtcagctaatgtgcttgtggtctgagaacagggaccttgagccctgccctgcgcctgtgattctctggacttgcctcactcatgcagatgaaagttgacactgtggagtgcatcttactgtttcctgcctatgagtagatttgtctctaatggaaagaggggtttcttgttgttccaggcacactggacctactgctaggacaccattgatttttaaaaaaggatgtttttaaaatgttttccacatgctcagacaccttagtgtctcaaaaaataagaaaatatgttagagatgtcaaaacaaataaatgatgtttaaagtctcttctgtgcttaaaagaataaaccctttttcacggatgctgttggtgccccacccagatcccttctgtcaggtggtgcactcagtccccatttgctgtaagctgctg

SEQ ID NO: 43051 - DNA, 3385 bp, Homo sapiens
taacgcagtgagtgattagaaaaagtagggtagtgattgattaatggggaaagaactggattattttgatcccacttagcggctgagagagatggaactagtcttccaaaccacccagaaacccctccagttggggtgaggagcttcagtctgagaaactgtccagcattcctccgaagaggatgcggattgttttcttccttgtaaccccaagtgctctctcatgcccactggcccggctgcagtcgttcatttcaagtgaatattgcagacggttgactttacagtattcggggtcattaatcatcatttatatttacacgtatctttttaaaaaccacgcacaaaacactaacatattaatctcatcttcttgctcctgtgaagtagaatgttattcctactttcatagaagagacaattaatttgacagaggtccacacagggaatatgacatccaacgagagctagagcccctgtcggtcttatatactcacctttatattactaagtcgtttgtgacgggggcaagacaagcaggctgggaagaacacagcttgggagagcaagttgggtaagagggatctaaataaagtctctgcttttctaacagaaggtggtttcaagtttttctattggctagataaacccttcatcacttaaccaagcatgcaagaagaaaaagctcactttaagtaaaaattgtcagaattggtttgtttgcggagccatcatgaaaaaatatttctcagttcacagtttccaaaaactttcgagttgtgtgggggtggcggagcgctatccttcttccacccatctcccatccctggaatggtgtctgctagggctattggccgtcatccaccaacccctctagccggccggcagcccccgctagtccgccggctgcagagcgagccggggactttcgagcgggcaggaagcccagcgttccgggttccaggagcgtttctgggagtccgcgcggcccctgcaggtggaggcgcgcggggcgcgtgcacaggcgcggcgggcacggagtgcggctgcagcgcatcgtttgttccctagccggctttctctctccaccttctgcactcgttattgccccctctctgcacttacttccgggccagggtgcccttacccgatgtgcttcttcctcagccccagagtgtcccgcttactgtacagctcgcacatggtggcggggtgcagggcgctgcgaaggtgcaaggtgcaaggtctgcgcgcctcctacgcgagcctgggactgccttggcggccccggccggccttcctcccgttatccctcctggcgttctcttgcccggggcgtcggaggtcaccggtggcgtcaactagctaggatcatctcccttttaagtctggctctggcgttgccctttgccaagcccctcctcctcccccgccggggccgcgggcaggtcgccgggctagcagctcattcgccaccaccctgtcctgccaggccggctcggccctacccgcccctatcattcctctgaattcgcctttcattctcctaactttgcctcgtctttgcttttcctcctcctctgcctgcgaattccctccttcccacgttctttctggtttctttttagtgtagtcctttattttctggtaaaaattcaggagttaggcgcttcccggatcaagactcactgcgcagtctgataaggtaacctaccatttactcagcacaaggacgcgtcctaacgagaaataacccggactcagcctgttatctccattggcagtgatgatatatgcagtgtttcaaacatctcctttaacaatgattacacttctaattcctctaactatacaacttacaaaacacattcacatgacttatcttgttcagtcttcaaaacaaccctgagagatgaccacgagtgttaccccatttaatgaacggggaaagtgaggttattccctgttctaatgattatatatccacttgatgctgaaaacgggactcattcttagatttcttgacttccttcaagatggtcttctcacacagatcatatctgaagctaaatatgtgcacaggtagaaactttttttttttttttttttttttttttttttttgaggatggagtctggctctgtcacccaggctggagtgcagtggcgcaatctcggctcactgcaagctccgcctcccgggttcacgccattctcctgcctcagcctcccgagtagctgggactacaggcgcccgtcactacgcccggctaatttttgtatttttagtagagatggggtttcaccatgttagccaggatagtctcgatctcctgacctcgtgatccccccgcctcggcctcccaatagaatcttaattaactgaatcattaaatcatacattattttaactagaagtcatctggtttaacttctctgctctgtagataagaacagtgaggcacaggaaaggtgaaggtttattcaagttcacacaaacacttagtcattgggttaaggataggtcattttattctctctgtgttttgaaagggcagcagggaaagcctaatttgcatgtatcaacacatttgataagtatttgcaactgatctttctcttgaaaaaagttattaatatatattcatgcactgcaggaggagtagaattggattgcctaaggtagaaagagaaatggagtcctatgaggaacagtgtgttaattccagattttaggccaggcgccgtgactcacgcctgtaatcccaacattttgggagtccaaactgggcgaatcacctgaggtctggagttccagaccagcctggccaacatagcaaaaccccatctctactaaaaaaatacaaaaattagctgggcgtggtggtgggcacctgtaatcccagctacccaggaggctgaggcagggagaattgcttgaacctgggaggcagaggttgcagtgggttgagatcatgccactgcactccagcctgggcaacagagtgagactccatccccctccacaaaaaaaagaaaaaaaaaagaattccgtgttttataaatgaagagcaggaagcactttggagacttgcaagaaatcccagttatgtaatcttggtctagttctgtgcctgaaagatattgccaactgtatatctactctcaaaccaccttgacctggtgaagtcatagtcacacttccttcataaaactttatggattcttgttgttaatattcccagtgccttaagaaactctggattaagagtcttgggttctagatctggttcttccataaaccagctgggcttcttaacctttctgaggcccaatttctttgtattgaaaactgagctctgtggctggtggggagctacacagct

SEQ ID NO: 43052 - DNA, 953 bp, Homo sapiens
gtaggaatgtatgctgtagtgtcttttctctccagaagttgacacttgggccaggcatggtggctcacacctgcaatcccagcactttgggaggcagaagtgggcagatctcttgagatcaggagttcaagaccagcctggccaacatggtgaaaccccatctctactaaaaatgcaaaaaattagccatctgtgatggcatgtgcctgtagtcccagctactcaggaggctgaggcaagacaatcacttgaacttgggaggtgcaggttgcaatgagctgagatcatgccactccagctccagcctaggtaacagagcaagattctgtctcaaaaaaaaaaaaaaaaaaaagaaaagaaaagaaaagaaaaaaagaagttgacgttctttcagttttggtcctgacattattgattggctcactctattaagtgagtcctgatccgaaggtcatagatttctcaacaacctaggcttggccaaacaaaccatacttgtgcatgactgaaatgaggaggtacagcccacgcaagcttgggaaaataagaattccattcaatagtccaatgagaagagtctgaatggcaagttttaattttctttttggtaaaaaccctgtaaaaatgggtgggtgaactgtatgttcccaagaacagagattattcagcttattagacattactcaagatggaacatgggcatttgaaacttttcactctttcctgttaccctgtcatgccctaatctaccctacccttcatagggatttgtattttctgaaaatcatacatcatctgggacaaatgctgggtgtggtgcttttctgacctgacacacggtatccaaagagggcatccttgaccccagacagaactttgcatgagcaatatagttcacgtgtctaaacttcacctgagaagtctacactgctgtcaacgtgtgcatataactg

SEQ ID NO: 43053 - DNA, 752 bp, Homo sapiens
cctgatgtgccattgttttctaccctcttctcaaagggtagaaaggcactaccaagacagtctctgctaacatagagttaagacaaagctccttgcacatttgactgagaatgacagcatcagctgattttcctggagaaagtctatgtttgaaaatcatagtgaaatggaacaatctttttaaaaagccatctatgcagcagcattcagctgacatattatagttcctttttatgtggaagaagtccagaaatgtcaataagtctctaggtaagtaggtacagaaataatgggtgacactgcaataacagacatggcacataggggtgcccacgcctccaggcagctttccaggaaacagcttcactgggaactggcaggccttaggagccatgcggctgccaagttcttgcccagtgagagacctttcttcctggcttgtccctgagactgcagggacatggaagcagaccagaagcagcaaaagttgtacagtatgtgtgttcaacttttaaaagtagaagtaaagtgggtatttaatttaatattataaattaggtattataaactttttgtttgaaatttttacttatttatttatttttgagataggatctcactctgtcacccaagctggagtgcagtggcatgatcacagctcactgcagccttgacctccctggcttcagctgaacctcacacttcagcctactgagtagctgggacgacaggcatgcatcaccatgcctggc

SEQ ID NO: 43054 - DNA, 642 bp, Homo sapiens
tgagttgaaagtgtcccctcaaaagatgttgaagttctaacccctggtacttgtgcatatgactttatttggaaaataggatctttgccgatgatcaagttaagatgaggtcatttgggtaggccctaatctaatatgattgagtccttacaaaaaggggaaattttgtcacagaaactgacccttagagagagaagacaatgtgaatacacagggataaggccatctatttaataccagccaatgaacccttgaggctcccagaaactaagaaccctttcaaataatcaaaatgccaggttttttgtttgtttgttttgagacagagtctcactctgtcacccaggctggagtgcagtggcatgatcttggctcactgcaacctccgcctcccaggtccaatcgattctcgtgcctcagcctcctgagtagctaggattacaggcgcgtgccactacacccaggtaattttttttcttgtatttttagtagagatggggttttgccatgttggccaggctgttctcaaactcctggcctcaagtgatccatctgcctcaacttcccaaagtgctgggattacgagtgtgagccaccacacttgacaaaaatgccagttttctgattgtatgtttacttttt

SEQ ID NO: 43055 - DNA, 751 bp, Homo sapiens
gaggaagcatcattatagttacttattgacttcttgctgtgcaatattttaaataatgctttaataatgttttagtcaaaatgaaaatatctttaagagagctcaagcacacactgaattgctaaaaagttatatgacaaaagaaagagtgctgtaatgacatttttatgagtcaatctttattgaatgtcaataaaattctgcactattctagttgaataggaagagactagttcataagaagcccattaccctaagctaggtgttaataatctctttgtctgtgttaatattacaatatgctgcataatgccaggcttggaatacaaaagttcagggttatgtaagtgttctggcatgcacaactctttgagcaagacacttggaattctagcttgtccagcagtttaactaggctgcgcaaacaataggggcaagaatgtagcaaaatgcccctatttcaactattcttaatatagctgtcttttgatggctttctcacaaattgttcagtcctgagagtcccatatttttttcctatcaatagtttaccatctttacacttagcaaggaaacttgctaactgtcttaagaggtggtgacattcattatttttcaatttatctgaagaaaactacccttttctctcactagcttttatatcaaatttagtccttaagccggtatatatagtgtataggtatttttgggacactaaatagtcaataaaatgcaagaaaaagcatttagc

SEQ ID NO: 43056 - DNA, 590 bp, Homo sapiens
ggtgttttctgctgctgccatctccaaattgaagtgtttgtcagtatttagtaggaaaacttcaggagtaatggtgattttatatgagtagccaaacagaaaatcttatctccttttatcatacccctgaaggagtttaaaggttagcaaatcttttttcttggcaaaacgccaggttcagctgataacagtgcctgcagagccacctgatatgcctgtgtttctccagattcccgtgtgagcaaatttcaggtccctgatagcattttctttatctaaatttgaggggtcagtggaactaattaacactgtcacctagaggcaatatggtatgggtgagattactgaaaataaatacgataaaagtttgaacttttattcattattactttacggttattaccaaagcagaagcaattgcactcagcacagtggccagattttaaatgaaacattaaacatttttttaagaagggaatttccttaatttgttaagagacatctataaaaaatatctacagcatatttcttaatagtgaaatatcaaaaacagtccctttaagaatggagcaaaggacgggcgcagtggc

SEQ ID NO: 43057 - DNA, 3466 bp, Homo sapiens
aatctcatctccaatacagagtgatgacatactcaggattccaagacggcaaaatgacttgggtaatgtagtctagggcctgccagtgagtatgctgagacagaccagaaagacttaaagattccactaatgtagacaaagcaagctgagccacaacttctcggaacaccaacaggatgcaccaacaatcgacaaaaaaaaaaaaaaaaaaggagataaagtttaaagtttgtcttccagcattcccttaccctattttccccttcctcttccctactttatcagtgggaaaagttctcaataatgcaattcttactgagattcttgtgtttatcagagaaatgtttcctctttctttgccaaggaattatatattcccaacagacatggcgcttgaatgctatatttcctttggaatcaagaaaggggaggtgggggaatcaaaaattaaaaaccaaacccaagccattgttcctcttcgaggaagggtgggtggtcagtcgtcgcctgagctccgaacatcaacccgcggctctcaagttcccctcccagtaatgctgggcccagcctcgccgcggccgatccagcctctgccctaggtggaagcgggccacccggtcccttcacccactgaggcccagtcctttcgcctcaacacgaaggcacctggccgggccggagcagcagccgcggggccggcactggggccacggaaccccgggccagactcaggcctgggccagctcggctccggcctgcagggggcgctgcggcggcaccggcgcgaggcccgcgcgtgcggggagcgaccccaggtgtaagtcccggggcgtggggcgcgtgggtcaaggcggagcgacccaggatccccgcgcccgcggcggccgccgagtggcagcgctggactcgcggagaagcttgggtacctgagccgcggtcccgggtgacaccctcagtgacgccaggcgcgttccttcctcttcctctctcctctccggccccgccttcccttccctccgcccacctccctgaagcggagccgccgtcgccaccagcgccgtcatgtcggcccccgccgggtcctctcacccggccgccagcgcccggatcccgcccaagttcggcggagcggccgtctcaggagccgcagcgcccgcgggcccgggtgcgggcccggcgccgcaccagcagaacggtgaggcgggcggcccgggcggagcgcggggcctagcaccggctgggcggcctgcacggccacatcggggcggggcgggccgggccgggaagggcgttcggggccaggcccggcccgagggacgggagcgggcgcggtgcggaggccgcggggtccgggttgggtgcgggtagggggcagggaaggcacggcgcggggcgcgcgggggtgggacgcccctggcgtgggggcgggggccggcctgggaaagctggggccgtggctgtttatgtaatgcgaccccaggcccgaaacggcctcgggcgagtaggggcgactgaaaagctgggagcccacgtagtaaaacccagttacctagcctggacgcgggcgagttgccccgagcgaccccttggctgcgagagctggccagaagccgaggccgctgagtgcgtggtccggagaaggctggtgcagccacccagcagggtggattgtgcccttcctgtctcaggaaaattgcttcggttcccgaggcccagcgaacacgctgccttgaggaaacttaagtttgcactcaagtttgtagacaaaagggtgtaaatatgctatataagtgtaactgtaaccctgacccagttcggcctcaagaactgtcattgccgctgcggctgctgctcaagcttttggagtttgcttgtagtgtttgaaagggagcagatgtaaacggatttaaacgaacatctttagatctgggtgtttttcctagctccactttcagagatgaaaaaacgtgccagagttggccctgctttgaggcagggccttcatacaggcagcagccaaatgcagcacgaaagccgctttcatattaaggtcgtgggcttttagtaggctgcaaaatgatggatatgcattccctaatgctgagatttggaatgttcgcggataggggccaagggtggaggaattctccttacagacttcttagtatgtcagatgagaaccttggaaagtaattgactgaatttagaaaaatacctctgtcctgtgttggtacgagaaccaaactgcattagtactctccagatgattgacctgttttatctaatttcctaatgaaaatctgctggactttatgaattagtttaatcaacatctaagttttacaactgatgcttttcaaacatgaagtgtatcgtttgtcctgaggatcagaagttgagtgatactttagccttaatattctttggatcagccttacctatcagtattacatgctgtactctcagtagtcattgtttactataatcgcttttggatataaacctgttctgaacaaatgtaaaaatactatttgtgagcagtgtttgttcttgtaaccttaatataagttcttgtttttgtttgtttttaaaatagctttatgaaggaactagaacacgataatttagtaaaagagcccaagtcttttagaacattgtagactcatgtttaccagtgattcaaggattgtgtctttccttgattttctgaatatgcattatcatcttagtgaacagtttttaaagtggcaaatgtttattacagccttataaattttgtgaacactcaagaatgccaggatatgtactcagccaagtgtaatcaggatgttaaaatctgtaagaacaaatcaatgttttgatgccaaatatagatgatgcttgagttctcttgtttataatcactactttcctttaatgttgcaataatcatttcaacatttattgcatgcttaccagttggggactcaaggttagggtagcagatgagacagagtccctgcctctctcctgacttgccctgtatttggtaatgtttgaattggttctggctagccttgagggactcgacaggttggggtgggagggaaaggttgactctaggcagaggttacagcatgaactaaagtttggaaatatgaaagtgcagggcatgcttggaaagtggaaggagtcaagaggtgcagagggtgctgggtggcatgggaagccaaggcatcgaagccgaaaggagcaggttaaaaggggtcaggttgcagaaaggccttaaatgttatgctaggaaatttgaaagttatggtaaagtgtaagaactagggtcaggtagagtacgaggtctccctgtgttgcccaggctggtctgctgggctcaggtgatcctcacaccttatcctccagaaggatttttgtttttgtggaagggattagtttaagtagagaaacaagattaaatctctttttgttttgt

SEQ ID NO: 43058 - DNA, 1620 bp, Homo sapiens
agacggcgctcagagcacgcagcaccgggaattaacagcgagttttgaaatctagagctcgcaaggtgtgcgtcgcctgctgctgttcattccagagggtcttctgctggagaaggagggggccctcgacctcgggctcccgctctcgggctcccgctctctcgctctcttttttttttttttttttggtcggaggaaagaaaacagccctgcgcccggatgcgtagagagccgacaagtggaaacagggacacaccctcccgtgagcccgcccaagctggagccgcggcgcgctgagcgagcaggcggggcgggagcgcccacagctcggagccaccaggcgctgacgaggagcccggctgagggaggatgcgccgctgacgcctgcgggagccgcgcgcctggggcgggaggatgctccagaggggcctctggccgtggcgcacgcggctgctgccgacccctggcacctggcgcccagcgcgcccgtggccgctgccgcctccgccccaggtaagagcgggtgccgggctgtgggggttcggggtaggctggtgcaaagtttgcgttggacaactttggcgggagcaaaagccgagcggccgagcagtcaactgcgttttgctggctgccgggctccgcgcgccgggcggtcccgacaggtggtggccgggcggccgacgtgggtcacggaggcctgggctgaggtcaagactccgggcccggggaaggtgaagccagagcgctgcggctgggggtgcctcacccgggccgagatagggtgcggggaccaccagacttcggcctgggagcagcagaataacctgggaggcagtttctgggctgcagctctcggtcaggagcaagtttccaaagccgctgcgccgcggggccggttccctcttggtgatcagtgcccgagcccctaaggagcccggaaacgatgaacggggcagtgaccgtcccgggtgtggacggtcgcaggagagtgaaatttccatcctgaaatctgcgagcacctccctttcccagaaggaagaaaaactcgcgttttgttcagacacccgagagacgggtgaatcatgagtgtgctggtgagtaacagttggcctgacaccgttgtattgtggtctgtggagaaccgtggcttggaggagtagagagtggatgtgcaccaaaaaagactagaagaaggggaaagcgctgagtttaaggaggattgcgatggagcctgacaggagcccgggagtgcaaactctgacccagatgaggaaagacagccaaagccttcagggtgtgtgtggttggggagggagctgtttctgagttttcgtttgttcctcccccacactgttaagattactttcagattgttaaaggcttaaaagccaaaaagtaagcagtgtgattctcttgtcactttcacttcctgtttattttgttcttttttttccttcccccccttttcctccagctgtctgagggcttcagtttcaattgatgcagggaatatttaagtgcatttttttttccttttcattgagcttgtgaccaaaggattaagtgcattcagaaaatcaattccaggaatgtttgaaagagaatgaggaaggccatgtt

SEQ ID NO: 43059 - DNA, 1783 bp, Homo sapiens
aagtctcactctgtcgccgaggttggagtgcagtggggcgatctcggctcactgcaacctccacctccagggttcaaacgattctcttgtctcagcctccccagtagcttgcgcccaggcctggctaatttttttgtatttttagtagagacggggtttcaccgtgttagttaggctggtcgagaactcccgacctctggtgatccgcccgcctcggcctcccaaagtgttgggattacaaggcgtgagccaccacggccggccaactgcaggcgtttcgacctttttgtttgtttcactctggccaggcttgaagtttctaaactttaccagtaataagtgacagaacgtacgctcttagcagttgattactttgcagaaaaaagttattgtggttttggctcaaaccgacagacagcagcaggtttcctggatgaagaagagagataccggggtgtgctggccgccaggaactggccgcctccagctgaagcccgggaggacccagggtcttggcccgggcaccccgcgggcctgttatgttttcattatgactcggcggaacaacccctccttttcacttttcgaagtgagcaaacaaaagatccaacccccaacatttcaaacggccaggtgtgggggaacgccaggcccgcgtggggacagccttttaaggtttaaacagccggggcgccccgaaagcgctcatcgccccggaggacaaaggcggcaggggcacgccccggcgccggcgtcgctactcgggaccgccaggaggcggcagccaggtccccgagtgtttcttagactgaagcgcgaaaccgtccccacccgccctgagcgcttcaatccaagagtgcaacttctccaggccgccctgcaaagccgaaggaacccgcggccccactccggtccgcgcgcccggtccactaaccctcgtttcccctccagccggagcaagacgcagacctgctcggtgcccagtcgacgccccctgcctacctgccgggtgccccctgcggagccccgaggccgagctcattgcagccaaacgcgcagccagacaccttgccctcctcttcctgaagccacaggctcccgggcccggccccgccctcggcccttcctcggcggccccgccccctgcccccgagcgtggggccagttggttctgattgcgcgccgcccgggctcccgtggatcgggctggtccttcccagagttaaagctcctcccagtcgctccggagcccgcggggaccaagagcgcgggggcagggagaggtacgcggtcttcgcctccaggcccgctgggactaaccgtgccctggggacatgccagttgccacccggggggacacacagaccgcctagcccgaggcaatttcacatcacttgtgtgagctcggactcatttaatcccagctgccccaaacatttgctattccttactttgctatgcctgtactttctagaggtacaggcatagattgttttataccgcttagcagatactgcctgtatttcaacattggctcgctttgtgtctctgtgtcacattttggtactctcgcaatatttcaaaatttttcattgttattatgtctgctgttgtgatctgtgatcagtaatctttaatattattgcaattgttttggggcaccatgaaccgcgctcataaaggaaggggaaattaatccataagccctgtatgtgtttggactgttccaccgaactttcccttctctctccccctcctggggcctccctattcctggaaacac

SEQ ID NO: 43060 - DNA, 2247 bp, Homo sapiens
agttcacctatacaatcaggttccaacaatgaagtcactggatccccgattattttccgctgccagcataatgagactctaaccttggctaatcttattggaaacatgatctcccaactgctctcttaacattttcaatttccaaacaaaagtccaatatttttctgacctattaaaatatttaagcactcaaaaatgtgctacaaaagaactatctctgcctgaaatactgagttgattagtactcataccgccaccaaacaaattctcaggttcaaagagaaagttcaaaaaatattaaaagagtaaatgaagataactgtattaacgttaaccaacaatgaggaggaggcgggtcactgatatctaaggaaagaagagttatcggaaccctttctcaacactcgagtacaccaaaagtctgtacaaaggtcgcaagttattgtctatgggtttgcagaaaaaaaaccatttaatatcaattatagagaaagttaatacggcatggtttttaaattctcagtttgcttcgcatgttcatccaatttacagaagcaaaaatgagctaaaaccagtctgttccactctattcccatgattcctacgtcagtaagttcttcggcaacttggtgcaattgagggggggaaaaggtaattcagaagcaatgcaaatgggacggggggtacacctctccgttagaatgtgacctctcacattctaacaatagtggtgcgaacttgtacccagcttgctcaatcactagaacggcaagattctagcagtggttaagtttttccacagccgaaggacaccgtcaaggtctgccttgcatctgtcactcacacctccaggatctccgtcaccccaatcccccgaaagcacgagccctcgctgggcccgggtgccccctcaccgtcactgcatttatactggcagagaccgtcctcgcctcccaggaggtccaaggcggcgttcaggtacgtgtctatcttatgaacgccgttccggatggtcttcagggtggctctccagtcggtggtctgggcctgctcctggcacctgacaacagcggccatgaggaggagcaggagggtgagcgcggggcgcgagagcagggccatgcgcgcagcgccgggctctacgggtccccgagccgcggcgcggggcgcgtccccacagagtccccaggacgcgctaggcagcggcgcgggccccggacttggcagcagccagctccatatccacgcctccttcccggctggccctcaggatctcgctgtctttacgtgaaccgcctcgggcaggcagcgccgtcgcggggacgcgcccgctcacctggaccagcgcgcccgctcacctgggccagcaaccgtcccctgtgcgcctgcgccggagcacggcgcgtcagcggcgcacgggaggggcgggacgcgcaggggtggggcggggcgggggcggggttggggggggcggggaaccgggggaggggcgcgcggggcgggaaacgggggcggggcctccatgcccacgtggtctccgcggcaccctcccaagacccttggtcctggttcacaagagaaccttaaaaagtacccaggcctgagccccttttctagggagcctgattacgttgtcccaggtggcagtgggcgtcggtattttttaagaaagctctccgggctgttaaccgtgaagcaagagttgcagagctaaccccggtggcctaacctgaccagtcggggctcagcacagtagccccgagagacaagcttttctgggtgtggacaacatcggagaaaataacccctgtgccccctcgcagagagcgctgcgagaggtccagctgagtttccggcttgaagacgtggttccattggcaatgtgggcagagtccggctgtcagctcgcagagcagggcttttcctccttgcgtcctctcccggtcctccagatctgctgtggccgcggttgggggagcgggatctggaagatgccaacccatgccttggcggtgcctgactctaatcaggacgagctaaatgctagtttagactttccggaaaaagaaaatgggccaacataaaaatcataaaattctcccctggtaaggaagaaacagtagtgtaaacttaaatacagtaaaaagtaaaataaatcttaaggaagtcattgtttttctactcaagggattttgtaacttgatagttacagtgacgtttgtttctctgtacctaccaccctgcccc

SEQ ID NO: 43061 - DNA, 2068 bp, Homo sapiens
atatgtcatttcaatggctatgtaatagttcaattttggatatacaataatttaaccagtgtcttattaataagcatttagttatttccatttattctctattataaacattgcaatgatggcaactattttagaagttacaagaatcttaaagtgtgttttcttaagtagttttctttaaatattttcttctacaagctggcactaagacaagatagttttggattgccaccaaagttggcaatcatcaataagtatccaaaatattttaaacatttttcaccttaatagatgacactctaacttcaataaaatatgtcatttcagtttcgagttcctttgtagcccacaaagccttcattctgatcaaatggattcatttatttggaggggcctagtgcattgctgccttcctatggtagcacttgctgcttttcctggctaaagaagctggaaatcactcctctttctcaccactgatcacatgtaatacagaattaaacgttcagctcaaatcctacttgatctataatctcttcatgacctctcagcatgaagtgatttgtcctctcattgaagtcctttaccacatatttgtatcacttttgacaattaaatatatactgtcttgtaacttgcacttttgtgttttcagatgtttcaaatttgcttattatttcccctttctataactatagagcgtactaagaggctgttgaaggaagagatcagtctcactgtcttcgtagcactgtaccttacacacaggaggagcctggtaaatatttttgatttactacaattacagtaaatcacagccttgtattagtaaaattcttgttcagttcaatgcctctgcatatataagcacataaaaagaactatttttaaaaaatcacttttatcaagatattaacataaaacatttgttgctgactatagagtggcattgttgtaactgaactatgtaatatttaaatcaaaattatatatttaagattattttctatgtttttacaacctttaaattatcaattaaaattgtttgcataaaggttgaattacttaccttgcaaaaccttaagtggaagcacagaaataacaggaaaacatgaagaagcttcatgttggaggtgttcggggtctttgtctctgctgagaactcttttccactccaggtattcttttgaaatttaatttttaacctctgaaaaaatgtttcaaaagaacaaacctcctaaagagctttgtacttttgaactctgaaagaatttggctgaaatccagagagatttaccgtaactgaaaccaaaaaatggccttcccattaaagagctgagggaggtgaccaataggaacttgtttccaccagaagagactgatttcctcccaccctgttaattgcaatgactcaattctgtattccagggaagacagaaattatattggaagcaattttttggttttttttttgtacagtaaaaatataattttttaaacttaaggttgaagactaggagacagtaagaataaaagtagaccatatagtgaaggctgcaaaatacatttaaaactctagaaaccagcttctttaccatgcatttgttgtgctgtgatcaaattgtatttttggagtacaagaaattttaaaaacaagtattcttgtgccagtaccaactatcatgcagggtttatctatttatgaaataaatctgtgatagcagaaatgctgacacagttgggttcatcagaagcagacttgagacagtgagtgtggggcacaagtgtttgttagggatcgatatccatacaaggaagggaggggaagcaggggtgaacagaggtagaagttgaactggagtgagtgtgacctgtcacagtgcccctgatttcagtataaatggctgggccattatattctgccttgcttggtcccctactatatattgcccaggaagggcatacacttaggtgagacagttttctgtagctaaggcagacacagaaggatctgacagttatgtgctatcaggaggaggtatcttctgactacactctttacagccag

SEQ ID NO: 43062 - DNA, 1465 bp, Homo sapiens
ttgcagccagagaagcaaatgcgcaaatgcgcccagccagtcagcacggacttcaagaaccaacttcattccttgcaaggtgctttagttctggccgttagggcggcaaccaaacagaaacctgccccgcctctgggagagaaggcggatccctaacgccagctatctccaagagcaacattgccgcagcacttccgggacgtcgtgctgcaaaggacgccgctgttatacgtcacttccacggctcagcgtcaggcaagttggcctctctgttgtaaattagtggttaaggttatctattattgccacttttccagcgctaaaggctgttttggaaccagtgttgcttgttccgcgggtgattggcttttttttttggcaaaccagttattcaagtttctggtctttaaaaaactctgtggcggtacggtaaccgaggaggttccagcgcggcggaagtaccccgcgggtgggtgtgtgcgcaaggccagggccagaggggcacgtggcgccggtgagtggccgtagaagccggaggatttgaaaatgctggacgtggaacccaactgccggagggagggaggaaggaaggggatgcggtgcgaagaccttgctgtctgtagggggaggagatactaatcatggggcggcaagggtggtgtgtggtcggtcggcgctcacgagaccatggagaagtaaactcttcacccatcaggttggtggtcactggctgtctgaccgtgggtgaggtgacagggctgcttttgtctcctttatggtgttctcaccgcagctccgaggggttggagtatactcagaggctacagtgatcagaagacataggtcgtttttttttcatcagggaggagagagaatgtcttttcgaggcggaggtcgtggaggctttaatcgaggtggtggaggtggcggcttcaaccgaggtggcagcagcaaccacttccgaggtggaggcggcggtggaggcggcggcaatttcagaggcggcggcaggggaggatttggacgagggggtggccgcggaggctttaacaaaggccaagaccaaggacctccagaacgtgtagtctgtatgcagtcttcagtatttagcttatttgaaggagtaggtgtgggttgggggtttgtgttgttaggcagcaagtttgggatacacaagcctgtgtggagaatgtagcatgtaagggtggagtggggagatcaagaaagctgagggatacttagaatgcatcttggaggtggaacttgagggttgacaggaagatattaaataggtaatcgtgagtacttatgcctaattccccgattttacagatgagaaaactatgatttagagttaagtttttttgctggggtcataaggttagtgataagtgatcaattagtgatatagctgaaatacaggctgggtgcggtggctcacgcctgtaatcccaacactttggga

SEQ ID NO: 43063 - DNA, 448 bp, Homo sapiens
ggttgctttttaggcataatttgtttgcaatgtccctttttggtgaccgtatcttctattcaacatggaaaatgaagacaatttggatagccaacaaacacactggaaaggacatggttagaattaacctccattcatcatttgtaccacttggtgaactgaaagtagtgcatccacttgcacaacccaaggcagaagatgacacttgggagcctggtgagtcatcgttgaccttgcgcagggcctgacacatagttcccacccattcacctgcttgagccagacaatgaggcgttgtaggggaaaaaaaatttttttcttcaaccctcatatattcttagtcataatagacccctgtaagaaaagacagattaacaagaaaaaaacaaatagaaggccaggcatggtggctcacacttgtaatctccacattttggaaggctgaggt

SEQ ID NO: 43064 - DNA, 747 bp, Homo sapiens
gtataagctatgtgaatagctgggctgtattgaaatgccatggacctgatttgcactggagttctatcttatatgaggttaccacgttcactcaaaactctagtcacagggcagcccgtgttcttgcactttgagcaagaacacaatggatgactccttgatttgaattgagttttggggtcattcttaaggtccaggatctatactggtagctgtaggtatagtcccagttaagttgtaaatggctccaagaaaacatgttccatgttcagcccatctagtgggaagtgtttctgtaaatttaagttgatctgaggattgtcctggggatttcagagtattcaggtcttatcaggggcatgaccttagccagacgcctggctgtctgtgaagtccagccaagccacttgtggagagaccataaaatcaacccaggttctcaggaactcagtctacttcagatagaaatgaactcagatacccttaagagttgtattatgatcagccttttggttttgggtctcaggttgagttttgtttcacaggccagaggacattgtttcacaggcctttgtgtcgtgagcctttggaaaggtttagagaaacttttagccaacaaaaacagctcctctgctaatgaaaggagctaatgaaatatcaactccaattgaattttctatatttttccttcttcaatgtgcttattatcataacctcctcctcagatttctttctggaaagaacata

SEQ ID NO: 43065 - DNA, 1906 bp, Homo sapiens
atgctttcatgagtctcttagcattaactaaaatataaacccctatacaattccaaacacattataataaatttgtcaaagtaatatgcatttcatcctaactctttagtttaaccctatcatcacttttatattaaaattttattgtctaaagaatgattaagaaaaaccatattagaatgggctagtgtgggatggaaagtggaaggtacaattctggagttaagaatggctttgtgtttctcctgtctggaggtgagggtatatctcaggtttaactgagatacactgggtgtttctagttactttagggaggggagtggagtggagggtaggaggaggggaaaacatgtcccgaaatctcaagaacaaaattaatttaaatttgcttaggagttttttccagaacacatatgcacgatggtgggtgcgggaatgaaattgatcatctcccagcaatggctctggagctgatcagtagcaccattcaacaccctatcagggttactatcccccagactgctgacccaaagagtggtagtttccctcaggcagggggaaactggtggggctctagaagagctaaccaagtcctctcacggtcttggatatggcagctgagatgcatcagtcaggccactctggcaggtacaaattatttttcctctggggaaaccacataatgtcacatttaatttgtcatgagccagagtcatgccaagtcatggtaatttcaggctttccagaagctatagagtgacccagaaatgttaactatcagagggactgtgtatttgagttggtcagtcaatctttcttgttcaaatgtcctgttggcataacgggaaggacattggccaagtacaagcaatgggactttagactctcgaacgtttcagtcctgtcattttagctacctcctggctcatgttctctgtatcatgatttctctaacctttggtccaactattttcattcaagagacagctttcaggcagggcatgttgttccttatacccaagtgtcccttcttaactacacctttgcagctgcaggaaaagcaacaagcatttggaaatccccagggtgttcttggccaccaagagacacagagaggctactctgtgtgtgtggtttgtcacatacagctgagtccctcttcccagagctagctagagtgctgctgagtcagagcttcaaaaacaatgacatgctcaactgagcaaggacctgggctcagagcagatatttccaagttttaacaaaacaaaatctcagcgggttttaatataatccaaatagtaggtgctcagagatttggcacacaaagcaggttagtggctcttttcctctcacttgttctagtggcctacaaccccataattcactgaaatgagctcacggttttctgctgaaacagaaaggtcttcttgctatttattaagagtttagtgaagggggagttagtgtggaatgagtagcatttcagttggagaagatgcaaaagttctggaagttgatggagtaatggttgctcaacaatctgaataatatgtatattttactgcaatttaaaacaagagtttgagtttgtgggagctggggggggggatacagtttcagtactatacatggaagaactgtttttttctcactagatcttttccttttggtgctcataaagagtccagaatcttagaatattgaaaggtaaaatttgagacctaaaaataagaaaagttctaaataatccaaacgggtaaatctctcttaattaaatagtagcgacaagattttccaactgcaaaaactggaaagaaatttaacctccaaaatgcatgggaaaaaaaagtcatccaggcaaacatgttgactacataaagacctagatctgcttgtcttggag

SEQ ID NO: 43066 - DNA, 1671 bp, Homo sapiens
cacctgtaatcttagctacttgggaggctgaggcagaattgcttgaaaccagaaggcagaggttgcaatgagctgagatttttgagactccatctcaaaaggcaaaagaataaaagaatggttattccataggcagccctgaggactgctggctggctacttttatgggttttttaattacatgctaaacgaggggtagattattcatgagtgctccggggaaaggggcggggatttccccaggaacagaactgagggttccttccctttttagactgtatactgtaccatggcatttgtgaactgtcatggtgttggtgggagtgtcttttagcatgctaatgcattataattagcatataataagcagtgaggatgatcagaggtcacttgtgttaccatcttggtttgggtgggttttggccagcttcttaactatatcctgttttatcagcagggtctttgtgacccgtatcttgtgccaacctcctatgtcatcctgtgactaagaattccttacctcctgggaatgcagcccagtaggtctcagcctcattttacttagcccctattcaagataaagtcactctggtacaaatgcctctgacaacagtactgataatgccaaaagataaattcaaaagcaaaaatccacaaacttctataatagaactatgattcgactgaaagcaacagaaaccttataaataatttaaaacagttgagcatgtttcctgagaaagcaatgtttctcttaaaatgggtcttccctattcaattagatcaataaggaaagggttgagaaataagttacaaaacataatatcaaaagcaaaatgtgttcacctaaagagtattatttgtaaaatgcttcgtgttttctccctttatgctgacatgtaatgctgactcataagggaccttgctatttacacaagcagctttcctatgtaaatgaatgcaagtgacctacttagtgaataccaccaaataaagcaatgattccagaaatcaacccataagtaaatgttgaataaatcactttcactgaggtttacagactcttctcttgggcccacaagacctggaacacagtaggtgcttaataaatatctgttgaatgaacgtggtcttgtcctatcaaattttctgatggggaaaataatcaggcatctgtgtacagtaaacaggcagcaaacactaacagaaagttgtactttccccgtaatacattaataactaaagagtcaaatattcagaaaaatattatgatacattttcttcccccagaaagacattgattatttctatacttcagtgaaacaattttgtggaaactttaactattggacatttcaggaagaaagtacttttggccataaattatatattgctttatttctcctctggaaattacaagggcatggaattaaattacttaagagtcacaatcactgtttctgtttatgcacatataagcaaagactaaagaaaaataaagttctaccaagttaatgtaggtgatagtaatctgaaaaagtatatactttttttctaatttataaaggtaataagtgacaataatcacattatgatttatagagtgattcctatgggtagacataatgccaaaaagctttaccatttaatcctcatggtgcaggtaaagta

SEQ ID NO: 43067 - DNA, 2186 bp, Homo sapiens
gaaacactggtctagacagttctagatgctggtgacacaaacctcaaattgctcatcatctagtgagatagacaagtaaacaaaaatctataatgcactctaaatattcagaatggtatgaagaggataggggaaaaaaataaagagaaggacagaaattctcttgctgaaatggccagtttttaaggcatgccagaatggccagaaaagaatgggggaagaggtgcttctgcaggaggaaagctggacacaaccactcagtggggtggggtgcaggttgaaggacctggactcctgggctacaggagtcagaaatgagggtggagaattaagataagcttgtatcttgaatgacttttatgctcgaatggggctagtttgaactttatcctgaaaatacaggaagccatgaagggttttaagtaagggaggaggagcgtgctgagattaaatttgtagaaagcccgcttggcagtggcaatgtgaagggcagatgggaggggtatgagtaacctgatagagacagtggccaggtaactgcagttttcctcaagagaagatgcttaaggtggtagaagcagagagatggatggctctgaaagatggtaacccaaaatacagtaattattccatatatttattgaaataaattcaacagaagagatagaacagagaggtcttggcagctgatttaatatggggagagaggcaaaagagagggtaagggatgatttgtgggtggtcagtgttagtttgatggggagtcaagaagaagtggccttttagaggctaggtgcgttggctcatgcctgtaaacccagcactttgggaggccgaggtagacagatcacttgaggtcaggagttcaagaccagcctggccaacatggtgaaacccccaaaaatacaaaaattcaaaaaatacaaaaaaaaattagctgagtgtggtcgtgtgtggctgtaatcccagctacttgggaggctgaggcaggaagatcacttgaacccaggatgtggaggttgcagtgagctgagatcaaaccactgcactccagcctaggcagtacagcaagactgtctttaaaaaaaaaaagaagtggcattttagtgtttactagtagagatagttaatagcaatataggacttactcccagagatggaaagaaatctacagggtgtgggacatagaaatatcagggctaaagatatctatttggaagtcatccatgtctgggtggtggtggttgaagtcatggacacgaatgagatcatccaaggggaatatcgaaggtcaatacagaacctaatgggaagggcggggagcatcatcacttacagagaaggtggaagagaagcaaagaagattaagaagacacattcaagaggaaagaagaaaattaaggagtgtcatgggtcaggggtagagaaaagagaggaagttaagtgtcacagagcaaatcaagtcagataaggactgataagaagagtgttctattgtaacccacagacacaatcagggcctaatgagtctgtgaatggatcattcatttctccaacaaatatttactgaagttcctgcatgccaggtgttaggcaaataaacctcaaacctcaaggacagcctcatcctactgtgaaagcatagcgaaagcatgttgcatttccttacaaatgttacactgtgtattaataaaagctgtgaactatggcttacttaacactgacactgcacttgggcaaatgggaagaggtaaggtgacaggctttgggaagatgaggcttgcggaggcggggttgtcacaggtgtcaagggagcctgagaggacagggaaaaagggaagaaaaggcatgcaccttctcatcttgcttaacccttcatttaagtcccaagtctgtttggagagcaaagtcctaggctaaaaggaagtcattatttcccaatataatctctctgggtgtccaaagaagaaaattaagatatgaaagaaaaagttaaattcaccaaattaaactagagtatttctaagacctgactaacatttatagaaacaactcacctcatagttacttaggcaggcactgattaaatgtctattacttaaagcttctctaaaaatgtaacatctaaacatccaaaatgacaattaccagaagcctgtttacatacgtttagaaaagtagaataa

SEQ ID NO: 43068 - DNA, 1793 bp, Homo sapiens
ctcccaagtagctgggactacaggcgcatgccactatgcccggctaatttctgtatttttagtagagatggggtttcgccacgttggccaggctagtcttcaactcctgacctcaggtgatccgcctgccttggcctcccaaagtgctgggattacaggcatgagccaccgtgcctggccaagatattggattactaagttaaacaaatagtcatgactcacaaaatctgaatctcagctcttactttgcatagttgctttgctttttatcaattttaatcacttctagacttacattgtgatttgcatagatttttctctcttttacctgtaaaactgagacaataattatatacctgacagcatgaagatagtgtcatgctggaatattagatactttatttaaataaagattttcctttatgcatttagtcaatacacttttatggagtgccttccatgtgcccagataccagggcaaacccaggggaacaagacagacaaaaatctgtcatgggatttatagtacaagagaactattagttaacaatatatgagaggacaatgataataacttgatgacaaaagttactttgcttaatcatgtaaagtagaaaaagaagttatctttcaattaaatttgtatggttttaattttttactatagaaataaagtacacagtttttcttttttttttaaaagtcaagtaacacagggagttgtaaaataaaagccaagtctccttctctttcctaatgaactctcttccacttcagatttttatgcatattcacgtatcaataaatgcatatactttctaaaaatcatattttaaaaactatcgtgcatcttggtgtttttcactttacaatgatgtatctttgagatctttgcacattaacacatgagacgttggtgtttctaacagttacagagaatgcaaagtcaccctgcaaaaggattccaaaatgtacaaaaattcacactttcaacagcacatttctctctaacactcagatgactgctcaaaaattttaacctctcacaatctaaaagatgaaagtgtatctcattgctattttattttttccgttatgagtatatttaggcattttttcacatgtctactgaaagaaatggctaaaaaaaatttcctttcctgtgaactttctattcatgtcgttattattgagctatatttttcttatggattggtacgacctcttttaacattaggaaaagtggcacctaaagaaaaacacttaaacatcaaagttttctaaaaaacaacacatgagggtttgcttacaacttacacacacacacacacaaacacacacacacacacacaaacactattggatgtctttttaacagtgtatcttggagatctttccatgacagtgttgctcctgacaccctgtctcccttgacaaagaagctccttacaggtagagcattttcactggccctctccttggccttgaatttcaaaactggcatagatcactctcactattttatagcctttgctcaatattgttttcctgaacatccctgcaaaattatatcttccttccactggcccacccacccctgacttcctgtgttgctttactcattagcaggaatcgctatcagacatgctatgtatatacaaactataataatatattacttattggtctatggtctatctcttgttactgaaatgaagtcagggattaaaaacagtatcagtaaataatttgcataggcgtgctagtttacaagcttccatcaacaccagtct

SEQ ID NO: 43069 - DNA, 4109 bp, Homo sapiens
cccacctcagccttctgagttgttgagactacaggcacatgccactatgcctaattttttttctattttttggatacagggttttgctatgttgcccaagctagtctccaactcctaggctcatgcaatcccacccacctcagcctcccaaagtgctgggattacaggtgtgaacaactgtgccaggcctgaatatatagatattttggatgactgttttccccagaaaattaaagttgccattttcctcctgcctccctacaggaggttaatgaatgtgctgaagtacgccaaattttaaggtacacaaatgtgatatgcaacataataaattccactgtttactgagcttctactacatactagttaatagacattatttaattagattttcacaactctgcaaagcagttattgggacactcattgatgaagagaaaactgagtcttcaggagtgaacaatttacttgaggtcacccagatagtcagtggtgcagctggggtttgaactaaatggtctgtgtccaagactatgtaggggaaaatcagtccctgtgaatgaagaaagacccaatcatttagataaaaatagtacagaatcacactgagaatatatgaactccaaactacaattcaaatgtgcaatcaatatctgaggtattcagacacaaaacagaaagcagaagcctacttgggtgcgaagccatacacagttcacctgagggggctttgtatttgttgtgtcctatctggatctctcttctcctagatgggcccagggctaacatggtcttctcatttgctactaggtcagatgccaatcctttagtaaggctttccctgaccccctagctaaaacagctccctctggccccaagtcacctcctatcacactattttctttatagcagttagcaacatctaatgttattttgtctatatacttgtttacatgtttagtgtttgtgtcctagtggtatgaacggtctctgagaacagcggccttgtgcctggaacagagtctggcaaatacaggctcctcaataaatattcatcaaactgagtcactgaaatttaacagttatggactgaccgcatagtgtagcagactgggatgaaggccaagtcttatcatcaatgagtataaaatgctagaagggtgatatacaagtcacaactgactttaatatgagaaaatctaccactgccaaatgaaaagcaaaaatggaagagtttaagattaaaagttcaaaaccttaaaaggttgtatgaaggtggcagcactgagttgggctttctaagtttcagaaatagagaaagaagagagatattccagtggtttaatttgccagggtcataagatacttatagagcaatgggagaactaactgtaagatcgaatggtgagttaaggtcaaggaatcttccttatcaggtgggtaaatctgagtcatagtgacaggcaatttgggagcaatgaaaagttcttagccctggttgtgacatgacatttctgaatgtgtaatgagaagttcaaaaatgttggctaggaattcattactcagttgaaagcaaaataatactaaaatatctgctgagagtcatgccagtaaaagctacttttcatggagagcctagaaagtgctggacattttgtaagccattgacacaccttaactagtttaattattactacagcctaatttgattatctcaatttcacacttagaaatgggggcctagggaggttaatgaatgtgctcaagttcaccaagtcattaagtagcaaaggcagaattgaaactgtgtctgaatccacaggtcccagagtttgatacactgctgccctgatgacaagttaaggtgagggaagatgaagccaaggccaccctaggaaaggaaaaagtaaaacggtttgtatagcatgagtattctgagctaggcactaaggaaacactttgacctaactcagctttcataagtctgccacaagatgccatgaacatttgtcacaagaaagcaagcacagccgggtgaggtggctcatgcctgtaatcccagcactttgggaagccaaggcagaaacaagctgaggcaacgtggcgaaagcccatctctacaaaaaatagaaaaattagcccggtgtggtggcatgcacctgtagtcccagctactcaggaggatgaggtgggaggaccgcttgagcccagggaggtcaaggctacaatgagccatgatcacgccactgcactccagcctgggtgaaagtgggaccctgtctcaaaaaaaaaaaaaaaaagaaaaaaaaaaaaacactcaggttggaaggcaggtgggttggtaggctgctcatttatttctgatgaaagaatttcttgttttggggaatttcttttttttgagacagagtctcactctgttgcccaggttggagtgcagtagcacaatcacagctcactacaacctctgccccccaggctcaagcaatcctcccacctcaacctctcgaggagctgggactacacgtgcaccccaccacacccaactaagaaaggatttcctgaatgtaatgtggtatgtggcctttctgtgcatttagtctttatcatgccacccaaattgtggtaaacatataagcttgtagagcaggtttgatctctattcttcaaaaagaggactggtttctgactagctggactagcaaaacagaccatttgctagatatctacaaactataagcaaccctctccattatcctctcacagaaaacaataccagggcacctgtttagtggaaccatgtgctattgccattcataggccaaaatagttaagtatcgacaatttacaggaggcccttccaccattatgttcctgattttgtggttccttcctgtctagcagacctactccaactccttagcctggcttccaagcttccaatcgaccctcacaacccaactttattcctcaaaccccacataaaccttagtcaggccaggctgattctcctctcagctactgctgctcatcaaatcctccattttaatagcactgcaagaaacaggagggatgagctcaggttgtctagctcagagacacagcagcctgcacttcagctttgttctctgtagcacatgtggctgtggtaggcaggaagtagcatggtctcaggagctgggcggttctaatctcatctgaatcacacacagagatgagttaatcacttctttgagagtcagcttcctcaactataaaataacaattatgatgcattcctgtcagaactaacaggaggatttttgtaataaagtatgtggagctggccaggtaacacctgccttgcaaaaccaaacatttacccatgcattggagtgaacccaaggctaattccccaaggacaatcctatatcctctgccagaagagtttagcacatctgggaagtgggaaaagagggtggtcttttccacgtaagaaaaccagttaggcttctctacatccctaacaaattatcaacccacgatcctgctttcaatacatctgcctcctctgtcagtgacagagcctcagcactcctgggacagcttatcaacaaaagcccagctcagagctgatctggaggaaagatactgtcagccttcccctgggtactataaatcccagcctgctatcaagtgagatcctagagaagttgctcaaggcacattcatttcgcccctggactgcagtgttctttgacattatatccctgattttccttcaaatgttgttgtctttgggctaggaccttggtttgttcttaacttacttgagcaataatgagacatcacctttcttttcagataacaagaattctcttaaattcttgtgtttcagccaggcgcggtggctcacgcctgtaatcccagcactttgggaggccaaggcaggtggatcacgaggtcaagagatcgagaccatcccggccaacaaccgtgaaaccccatctctactaaaaatataaaaattacctgggtgtggtggtacgcgccctgtagtcccagctactagaagggctaaggcaggagaatcgcttgaacccgggaggaggggttgtaaatgagccgag

SEQ ID NO: 43070 - DNA, 1372 bp, Homo sapiens
gattgtgccactgcactccagcctgggcaacagagtgagaccctgtctcaaaaataaaacaaaataaaataaaatgtttcactccatttttacctttggtaaaaacaaatttgtgaataaaaaggcttcctcagctgaacagcatttaattcttaaaattcctatactatcttatagactctataatacagaatacaaaatgttaaaacaagtaaacccttttacaccaccaagggagtgagtggggagaaaagtcagaaaaatatataaagctttgaaaggctggatgtgtggagaatgccaggagagggggagggtttcatgaagttctaggcaagccctttgaagacgtcacctcacatacataatgttacagcagtcagcacaggcctcctgctttcctattggtgggcaccgtgtcagccgacatcagaagataatcatcattggctagacaattacaactggagcaactagcatccactgctgttagcacaaacctggcaggctgctgaaagagaaggcagagagagcccagcttcccttctcactcaatgaattatatgtcgccttagcaatcaccaggtgattttgctccctggctagcagcacttccaacttaagtcagctcttagtgagaaaaacaggtaaaggccagacatctcataaaagagcaaaatgtctctattttcaatgttgtaaaattgcaaggacttttcagtgaaaattagaattcaaaactcctatttggacctatgagcagacatttttctctacctcatgtaataaactctcattgaccagataatataaccagacaggatatttttcactggacatgtagtttcaagatgaggcccaggatgattctacaagggaatacacttattactttgcatttcaattgctattctaacctattatatatgaaactttttgctagcaaagtaaaaaaagtctgcagtatttactttcatggctaggccaatgagtatgaggttaatgattcattaaagcagcaataaacttgaaaactagcctcagttgaaccctttagggtttatacaaatgctactccaaaagtcgggccccattccattaacacgtgctatggttagtaagtatggattatagggtatgttaacattaatttgcgctatggttagtaagtatggattatagcgtatgtttaataaagtattcttattttaggtcctcttaaatgatgctagttagcaaaggcagcatactggcaaaatactactcctggccattctcacagttcttcaaaagccaatgtagttcacttttgagagaggatgttttaattctctaaattaacaagttttgcctgttactaagaagagattta

SEQ ID NO: 43071 - DNA, 4590 bp, Homo sapiens
acaggcaggagccaccacacccggctaataaaattaaattttaaaaagtgtttaaagtctttttggctgtacagtttttggggagggaggagagataaaattgggcaccctgggatattgggagaaatgcacaaaatctggcatttaaaaaaaaacatgaaagtaagacaattagggtcaggaagagttgcaagggaggggtaacagccagcagggttctttgactgcaataagcaatctaagaacataacatcaacagagagcagaagccaggaagggaaaaatcccaagatgtgactctgccacggtatgcaagttctagcctgttaaccttcgggtattaacgagtagtgctggcaataaaatgggcaccaatcaccatttcaactcactggacattttctcaagaatgtgccttatgcaaagcactctgctaggtgctttgcagaatcaagagtgggatgacaagaaccgtaacctgaagagctgatggtctgtaagttaataaccatgtatataacagtaaaggatattgccagaagaaaggtacagataaagaactaggaggaaacagtggtcagaacctaacaggagtagatacgttggcacatttttgtcattttcagtcccacgagggctgagacctgtctggctcagtactgagtgaatggagagaagaggcgggaaatggtacctgaagcaggcctaggaagtggcctcagagaaaaagcaacaagtaaataagaggcagtatcgactgcagtgggctaggaatggcgggcgtacagtgaatggggtcagccagcaaagcgagggaaagcggactccggaagagcaggttaaaccaggacgcagcaagtcagagattcggcacagaagcaaatgctgaccacactgaccacacaggctaatgcgggaggactgtgggcccgaacaggccggctggaggatatgacaaacatgtgcggagaagacccgggcccggggctagccagcagcgcggttccggcgcccgccggctccggccaccgccccctccccgcctccagcaccaccccctaagcgggaggaggaagtgcatccagagaaggaccccgggcggtggggctcgaggggcctcggctgccccgaaacgccgaggtctatctgcggtctcgacccttagtgtccaacctccttccggacccacccctgcaccccctggcctcagcggcccgggagggcaccagccctgtgcctgtgtggctgctgcacttccagtccttccgagcggcccgcgtccccgcctcttaggctccggctcgggccagacgcggcccttgggcccctagcccaccgccgccaccagccacgccgcagctcaccccaagcaggcctgccccgccggtgcgcgcggcccaggaggcgggctccgcccggcagccgccgcaaatggccattggggcccggaccagcccgcgggaagctgggagtgggcgcgctccggccgggcgggaggagaaggaagcggcggccgggcctcccgacactggccggcgactccagggggctggaggacaggaagttgaaacccccttttcgcagctgcggccccgtggcaccagctcctactgcaccaacccgcccaggccacaggcgcgccggcgtttctggtttccagttgaagagggcaggcgggagggcgcggggcacgcgcgctcgcgcacgcggcgggcggaatcccccggctcccgggagaccctgcggcccgaccctccccggtcaagccatcccccgggctgccggccccttgcctagctccggggtgcgttgggcttgaactttacagatcgccagacccgaagttaaggggaggagaggaatgcctctgccacaaccctgtctacaagaagcgagatgagcacaccctcctctgttaaatattgcaaggtgacactggatcgcctcccacacagggattttcaaaaggtctggcggggggactacagtaaacaagaaaggtgttttccctgattattagtttcctagggaagagcccctaaggactctgcagacggaggggcttttaatctgtgtgcctgaactccaatcagcagctacgcacagaattagaagtgtgtccaaaaggcgtttccgtaaaacagaaacttaataatggcgtggctccactcgctcgggttcattcatttattactgttttcattgtcccctcctccctcccacccggtctctctatgaaaccggaaagggaaccgcgtggggaaaggggtactaaaaagggggcatccgcctgaggagcggcagacagaggaggacggtgaagtaggagcgctgcaaggagaaaggaaggacacgagggatggagagacagcgaggaccagggccaagggcggcgggcgggagagggttaaaggcaacaggagacaaggtcctccctccactgcctttcacactccggttgcgggagaggccaagcgagaaaacccaaatctagatgaaaaccgggggaggggaggggagcacaggtaggcgatctggactgtggcatctctcccgccttccctgtcgcgcagacatcaccctgtgcacacacatatgttctgtgttatataatctatataaaagatgcctatgtagccgcggttcacacaggggcacccacagacctcgcgcttcatgtacccccccccccccagcgtctcctgcacccgggagacccgagaactcagcgatcagctggctgcccgcgattcatcgctccattcacgcccaggcagggaataccgacattaaggcactccgggaagacgcgcagggctcccgggaacagtatcaggcgaaagcatcacgtaccagttttcctgcatccattggatggcttcattctcgttgaactgcttttcgaattcatattcttgtaaagtcaacactgacatgttcattggggctgatcttcggagtcgctacgtgttctctatacaaaataaaataatctgtaaagcgcttgatttcgagtgttctcctgtctgcttcccccacccacccccctaggtcttccccacgccgctcggtctccagcggtcgtctcttctcccagcctctcagctacatccagggctgagcattgcctgcgcctccgctcccagctcctctctctggggctctcctcctcccggcgtccgcatccaccgtaggaggaaatgaatgccttgcggtcttagtgcccgcacgtttgtccatcaccctttttactcgtctacagggaaatctcctccccctcgtgcgatttgagaaattaacccttggcgagggagtgtgcgaaagagcgcgacctctctccgcccgggggggacagttttgtttacagcgaaggtggttggaagagtgggggaagggcgcagagagaaaggaagtggcctggaggtcatccagatcccctaagcccaacctcgtgggccgccttgctttgaatgaagtttcagcttgcagggcgcatccccgcggcgcgtggacccgagagcttggcgagtaaacgattgggaaatagtaaaacctgccagctctcttgcaagagaactccgggcaaatctacgttgagatcaccagtgaagggaatacgcttcccacctcctcgccctacctctgggaccacccccacccctacccccacccccacccgggagctctggcttagattcacgctaacccaggccctgcggacggcagagctccttaatctcgtacagacaggggatgctgagtgtgaggatagtggataggcgagagaggctagtagccggaagtggaagaaagggctgggttaggtggagggtttaggtaccgggaagggggggattaatgaacagaggcagagtggggaaggaagctgacaggagaactggaccgactggccaaatgcaaaaactttatttgcatgcatgagaaatttggctttacttgctgtacttgtaggtagaacagaatatgtgaggagagggctgaatgtactgttgacccctactgggccctcagcctccaagaggaaaaactattttctattccatccatccctccactcatttcccccaagagtttggaaaaatgaaatatgagacatggaagtatctaatgatgtaattgtaaactttacaaaataataaggagccctgcttttaaaaattaggtggatattaggaccagaaagaaaattccccttctgagaacatccccccacctccccagtagtccaaaaagggtactttcattcaatttagatgcctctaacccacaaaaagtgggaactgggagaaaaatttttaaaggaggaagggaccggccgcggtggtggctcacagaagtaatcccagcactttgggaggccgaggtgggcggatcacctgaggtcaggagttcaaaacagcctggccaacatggtgaaactccgtctctactaaaaatataaaaatcaggcaggcgtggtggcgggcacctgtaacctcagctactcaggaggctgaggcaggagaatcgcttgaacccgtgaggtagaggttgcagtgagccaaaattctgccactgcactccagcctg

SEQ ID NO: 43072 - DNA, 692 bp, Homo sapiens
ctctaaagcacttaagttttattttttcattttttattttatttttagttttcttctgctcacacatcccaactgcctgacctacgttttaaaatcccaattcaagaataaactcctttaaagtttgttatctgctgacacatccttcttcccagtcaaggaacacagaacaatccatctgtctgagtggtggtggtggtttgtgggtgaggaggcaaagggcaggctggagaagaagataccaccatcccgcccatgcatggggtatgcgggtatggcagtgccttaagatttaaaaatatttaatacatatattttttcttgtgcttttttctttttttaagtcttaactgatgcctttaaaggagtatttcctctatttaaataatgtaagaacccttgtaaaatgaagatcattcggcatatccctggggatgaatcagattcattgaactgcgattgtgcaactgtgctttcaggcagagagtgctcaaagggtagaacggctcttttggaattctcagatatatttggccaggtttacctagaggagaacacgttgtttttaatgaaagggatttaaagtcacagtgcaccttaaggtgatgactttctgaatggatgctctttcatgagacccaagttgcgagggtgagtgcaggattgtttcctcttggaggaaccctgataat

SEQ ID NO: 43073 - DNA, 1048 bp, Homo sapiens
ggagccctgtgtgaactttagtatatgtcagtagtctcttgggaaaggatgttccaccttatgattaggaagagaagactcaggttaggtttaggggatcagaaattgtgggtgggaagagagaatgatctgtctctgagatcatggctcactgctctggtaattcagaaggagcgagctgcaaacaaaggccatctaaggctaagagagaattacaaatcagttgtattgccagagaggtggtctctgctatgctatccgtttatacttgggattagtgagaactcccaacttcttgcagttatctgatgaaacaaatgacacttgctatagtacaaagtcattttctcatgagtatcatgtacagcttctacggaaaccacgcagttttgcaatggtaggaaagtaaatgtttatttgggcttggcatagaactagataccaaattttctgtttctcaagagtgtttttctttgaaagaactctccccgtctttcctttttttcccctttttttagagtcctttggcctctgatcccacaaaggcatcagtctccacttcaataacttctatcctataatttaagaaagctgacattatttggaattctgaaatcaatacctgcccagtcagcattgccccttatagagataactgtctgtatgattcacacagtagagaacgcataagctttaaatcaaccatcctgcacttgttcagcaattctatatccttgcactagtatttaattagtttataggagcaaatctatcatgtatgtatgttaactataattaggtatagcatgaagaaaagtgttgttcttaataaatctctttgcattgcattgtattgtgaaacattgatttttcagaagaaaattatcttccaggaagagaaaaagggtgacaaaactctagatctccagtttccaaattccactacttctctgcaccacagtagtttggctatgactattactttagatcttcaggttaagctttccaggagtgttttttttgcttgtttttagtagttagaatatga

SEQ ID NO: 43074 - DNA, 744 bp, Homo sapiens
tttacaaatcaaagcaaactgttgctttaaaaacaaattatctttctctatggagcctaatatggcaaacagacaatctggagcaacctagaccccacagggctccaatgcctatgattgtgtctgatgctggcttaggtaccgtactagtcagagttctctagagaaacagaaccaatggaggatctgtttctatgtgtatgtgtgtacgtatgtatatctagatctagctctctagaattatctatctatatagactatctattgaaagagatttattttaagaaattggctcacaaaattatggaagttggtgagtccaaaatctgtggagtaggctggcagccaaatgaccgagggaagagcaaatattgcagttcagttccaaaggctgtctgctggcagaattcactcttgtctggggaaggtcactctttgttctgtgaaggcatgcaactggttagatgaggcccacctgcattatagagggcaatctgctttactcaaagtctgtcaatttaaatgttgatctcatccaaaaaaatgccctcacagaaaatccaagataatgtttgaccaaatatctgggcactgtggcccagtcaagttgacacacaaaattacccatctcaggtagcatattttccataaagataataatgacaaatactatatagtacttattaacatgataggcactgttttaaacacttcacatgttaactgatttatttatttatttat

SEQ ID NO: 43075 - DNA, 555 bp, Homo sapiens
ttgacttttagagggattttaaatttatctaaactaatggcattaaggcttacaaaagttaatgataatcccatattattgatgcaactgcattattttaatcatctaaatttgcatattatcatatatgaacatatttaaattttttcaattctaagcatatattaaatcatttcaatgactgcaattactggaaagatccctttgtttccatttccccagataacaggttacagaaggtcatttagtaggcctgataatcattaactaatacaacttaattgaagtttcaaattctgtgttgacaggaattgaatattcaaaggcaatgacattgattaactgtaagagattacttcttttcagatgatgcaataactgatgttattttcaaatgaaaaagaaagggatttacatgctaagtattttccttgtgttgctttcaatagggccatctaaaaacaataaaatcatcaggttttcagtgcagcatcagaaccaaggtgaaaaagttcccttttctaataacaaaactgttaccccaattaatactca

SEQ ID NO: 43076 - DNA, 777 bp, Homo sapiens
cagtatttgcaaggtgctcaatgtatcatgttgcaatgttcttaaaattggtttgattggcttctcagttagcttctcttcaacttgttcctagtgaaccacactgcttcaacagagttgacaacagtaaagaccacgtcccatagcaaaactaaagggagtttcctttcagtaaggaaaaagagttgcattattaacaggcatccctatggtctgaggaaagtggcttctagtatttctgaacttaaactaggcaaagtttatgcaataggaaaacccaggtcattttgcccccagaaagactgacatgagaaaatattaccattggcactgagagtgacaacaaacaaacaaacaaacaatcaaaccaagtgttctcatggtttttaaactaggtgtatttactctttaaccaaagcaagttctagcggcagagatggtacaaggtacaccacaagggcagtcataaaaatccatattggcctggagcccaaggcaggagtcatcagggacagaatcattgccacaggtccttagttccctctgtgctccatggagtgtggagaagagtgtcttccaggtcagctggttgggggtcgggaggaggggggaaacatgcacacctggaaactagggcgtctttatggcgtgagctcattttacctcttttctttttaaagtctagatgagacatgaacattatgaactggaaattagaaagagaggagaagtcaaagaaggagactttcagtgttagttgggaaaaactacactcaa

SEQ ID NO: 43077 - DNA, 1375 bp, Homo sapiens
ggaaaaaaaataaaagaaaacacttagcttctttagcaagctatctgataaaatagctgaaattcaagaagccctttagttaggagggagagattgcgaacacaacaggaagaagccccaggctgagtggcaaaggttgagattttctatcgtaagcacacctcacccaaacgcttgctccctgaaagctgctgacggagctttggcgagggctcatcctcccgttggctgataagcgaagccctgttttatatttaactcgctgcagtgcaggaggggtaggggtggagatgcgtcgtttataaggggagctgtgacaatcttcttgccagccctcttcctcccactcggctcctcttacggagtcctcattccaccccccttgtttccgcattcatcctgagtggctggtgggaacgtgaaaagggagaggaaaaggcgcaagaagccagagagaggggtgtgggaaaagcgaaaacaggctgccaaatcaggggattccttccaatttaaaaaggaagtctgctgacgttagttagttaaatttaacatctttttatgtgtaacacttgactttggaagcaaaaatgaactttgcggagagagagggctctaagagatactgcattcaaacgaaacatgtggccattctctgtgcggtggtggtgggtgtaggattaatagtgggacttgccgtgggcttgaccagatcgtgtgactccagcggggacggcgggccgggcactgcgccagctccttcccacctgccttcttccacggccagcccctcaggtcctcctgcccaggaccaggacatctgcccggccagtgaggatgagagcggacagtggaaaaactttcgactgccggacttcgtcaacccagtccactacgacctgcacgtgaagcccctgttggaggaggacacctacacgggcaccgtgagcatctccatcaacctgagcgctcccacccggtacctgtggctgcacctccgggagaccaggatcacccggctcccggagctgaagaggccctctggggaccaggtgcaagtccggaggtgtttcgagtacaaaaagcaggagtacgtggtggtcgaggcggaggaagagcttacccccagcagtggagatggcctgtatctcctgaccatggagttcgccggctggctgaacggctccctcgtgggattttatagaaccacctacacggagaacggacaagtcaagtaaatattaatttttgctttacctcccttaagctcacatatctgctttccatttcttttcctttccttttcactttccgcttttaattattttgttggtctgatattgatcggctcttggtttcaattctggctgtccatctg

SEQ ID NO: 43078 - DNA, 489 bp, Homo sapiens
ttcttttactgtaatatgtttacatgtaaaaagtgtatgctattgatttttttgagcaattactcagaaaataatattttcaccttgaaattatgaaaatactaaacattaacattttagtttacaccagcatatgcctagttagagccataaaaaaaaatgctgctctctctttttaagagtgagctttaaactaggacaaaggttacttcacctaggagattactcagcactgcctttacatgaaaatgaaactgggggttttgtccctgttgtaacataaataacaaagaatgtgccattagggacagggactggggactctggaataacctccactctgtgacagaagacagctgttcacttcccataagggcagttagacacaagcttttaagtttggctttgtgtttatctacttgttgctcaatgggcttggggtggagagagtactagctcataattggatttatttttgctcctccacag

SEQ ID NO: 43079 - DNA, 1164 bp, Homo sapiens
agattacttagttatttttgaaactccttacatgtgtcttagtcagcttgggctgccataaggaaataccatagactgggtggcttaaacaatagaaatgcatttttcttgcagttatggaggctggaaagtccaagatcaaagtgctggctgattccgtttctggtgaagcctctcttccgggcttgcagatggtagacttcccactgtgtcctcatagcagagagagagagagggagagagagagagcactctggtgtctcttataaggatactggttccaccataagagtcccagcctcacgatatcatctaaatgtgacagctcccaaaggcttcgtttctaaatactatcacactgggggttagggcttatatgaatttcagggaatacgattctttccatagcaacatgatataaacatctaaatttatctataaaggtcattccttatactgagtacaagacttttcccttattattagattagaaaagatcaatattagtatgcttattacaatggagtcagtgaataaagaggcttgcttccttttggtaacagaaatgacaataaactttctgaaacatttcacacatcccacttaagcgtattattccaggagatgtttctgtttcattttcgtttttctaacagaccctaagccaatcgtcccaggtttgtttttatttttaattttatcaaagtagctacaatgtgtccctataactgccgtctctgcaggttggccccattccagcctagaaatgaagttctcttcctactctttcccttccacctacatcctgcctgctgcgataacccaggtagtcaggagtagcagtgctgacggtattcatcccagagagcagaaaacaggttggagaaatgccccctgctggctgccacagaaagtacttcttctgtatgtgattccccaggagaaggtcaccattcacatagatctcactcccatcaagccttcttatgtggcatttagccctctctacactactctaaaagaaaacggcccccttctacccaatagtgaaacatctaggtgattattaaagtaagaaataaagtcaagatttcggaaatatttggaagtatatcagtatattttaaccctttgtctattagtaaaatattttgtagagacatt

SEQ ID NO: 43080 - DNA, 1052 bp, Homo sapiens
tcctaacccttgtgtagatggttgtctagggatgggtttgcaggcagacataatgctgtgtcctaagtgcctctgtggcaatgcagatcaccaaaagcactcatagaagcatcagcccaggtttgggggttcaggaagcattcctaaaaaatatctaggctgagagttcagaggctaaggatagagtataaatgggtgataaaaattgaatgtagaggagacgtgtgctctggacagaagcatgactgtgaaagtgaaagagcagggagttctcacactccttcgtatccctttgtcaatacatttcacacatttttttgttctaactattgacctatctatgtctcccctccccacagaatattcttagaggaaatggagcttatttgttattgttgttctggatctacagcaggcatctaataattgtttattgaataaatgaatgaataaacaaataaatgaagaggctgatagttacagagctttgatgacaaatctgcctttatctgaaacttcagaatcatgtctggtcactgagccagaagcaaactagaggtctttttctacttcaaagtgtctgctccatttttaggctgtacaataagttcctgtttcctgtttaaggacatcttcagctctcagcttagagcacggatgacgaacatgtcctgagtgtactaaatgggcaaccagctcatgttaccagtcctacctccctcctcttggtttctttgatgattcattagttagaaattcttcaggcaatagtgggactctccccaaggtcttttatttacatttctattgtatgtgctattttaggcgttaaaacaacaactaaactcataatttctaatgaaagaagagaacctctattataaaacattttctggctactccagttaccctgaataatctctcctgtcatcatctcctgtcataaaatatagtatattttatcctgtcactttcatcagcccttattcctagtattattactttatattttaaacaaaatcattgttattaagcttcatatgttctctctt

SEQ ID NO: 43081 - DNA, 1336 bp, Homo sapiens
agtatattagtcctgtattttaatcttactagagtattttagttctactcattatgtaactaaacaactgaacagtattttgctattgacaactgttccaaaagtagcatgaacttggaaagtccttaactactgacttcctggatctcagcttcctcatctataaagtgagaaaaatcacagtaactctagacaggcttaactaggtacatataaagcacactaaaatatggcagtatttagatggattgccaggaacttctcaacgttatttatatttgcttcgctatttatagaactggcagcatatcccctttcattataatggggatagctaccatctgttggatacgtagcacataactatgtgaccaacactttacctatgttatcttatttaatcttcacaacagccctgtgagggatttttgtccctgtcttccttggggtgaactgggacacagaggggtcaagtgatctggccaaggtcacacagctagtaagtcacagagcaaggtttttatcctaggtctgtgagactcaaaagttcatgctctttctcctgtaacatatggctttatgcttagcaagaaactctccttctgatacaaacattcaaaatgtacagatgccaaaagattagcttcctttcaacaacttgtccatgggaggatgacaaagaaagagaaattctacatgagtgaggtaagggtttataatttatcaattacctactccgaaagttcctaaagaaacttattgtcttgttggagaggttactcatatattatgaaaaactactgtgtcctggatatcttccagaccttgcaaacacttccaaaatttaaatcatatttcctcccaaactgactcaccttcctctattctctactggcagcaccattattcatccagttgtgcaatccattttcccctcctctgactgtccacatcaagtcagaaaaaggattttattgattttacctgtgataagtctcttgaatgcatcaacttctttctagtttcatcatctccacattagtgtaagccctcatcctctattgccctacatgactacagtggactctaaattagtcttcttgtcgctagaatcgcctccaaaatatctcccataccactattgaaatctttccagaaaatagacttgagcatgctatttttctgcttaaaactcttttcccctctcataagatggattcttaacatggcatgtggctcttcatactggaggccaggcttttatttccagcatcatctcctatttttcaatatcacaacctacattgttggtaccttaaaatatttgaaacttctc

SEQ ID NO: 43082 - DNA, 539 bp, Homo sapiens
tactcccacccacatatgcacatatacataatctttatttcacacgtctatgaggatggtgcagtgtcttttcatttcattaagttattagtccttctacatggagtgggtagagtcacagaaaggaagtgaaactgaaatcaatccatttggtttctattttattcttagtttaatgaatactttcacccttaccctaatttcatcatcattcttttctatctgaggaaaggagccacagagattataatttaactttgattccacctggggcaaaacaatattttctttcatgtctcccttctcttagggacacagcagaaaatgaggattgttgttcaaagaacataaccattggcctagtaaagttaatggtacaactagggttttccagagtcactgaaagggaaatgctgctgacaagcacactaatattggaaacagtagctccagagtaatagctacctcctgttttgttgtgttggatcaaaagggcatgatattgatgctgtttgtaaaagaagttgcctttgtctttg

SEQ ID NO: 43083 - DNA, 1675 bp, Homo sapiens
atgttgcttaattacacgtatcgagcgagtatggtggcttcttaaaaagttaagtatggaattaccacatatggaatatagtccatggaaattcaacttgacctgaattttaaatatatatacctatatatgcatacacacttgttttatatgtgcaccatttgaagttggcatttattaacaggatatttctattactcacatgaaaaagagttcgtgaggcttttaggtacacccacctgcactgcttaccttgcaaattcaccccaacctctttcttgcctgtatggatagtcccatttacatttcatataccagagaaatcctaagtcatttattacttaaaaaccaatgatgacatttcttggcaaggccccaacattattaatttatgagagaaggctgtagtaacttatccaagaaggccacatgttttcttctctgtcatccttgacctcatttgtggctgtgtttcctccttccctgaatgcatattatccccatgatcctggaggaaaaatgactcatctgctcaaaggtgaatgttttggaatatttattgtttgagacctggctgactcatgtttatggcttttcctgtgatttctcttttattcagagtttcctgagcatgatcttttcacctctcgggacttgtccatgattttatttcaaaggaaatgtcctccctcaaacactactttcctgaagggtggctatttgtccttaaagtccaagtaaataagaaaccccctcatagaagttcttcagggtccttctttccatctctcattggattaatcacaggcatatctgcgctcccagggtatcttgacacagacatctatggctgcactttcctcaccacattgcaatgtccttccactcagagaggagagaactgtgcacttccctactagactgttgctcttctcccatggagagaatttttttttgtctctatattatctgcacataagacaatgccaagaactaatagattcccaattagtgtttgttcaatgttgattatttgaattctaacatgttgtctattatattactagaggagctgagatttaaatccaggcctgttgtatccaaagcccatgatatttcccctccaacatatgatctgtgtatctgttcactaagcctcatttttttcttcctcctgaccacacaactagagttcatcttccagtcataaataaacaaaagtaaaatatgccactttaaggcgtggcttctaaaaataacttctgccaatcttgtaccatttatttcttcctttgtttgctagctagattcagaagacccaatagaggaatccaagaccctagtaaatagcagagccattagatagaaaaagtctgggctcctgagtcaccacgtggaggaagctaggaatatcctagtagaaatattgtgtgagcaaaaaagaatactgtatgttagttattaagctgctaaaaattttgaagcttttattcagcagttagcctaccctgattaatgtactaccagaattacaatttttataacatttttctgatttttaaaagctacatgtacactctagaaaatttaaaaatagaaaataataaaaaagaaaaataatattcactactcagagataaacattgtttaatatttttgttatacattacacatt

SEQ ID NO: 43084 - DNA, 1856 bp, Homo sapiens
ataaaaccatcaaatctcgtgagaactcactcactatcacgagaacagcacaggggaaaccacccccatgattcaattacatcccaccaggtccctcccatgacatgtggggattgttacaattcaaggtgagatttggtggggacacagccaaaccagatcgaacatctatttcttctgttttcacaaatcccacaaaaatggagaaaaaaggagaagggttaaaaggcggtaaagtacatgaaaaaaagataaatggacaatagcaggtgagaaatatctcaacaaatttagtggaaaagaagatggagcagaagtaattaatttagcagtgtaacctcagggtccacagagggagaaactagtaaagctagccaatgtgttatctggaggcttggggctagaacagcagagttcctatgggaagtaggggtgaggctcaagctgaaatcagggcctagttgaaagactgtacagtctgtttgtttatgaagcagctggaagtctaggcccctttcccacttcacctcacccatcaaggaccagaaattcactcagagaaaccctgaactcctgaaaccaaacatagtgtggcagatggaagactgaaaatagggggtgggggattaagtgaaaatctggatgctgaaactaagactttcagctgctttttctactctacattcagaacaatagcagccagacttacacaccgactctgtcacatttgcccctccatccccaattcatatttaagtacattgaaaggattcttgagaagcgtgtgacagagatatcataagatctggaaaatcagcaagaagatcttagcaaacttggcaaatgaaaagggagaattattaactgcagggaaaagtattatatgagaaagaggtgtggtgtagtgcacaacatggctaaacattgcgtaacatttgcacagtcatgataatgtaaacactgagtattggtttagccaaaaatgctaatgtaactacatcaggggataggggaaggaaactgatggaacacaggagttttctaggtattattgtttggccttcaacatacattcgcactctttccacatacccccttaattacaaaggctgggaagctaaaaatgaccacatttcccaaaaggtcctgcagctacagttctggacacaatttaagttctctcataagatgcactcatttgagatttggaaggcagaagtgaggcaaaggccattttcttgtgactgaggcagctggtaaacaagattagacagataagaatgtttgcagtaggccaggcacagtggctcacgcctgtaatcccagcactttgagaggctgaggcagatggatcacctgagctcaggagtttgagaccagcttgtctaacttgatgaaaccccgtctctactactaaaaatacaaaattagccagtcatggtggtaggtgcctgtaatcccatctactcaggaggctgaagcaggagaatcgcttgaacccaggaggtggaggttgcactccattctgggtggcagagcaagatgcagtctttaaaaaaaaaaaagaagaagaagaagaagaatgtttgcagtaggcagacttcacatcctaatgtgtcttcatggatgtggggcattagcagaggtgacaacagcagccacctgacctctgtatcaaccctactctacatggtatgccactgaacccaatagtcctgcaacagcctttgcctcccactcagtttttccctgccccatcccctactcccaacaatttagtaatcactgcactgaattggtaattccctgtactgaattactagaatggttgcatttccccaaattaaacacacact

SEQ ID NO: 43085 - DNA, 519 bp, Homo sapiens
taaataataattgtacacatttacaaggttcaatgtgatgtttcgatatatgtgtacattgtggaaagattatatctagataataaagttacccatcagctcacatatcttttttttatggtaagaacatttaaaatctacccttttagcagttttgaaatatgcattattattaactatggtcactatgctgtgcaatagatctcaaaaagttactcttcctgtctaactgaaactttgtacccttgggacaacatctctctgtcccccaccccaccccttttttaattctttcccaggactggagttagtaggccaaagggtacggatatctctgtggttctgagtatgtactgccaaaagaatgctatcagttttcagagctactagcaatgcctgagtttaaccatttctctaaaatattgctcacattaggttttattcgacattttaaaaattactaacagatattaaatagtgcttaattattgtctatatttccacttttttctctagcaa

SEQ ID NO: 43086 - DNA, 1802 bp, Homo sapiens
ccctcatgcagtgtatgtccatagtttttcacacaacacccttcttctctcagtctgtcggcctctctctcaatctcacacacacacccccgccccccaacacaccgttggccccgccccctgtcttggcccctcccctgtacggctccgccccgacggccgggggttgggcgagccagtgacaggaggggccgggctggtacttcaggcgcccaggccggcggggcgcgctccggcggctcctgtcagcggcgggtgcggcggatcccagggcagccttcgggcggcggcgctgcctggtgcgtcgcggcgtggtcctccggcggctgtccggggcggtaggagttggctgcgggatgtgctcagccggggagctgctgcggggcggcgacggcggggaacgcgacgaggacggggacgcgctggcggagcgggaggcggcagggaccgggtgggatcccggggcgagcccgcggcggcgcggacagcggccgaaggagagcgagcaggtgagcgcggggaggggcggcggcgaagcggccgggtcgggggccgcgagccccgcccggcgttggagggaaggggcccggcccgcgggccgcgccgcagctctgccccgcgtgggcactggctccccggcgctctgggaagtcgtcgccgggagcggttagacggcgctcccaggaggagcggcggggtcgcgcgagtgcagacgccagcgccggccccggggtcgcgtgtctggcggggtcagcgtggttcgtcccctggcgtccggcagaggattctcaggctggcgcccagggctcggaggaaatgccctccatagcggtgatttatttaaaagcctcacttgtaaacacttctttttcaacttcgagtccgtgccctgcgccaggtttaggagacgccggctcccctcccgccctccatcttgcgtttccgagcccacacctagcgtgtctggaaggtgtgggtggattccgtccacgggcagcgctgaaagcatgagtaggagcgggtgttacaatgaatgtcttgacagggactctcccagagcacgttcttcataaatacagatgagatcaaagcttcagttaaaaagtggagaggcaagaatattgctttcggttataagaggccagccatagtaagggaaaagagaagttgcgtaattttttaaactctctgagtttatctcatttaaataaagtgtgataatgggcattataacatcaaatatcttaaagattaggcaaaaggtttaattttaaaaattgaattgtatgttggatgaattttctacagcaaatacagtatttagactttccaaatacctgaggtaagccgctctttagactcacattaaggagcaggaattcaaatgattattggcctttattacagcctgtactgttaggacaattaatacctgtctctcctcatctttcttcatctgtcctttctgtcacgtttcacaaattccagtatcatcactaaatgcattaatagatgtataccttacattgtttcaataggttacttaggaaacagagtaatactgtgtggcacacaaaatatgccttagcgttaggtttgatcaccacgtggagtgtaatttttcatctgtgacaatataagagaaagtgactcaagcaaataatttggtagcttgttcttcggattcccttcctagtggtttttcccgttaactattcatttgctcaagggcttgatttcctctaacttaaattgcttaactggaaaagtgaagaagacagcacaagaattcctttgggggt

SEQ ID NO: 43087 - DNA, 2531 bp, Homo sapiens
tgttacataatggaattacacagtatataagcatttgagattggctttttctttaaccataatttcctacagattcatttcagggtgtgttcatcaatactgtgttcctatttgttactaaatattccataggatagatgtaccagtttctgtaaacatttatagttgaattttaatgattatttcattaatacatttgtctaatttcaggggttggaaggagaaaagaaaatgctttcactaggaagtcattcggtcatcccaacattcactgaaagcaaaccattgggacaaatgttatcctatgcttctgattacaaaacaactaaaacccaaataaaataaacattagtaagtagcagtgctaagattgaaaccagatacgtatttaaagaagcaagaaaatgagttcagagaacattttatcatcaataaaaactttctaaaatgtaacaatttttctaggtttaattaaacaggctaaaaacttgatgtgtccagtccatgagagcatcctcctatccactggacgaggtgtctactaaaccacatcttatatctattgtgaggccaactgtcttgaggccaaacaagacgcgaattatatggtagcacttgagagggctgcggacacattagagcagctttctcttcccatctacagcagttctgggcagcatgcttggaatggcaacgctgacgtccccgaaaaaccccagccctcttgccaatttcctctgaaccccaactacccaacccaaaattatgtgaagatctgattttcaaacaaaacgaggacaataatgcaccattattacgtttccctaaaacattaacagtatggaaattaagacacaaaccagagaccggaaaaaaatcttggtgcgttcaaagtaacctcaatcagttcccgagtctattttccgcttatggtgcagtattaacaaaaactaagcacaccgtgcagagaaacgccccttcgcacttatgacttccggcctgggactctggctcctcacacgcctttgatacaaagttcgaaggctgagccttagccatgccacgcccagcgtgctccggacgaggatgcccgaaactgcaatgagagagggaaatttcctagtcaggtcaaggtccaacaaaacaaacgtccgcacgcaggaattgaaccgtctcgcaggcagaggcggctgaaccaggagcgagcggaagtgacgcacaggccggtcgccagagaaggcggggcaccgaggtagcgcgcccaattggggcgcgggagaggccgggggtgtggcagcgttggcggcgagcaggggcctgggcgcgctgggggcggggccagggtgctcggctcgcggggactggcctccttcggcagctggaggcggtcactcacgctgggctaggagctgaggcgagaagggccatgcggacggcgagggagtccagagccttgagcccggtgctcctccctcgcgcagcggtggctctgcggccgctggagtaaacactgcctttgttccctagcgcctcgtctttcgtcgccccgtgccctcacgccgccgggctctggccggcccgccctcggtccttgaaccccatttcggctcgtgccgtgcggatgcagctgccgggcctgggtttgggcattgagcgggaggaggaggaggagcggcggcgcctgggcggcatgcgatggggaactgctgctggacgcagtgcttcggactgcttcgcaaggaagcggggcggctgcagcgagtaggcggcggcggagggtaagcccgctgggggaggggcccggcccccgtggctcctcctcttcggcccccggcggggaatccctttcaccgtcccccggcggctggaggtggcggtcgagagccctgctacactcactgcttagcagacgtcagactggtggtcgtcttggaggcccagtctggggtccggtcttggggcctcctcggaaagaggtagaagagggggcggggtgtccctcctgccagggcgccctgtcacgcggggaaggagtcacgggagacatcatctccaggaaacaaggggtagcttcgcgctaatgggctgtaggaccggctccacggcaacctggacacaccctgcgctgagcttaggtttaacgccaaagctagtatccctgtatctgaccctctctttagccctggcagagcaggtgggatctggctccggagttaatgcctcagattgattttaagtagaagtcatttggatgctggagtaaaataaggttccagatactgatgaactctggtagctacaaagacttgctgaattgcagagttcccaatgggcattcagattcttggtgctcataactacagggacaatgtgtaattttttcgtattaagtttttgaaatttcgagaggaattccttgccctgattgctactcaaacgtcctgtaacattaggtaaattgcagtccttctgaacttcacttctcttgagtaaacctgggatattgcttaggttttgtatatgcaccatcc

SEQ ID NO: 43088 - DNA, 1090 bp, Homo sapiens
ttgagttttcatttttcatttcttaatagctctccgaaatctgaaatggtcctttcaaaccattaggacgttggctttctaattatttttaaaacatatatattacatagaatatagaaaagtatgtgaaaagttatggttttatatggctggaagttggcaaaatgtcagtgactgaatttaatacatcacatgtctgagggtcctattcagtcatcaataatgtttgaacaagtaaacataattcaagcatacttgaataagtaacttaattcatggaatatatacatgttatgtttcttggtattttcagataagtcacaggataaagctcccctgataaaaatgttgaccctgagtttgccaaatcgagtatttactttatcagtataatcttagcttttattgtggtaggagtcaagatatgcattttgtgaacaaagtctcaatctaatccattttaaaaggaaagcttgaattttttcccaaatatattttgcttttctctcaaatatattttgcttttctctttatcttgttttatttattgctattcttaatttactcccttgtcatatcacttatattcatgtttattaatcaggactttgtgggggacagaagcccaattaaaactatcttaggcaaagggtagaatttgtaatagggatgttaggtttctcaactaataaccaaaccatgagcagggtggaatgcatctggttcttagggatgattttgatgctgtcagagcactctttcagtttatttcattcctctcattgcgcattgtcagaaagcataatccccagcaactctctagagctctcagaaggatattgtctctccctgctcagtttctgtgtaaccctgaaccagtcaaatgaggtgtgagggattgactgattctagcttagtcagatactcagggattcagagtcatgtgaggacgtgagtgtcctcactatagctggctgtgaatagaggggacagaaaagggagatatttacaacagataacacttttgcctactactaaagttagtttgtattatctatgtataattagactagaacatggtgttctgcca

SEQ ID NO: 43089 - DNA, 771 bp, Homo sapiens
attctcattattgtatttaagttgctgtaaatgctaaattagtgaatgctgaagcattactgcaggggaaatacaaggttaggttcctgcaagcctctgatcacaatatgttcatcaaccaatcagtatatagcctcattcaatgtgcgtttctgtgtaagacactgtattaaacacatattattgattcattaactttgaactcacagccaatagcacaaactcatgcttgtatgaagcttacctaacacacatattttccccataacacacatcatagctttcttggactttaggaacactggaatacttagaggtcattttaaacagaaatcaccagcaaaaaagcacaaaaatgcaaacagtgtggcattaaatagactgtaaaaaggatacttgtttatagcatgagagctgaaacaagaaagcggagtgtctgtcgccctgttctacctcatctgggaatgtgcattgctgagcaactcaaaatttttactgctccatgcctgtccttgaatgaccaagagagctcaaatattgattttgtggttacaagtaaattttccaagtaggcaaatttgcaaatatagaaactgcaaaaaaatgaggatcaactgttaatataaatgagaacatagagaatatgttgtctcataccatactgaccacagttcatttggtatgtaacaaatatttgttaaaaaaaattaagaaatgtccagcaaatggttttatgtaattaagctagatagtaaactaaattttgctttg

SEQ ID NO: 43090 - DNA, 1870 bp, Homo sapiens
tcctgtctaaccctgctcaacaggatcaccctgaagtgtggctctgaagatatttgtgaactctggcacagctgtttggcagaattaatactaaaaccacaggtcttgcaaaaacaaagaatcaaaaaaaaaaaaaaaaagtgaaaaccaaacagcaggaggaaacccttaggaaagctcggtgtctttcagacatgagattttctttctcccactctacttgactggcctgacctggggtccagtcccacttcctggtggctgcggaaatccgcagtgaggctcagtgtggattttggcttcagaggatttgggaaattccacctttcaatctgaaatctggggaaagtcccagaaaacaacggattactatatttctctcatgaaccagactgaagcaaggagtcaggtctaggaccaaggacctcggcactccagggagcccagggcccctcagaaaggtctcgcttggccaccgagagcgtggggccgtagcagttggcaagcgggggaggggggtcacgcacaactgctctggagccacactgcataaatggcattcgtttttgttttctgattagaaaaacgttgaaaagaataccaaagtacagagaaaacacacccccatctccaatgtttcctcatttatgtaaatattctcatattttataaaacagggaggtgctgtctataatttttgcaggctttccttagcatatggtgagcgtgtgccaggtgagcaggagcagcgggggatgacttccgatccgacacccccaaaatctcctggacaaagctgctgtctttgcgggataaacagaaaagggccagtccccacctcacccccagcccgccgccccgcaagtacctggggctggggagtcagtgaactctcttcagctgttcggctctcccggctcagagcgaggggaatcgaggagactgggcgcaggatgggggtggacacccggccgctgctcctccgcgcgggtaagtgtgagccccggggtgcggggaaccgagccagggaccagtgaccgcgagccgccgatcctcccgcgctcccgcgcgcgcggcctgccttcccactggctggcagagcacgtcctctcgcgcccggggcctttgtaaagagcgcagcggtggcgcggaggttttcaggctccgcccgctccactcgcgctcccgccccttccttcctctcgaggtgacccggcagctggcgcctttctcaccaggtacccagccccctggccgcctctctcagttctctggcagggtttggtgcgcggtacaccgacccggaccgcgccttcccaaacgagtggcctctcctccagcccgattggcgagctagagaaaagaagggaactggatcacttcagcattaaggaggacttttccccaaaatgagtgttgccccagggcgtgggcaggcggggagctgaactaatctttcggtgactccaaggataccaagcaagccagtgcgtggcatgcacgagctcctctaatcatcgcagtcccccttacacatgagtaaaccgaggctcagagaatggtggagtgtggcgagcagaagtggaattttttttttctttttttctttttttgagacgagtctcaccgtgtcgcccatgctggagtgcagtggcgccatctcggctcactgcaacctctgcctcccgcagaggcgggatttgaacttgctccaggttgccctcgccttacacccagcagagcagtccagtcgctttctctcctgccgcttgcatcgtaatggacatccagagtccacaagtaaaagctggtacatgatgaaatgggaaacacctctcaggagtcctttatagcttagaagaaggtaatg

SEQ ID NO: 43091 - DNA, 1067 bp, Homo sapiens
actttattttccagttcagcaatatatgtgtctctgtgataacaagctcacttctaagacagagcacagaatgaagccttaatgtgcatctgtcttttgctaacagatttcaacaatgtcatattcattgtttcttactgacattctctcttcttggctctaagaggactctccattcttagtctaaataataagtttttcttgcactttcattaggagaaggaacttttctgtagtaatacagctcccagaatacctttcaccgaagcaattcctaaaggggtgtgtcttatggtgcaagattgctgaaagtcccggaattgaattacacaaccatattctgagacagtcacaggattggttgtttttttttttttaattcctacttcctgaaactgaagccgtttatgagaaacagtgtgtttcagagaggctgtaccagaattaactctgctcagagttagatttgctggtcttaaagtacttttcctctttaagataaaagtgagtatcatcctttaaatgacaaaacgcagtagatggcataatatatgaggaagtatttgtcttaagtgttgactcagtttccatctgctgatcttgtttatatttaaataactttagagctctaagaacctttgcacttctataatagaaactttccagaaaggggaggatgagttggtggggtgaagggggtggagtggggaaggggagggagagaagggaaaagttacctacaatggtaaactgtagtcattatgaaggggagaaggcaaaccagtttttcataaggttttaataacaagtttcttaagtcactgagcttctggtcttgtcacttaactgagatgtttaattaaaggattgttaggattatttgtttaaaaaaaaactctatgacttttgcctggaatacataggtaataatagaaactaccacttttatgacagcatcagtaattttgctaggaaacaggtagataaggcacgagacttactcgtctcatatgggtgaattgacgggaattctgagtgcgtggaagcattgtttagagacaaagcat

SEQ ID NO: 43092 - DNA, 1332 bp, Homo sapiens
aagtcattcctaggaaatcccgagaaacacttcacctcacctgtcaaattgcacaaaatccactttcgaatttctcccgcgaaacaacgtgacgtcattaacgcgggacctcaccagatgaggacccaaaacttggcccgcccacctccgcctaagccaaaaaccgccgctttcaaatcgccaatcaaattcttccttggcttcgagtctctcagccggccgcgctctccgatgcccagccctcctggaaccacctcgcctgtgacgtaggtggagcgcgcactgcctccgggcccgtctttctcaattgggaccggaaaacgttgtcgctcatcctatgacgcgaaagtaaccgagactatcaggatccggagacggaaatgtccgaaggccgcagtacttgaccctgtattttgggagtcgaacggagtaagttacaagcggcctatagggtcgcacagcttgggcgaagtctaattaactctccgtcctttttcttgcggtccactctatcatctatcgtccttcttaccccgcccccccgtcctgcacacccatcagttccttggcctagttatctatgcgcacgcgcaaaagtcttcggcagcacttgtagttcccgttttcagacagtaagggcgcataggggcccggcgtggggaggtttggggcgcgcccggcctatgacggcgtccttgcggaagtacgggtgccgagagaagcagtagtcaataaagagagtgccgtatttcgcagattggagctgagctgtggctgccagaagatagcgaacgtgaggatttatattctaaaattatcatcttcttttgcaggactctgccatcgtcctcaaagagtaaaaaatccagttacggaagggaactaacacttgctagatatggtgtgcagagtgcgtttgcaaagaaacttaagagaaaacaaatgataggacacagggtggtggaagatctcaaagagtaagatgccatttaacctgggccttgaaaatttaataaggaaatttagacgagaagattcagacaaagcagaacacacaggccactacgtgttgagggacttgagttgtaagcagtgaccagaacaatgattcttaacctgttgtggcacacttcttttgaaaacttaattatatggattagcttctcaggaaaacgtgcatgtacctattaaaacattttgcgaggctgggcacggtggctcacgcctgtaatcccagcactttgggaggccgacgcgggaggatcacttgaggtcaggagttcgagaccagcctggccaatatggcaaaatctcgtctctactaaaaacaca

SEQ ID NO: 43093 - DNA, 1139 bp, Homo sapiens
agagaggagaggagagaattagaaatgaggatcaaagtcctggaagtaaaaggtgaggtaagcacagaagagattctgtagaacaaggagagagctgctgggcaggtaatcagtgaggagaggagaacgcacaaggtcagagagaaatgaagagaagaacatttatgccctaattagtgagcaatttgttataaaacagctttgccacctggagagtagaatttaaaaatttattggcacgaactaccaaatcagccaaattagagcaggccatcttccaggtctccagcacaggctacagtggacagtgtgcaatagcaacccttgtcatgaaggcggagagaagaggaagtgtacttcaggaaagcacgggctaatccaatcaacgaagatcagcataaggtcataagagttccatgttgcaatcagtcttttaaaagccaaaattaccttttgcctttggcactgctatctgataccttaaatggagtattttgctaccaaatgaaactaaataggacaagaaagagctgctcatctctttattgcaccatcattgatactaaacttttccacaaaagggtaatgtttctctttaacctcaggggcacatgtgagtcattgctctttcagatcctaactatccagtgatatctattaagtcaccacttgtacctttaacacagtttctattcagtcctcctggcctcccgcaaggactgcattagtctagtcaaccagtagtgctgctgccgaagttacctattcttcatgcttgactctaagaacctcttcctttctttcttcttgttttctaggcatagggatttccagctttacaacatgctatgaattatcctcctctgtgttaacacttgtgttaacctcatccgaagtcctgggggatgtcctgttcaacctgccatttcacccatagtagagttggtccacagtgaaaagtggtgaaaagactgaagtctttataccacttgcatatattgttcctgatcctgcgtgtacatttcagagaactggtgaataaactctccgctccatgcctttctgctcagagaggttacatcttatattctccaaatttaaattaaaatgtagcttccttcatttgcttctcttgtttc

SEQ ID NO: 43094 - DNA, 852 bp, Homo sapiens
tacatattgtttctgccattcatttgatgcttatatttctcatttgctaacatttataatcatctgttcttacgcaaagcagtatgtcttggtggagaggtagtggaaaaaaacaaaaaacacccatgaaataaatctgtactcaaagaattcagcttgcttaacttcccaactaagtgatactactttggggaaccataactgctttccttactccatcccttttgtttcacagtgccttgttcacagctcaattatttgaagtctttatagatctgtttctctcttttgttgtttctgctgtacacctggttgtctttgacattacttctgccagtctttgtggtcacaagtgacttgtggagcattttaaaccaagttcgaagcttgagttttgttgtaagtctcggcaataaaacccaggttataaatctgctgaaggtctcgttatttattattctgctcttacccttagagtattgctttttgaggtctcagatgactgtgaagagggctccctattggactgtgcaccttgtgtggacattgaccttcgatatctgccttcttgcctggaacttttcaaaataaaagctcaagtttgcagggaaatgcacttaggaaacaaaagcaatttccctgcttgcttatctttcagtggttccattttccttcagttttgcctagcaattccttattatcattccagctgtttgttgcttttaagaagttatttatattttatccagtatttctagtttgtttcagcagtagtgtttgtctgaatacctggctcctattagctggaaacacatgctgttcatacaggtgcttagtgttttggttgttgat

SEQ ID NO: 43095 - DNA, 744 bp, Homo sapiens
taaaactgcagtgaatgatttttagatttgctgtcatagggacttcagcagcaactttcagaagattaaagctgagaggctagcctttgttctcagtccttaatcgcttttctcttatgatggatttgaaacacagcaatacaaatgaaataataacagtaaaagggcctgggaatttaagaagatattgcaaatatgtcacgtcatggaggctttgaatttcactttctaagtcatgtatcaaattcaagtaccctgctctaagtgtggtcaaacatgcaaatatttgctttctgagtaatttgccctaatgactttgaagcatttttgaaaaacagtggtgacattgttctgccctggcagaaagcatattccttgtcagatgtccacagagatcccgactgtctactggcagattattaaaggatggtgctgcattgtatttgctaagctttccttcagtttgacaaaatgttatgtatataggttgtcacatcacccaagcttctgtgccagacctgtctggcagccacccttggttaaccactggaagatagaactagaaacgttttaacttctgaaataaggtcctcttctacagaccccttacacttttattttttattagaaagtatctgatcgtcggcaaagtttgaagtgatcacacataggcagctgctcataggaaattctgttttcacagctatgatgttttccaggttccaggttggtaatttaaatctg

SEQ ID NO: 43096 - DNA, 840 bp, Homo sapiens
agcgcctgcactggaaatggtcactgaatgcagcctgcagttgccgggggttttgagttctctctgacaccagcaagccagctagcagatggggagaactggtgaggggcgtggaagggaactgagcagaggagccaaggatcatcttgatgaattgcccacattagtgtacccctgggagccctggacagagtgcagagggcaaggacgggcccactgacagcaggaactgtagagctgagatggggaatgcagccctctgctcttcttgccatgcggataagagcataagagcacaaggaaacatgcaggaactggataaaaccccagactactatggctgtaacagtgaggacgtcaaagaacctggagtgtgggtaagttttaggccacaaaggaggaggaagggaggatggtggcataagaatcaacagtagacctcattggtcagacctctaaacttcctggaaggaagctgacagaataaagccaatgtgatcaaaccacctgactacctctgatcaagtggcatgcttttgcttcctcttcatgttatgcaatgccacatgtttgttttttctcggttgtctttaactctgagctgacatttgggaaagagcaatgacactgtctctttaatttggaattttgtccaaaggtggacatacgtattattatagagtgactttcagcaatattgcagagattcacttacgttcagtctgtcaaattctttcgcctatttattcatgtatagttcgtttctcactaagtcacagagcatttttttaagcatatgctcccttagtatcccagctccagcctaaaacagtatttccc

SEQ ID NO: 43097 - DNA, 1588 bp, Homo sapiens
gtgattttttttttttggccaggaatctctgaaatatttggattttcatatttgctggagaataaagtttatcttttatctgtcagatccaggaatttgaccaccttattgcaagttatttatttgcatgaaaataaatagctggttgcatggtttggctgcaactatgaaactaagatatgtaggatttctgagtaagagaggcagaggcgtttgtacttgttatgtacttgcctgatatttccaggagtgagaacagggtctgaagcataggaggtggtgctctgctctctttggcttttactctgacctgaaacaatgtcatcatttcttagcactgaaactctgtcagaccatagtgaaactaaaactaaaactaagaatttatcaacaaaaacaacatgaagggcaaatatttgcagttggcagtgaacagaaagccctgtcgtgaaaaagaggacagtagttccagcatggaggtcaccgtagtcaaaaacgaagaaaaaaaaaggtggggagggaggccgtcccagggaagggagatcacccaccgttaacaaccgcacaggcgaggtttgtaaccaagagcagtaacgtttctcctggattatggtttccactacccacatccacccaggagagccgctctggacttctcagagcagtcacttctaatgcagctttctgaactgaggggacaaaaagtatcattactactagttcaggaccacaaaaatgagtgtatttttaaaaatgtacaatgtcatttctctgaattaattaatatagcctgttagtcatttaataaaatcttctgctaaaggttttatagactggagcatatcatgattggtgtgacattggaaaggtgtggtagaggtggaagtggacctgttttctaccttcagaaatgatattctgcccagaatttttccactttggccatggagaaaaagaaaaagttaatgtttaacttaataccaagcatgacttaagcaaaatatgtggttctaggtagtttaagttggactttatgtcttccaaatgagaatgtaagactcacaaacatatgtcagggttttcctctgaaatgagcttggcttttacgtaaatccttaaaggaccaaagatctgctcttatcacaattggcttggcagctccaaaaaagaggaagcatgcaggacaggacagagtgaagaacaaaactcagctgtttttaaatttttatttagtcctggtaatgcttctaaatttttaatcacagaggggaaaactgcgtcatctcattatttttccatgttcatgtatgcagatgactggtgggtgtattccaagttcacttgtgaaagaagcagctcttggagatgccttacagactttgccctggatcctagggtagctctgacacaagtcagcaaggccttgttagggtccaagtaggctccagagagaaggattcttgaccatgttttgataaagtgctatttagaacagcataaaaaatgtatctttattttatggtcttcttttggcttgtatttttgtgatgatatcatttataaatttgcatattggtctaagtatact

SEQ ID NO: 43098 - DNA, 1699 bp, Homo sapiens
gcaactccagatgtgtatgtggaggtaaagttcatttcaaaggaaaaataattctatctatgcctcagaaaattcctaatgcccagcgcatagtgagtgctcaataaatgctgttctactaaactgaaatagttccactaacctaaaatgaaatagtttaaattagagtgagcagtaaatcccaaattagtccaaaagatcaaaacttatttgaaagcaggtacaaatctgaaaagtatccaccaccatcactttgtccagtaggatccaatggccatagtgacccagagcttgattactagatgtgagctccacctcactctgtgggaagcccagctgtaagcatcggaggtctgttaacccctggaggagaaaggacatcatgtacattcgccagcacatggtgggtgcccagaccatacagtggagttccctgaaacatgccccagagaacagcaatcacccatgggagctgtttcctcagttaggaggagagagaagccaacccatccatccaggtaaacatgaggaagatggaatttggccttattaagtctgtcaacattcatgcaaagttgtgaaacacacaaaggtcactctcgcccagtctttcagggtcctggtctcttctctgtttatgtattcctcgcttttcaaatgtcctctccttcctgactcatgctgtaatcagttctcagtaaatctctgattgaagcatttaagaacaaattactaagaaagcatgatattttatatatcccagataggtatgtcttttattggggatgaacaaagaaaaaaagccttaattcaaaggagtatattttcaaaagtgaaatttcaggcagggtgttaggataggctaaactgtcatccaagattcaaacacaatggaattttatttctcgtgcacctaacagtccagtgtggatatttgggttattggacggatttcctttatgtggtcattcagagcccctctggtgaggcctctggttatatgcagccagaagtggaggggaaggagagtgtggaggcccagctgctgtcttgagagctcagattcaggagaagcactccatctgggctgatcgttcaccgagagaacttagtcacatggtctcctcctttgccagttgctgttgttttattctggaagtaaaggaatatggattttggcagacaaccaacagtctcagcccaaatcaacagcccacagtgtggagatttgttgcttgggaggggtgcagacaaagaggaagatgatcttcttcctaatgtgccttcaactgtgtcctgtagctcctcatcacctccacctaagctgaagcccagtgctgctgatgcaatgaactcccaggagttttcaaatttactaacatcattttaactctctgtggctcagcctaggtttgtaacagtagaaaagtacaatgtggacctgcatatcactggccagtagatcttcaagagccagctccttcaggctccaagcagaccctgaactcaagggtaaatcaccaacgtcctgagatgggaaggtgcagcttgatcccactcactaactcgaagcctttgctttgctggggatcatccaggctactgacttctccttttccctggtttcttctcttttcccagacaagttgcactgctgatcatcagcagacaagttgcactgttgatcagcacctgaacc

SEQ ID NO: 43099 - DNA, 1259 bp, Homo sapiens
ctccctactccggtagcaaactctaaatgctcatttctaaagaaaatagggtgcacatgtttttcttttgagaaagtgaattaatctgtgaagttcttcttgcctccataggattagaatagaatgaagtatctagccaggagtcaagaattccatgctatgttgctgactcagccattaaagcaattttccctggacggtcttcaccaaatgactgggaaataaaatgtcatggaattgagaccacccatatacccccagcccactataaggggagaagaaagctagcagcaaatgaaaatggaagcagagggaagaagccataccatcacccttgttcctccatctggaggcagaatagatgctgctcgtgccatcgctgttgaattagtttatgaaggacacctcctgtgaggttaaatagcaactgtgggctgccatcacatgttgtactaaatcctcttctgccctttctgttctataactcaacaaatggtaaacactcctctagtgagtgccaaagaagggagcaataactaccgagcaggcatctcaggtcacctggggacacaccaatagctgtgcctaatgatcagatcagaaagcccaattaaactccagagagttcctttgagcaatcactgacagggcattgacttctgtatggcctcagcaatgcagagcacctggaaaagggctcattagctacaggaagcctctttcaccgttcgactgcagctccaactcagaaacatgaaactcttggcaggtagctctgtcagcagctcaggggaatctttcctttggtttcagttcataatatttggcaacgtctgcagtcacctgtgaagaagctaaaaatccacggtaagaggcagccaactcacccgttcataatcgttacaggtatgcgtactatttatttattgttgtcctgttctaagcattgcaaagcacttttgagaatgtgtctctcgctcaaacagatttttttttgtggtgtttttcctcttcagagattgcccttttgtatgtttggtttcgtaatgcccccaaaataatgtatcgcacttattgtcactatttgttttggcacatttgatgtgccctgcagagacgttttatgatatattttcctagatatataaattaattccattcatagtgagtgactacagagatggctgcaaagcaaactttcaatcacacaagtgtctctttcctttatttagtaagtctttatttatgacccacgatgt

SEQ ID NO: 43100 - DNA, 1400 bp, Homo sapiens
aaataactttcccaagtccaggcaacattcaaatctagttttgtctgattctaaaatttctgccctgaatcatgatgccacttcatcttgtaaacaggaagcaggagaaagccttggtgctccactcttagtattaatatcaagagagaatctgtaccaaagagcaaattcaacactgtttctctttttttggcttcttcagggttttgcctgcttctttatatatcagtgctttaaaccaccaggtgttagagtcatcagattttaaatgaaatcattccatttcctgttatacctcaaagcttagactctgttttatttacagttagactctcagttataaaggctgtgctttctttttctaccaaggatgcatcaaaggtagaaaatggctcagctgcaagcaccatggatgggtaagatggagcatgaagattccaaggggatagaattttcctccccttttcttcatggggttgagaaaatgtcttattgcctgcttccagtgtccagatgcgttaggcacattttaggagatggcgaatgataaactgccaaatcatcagatagcctcttccaactttcacctgattcatattttatcaaataaataaaaatacagatataagaagagaaacagtgggaaaacaaagagagaaaatgtttttaataatatttgtaggtttttgagcaaatctatatgtagtttccaaatgtaacttcagttgtgaagggttagattcagaatcttgacggatgtgagaatgtttttaacgccacaacacacaccactccttcatgtttctgagcctgctctgtaccttggacattttatatttgggagcttaagatgatttttaaaaaaatctctttccaaccaattcttctagaacaaatctagtgaagcagatgcaacgcaaggtggagacactgggaactggctgggctgccgggtgaattccagtacagacccaacaccaccacagaaactaggaatttccctagaagcatttaggagaactagctctacttttccaggagcttagtttattgattcatcgcctactttaggtcaggcagtttgccaagagctgtggatacacagatgattgtgacatagttcctactcctcaaggagaaattagaatgagattcagacaagtgaactgtcaatgatgcaattctagataagggctgtcatgggataaggggaacgtggggtgctatgcttccccaaagggagtcagaggaagtgtctgctggaggcatcaaaattagggctctgtctatgctggaaccttagccctagtgggggcttgtatttctcagttttccttgcctgctaggtgaaaatttatttagctagggcacagtgcttctggccctaatgaggtacttct

SEQ ID NO: 43101 - DNA, 2052 bp, Homo sapiens
tccttccacagtacaataatgttactataaagtggctgcctagaaagagactacatttctctgttcccttgcaagtagggatcatgaggcttgttagtgctaatggaatgtgaacagaaatgctgtgtgtcactttttaaagtcaaatagcttaaaaaagaaaaaacccagatgtgcattctatagtctcccattcaccatacactaggtaagtgtagaagattccaaggttctgagtggcagagcagcagaaaggtgcagagccacaatttaaaagaaggtccccaaatctccacatggaaggtcatctgctgaccgggaatgcctacataggtctgtatgataaggaagatatatacacttctggttttgtaagtcattgattttggggatttatttcataaaaaaatgatattgcaactgggatattattttaacagaatcctaaaatatgtgtcattgttgagtagataaaattgatgtaagatgttggaaagatggagagccgtgctatgcagtggcaataaacttgaaaaaacttggctgacaataataaaggagtacttgccaaacttgtagctctaagttagaatgtttgtgttagcttgttactggccatatttagcaagtttttcgaagaaagatgagcttagacatgaattgacacatgtgcaagcaaaagtgaaagggaatagaaagaatccagttatttgggatttctcacaattggaaaatctgcatgattctagaactcaaacatgaatagataaaactgaataaaattgaacacaaaaaacctttacttttctcagttaaacagagtgactacatttctccattcccttgcgagtagggatcatgcgccttgttgcatgaattcctaccacagagctggttcaatatctaatcaagaataatttcaactttgccaagtaccaatgactatgtatgactctcattcaccccctccatcattgcatttcataatgtcaccagataactagttaataaagcaaaactaaaaatttttagaacttactgcagtaagagaaaatgccatcttgatggaggcttagcagtgtctcagaagggagaagtcagaagtgggatatttacagggtttcagagtctgcgatcaattggttaaaggcaaggtcaaggtggagaaccgtttgaaacagggcaaagtactgtgtgacataatagtttaggaatggctgatgcaattgaaagaaaggtcttgaaccaaagcctttataagtaagctgtttttataagcgagccattcacccaagtaagcagactattgtgcttgggggaaaaaatgatctgtggaaatttcctgaggcaaactatgaagttgtttcttgatttacagacttgtctttcctagtcaaaattttgctggaacaagcaacaaattgtggtccacaatatttatctaaataatattgacatataaggcattaattctcacacttctagctatcccattcatgcccctccatgacagggggtcagaggtgccttttaagtcaaatgttgccaacttgggaggagccacattcaagcctggtggagagacagcctcatgacctagaaatctaggattttgacggtgtagtgattggaggaaccatcttacatagtgtactcttacacggctcctcggaaagaaagcagttgtattgtgtttagaaagatgtttgcacatggatattggttgcccagttgggtggacatgtaagaaacacttcatgatccacttacatggtggaccatgtaagatcactaaaactatgtgcttcccttccattgaaaagagttatcgctgagaatcagctgcccatctagagactacgtttttcagcttcctgtgtgaccaggtggagccttgtgatagttcccaacaatatgaatgtgatttgagtggagatgatgtgggccactttcagacctagaatctgtaaaataggtgtgcattttccattttctctttctccatctggaaggcaaaaaaaaaaaaaaatggaagaaggtagatccttgaat

SEQ ID NO: 43102 - DNA, 2215 bp, Homo sapiens
caaagtttttttgtggatgagaaacacaatgatgggattaacccaaaagagaaatatacttgaagtttcatgttgctgagacctggagcttcgaaactctcaccccctttttccctcacttccttttcacactttcctgccaagtggcattatagcatcagcgaacggatcacattgagcgaggcccaagatgcttctccagcctcgatgtctcaaccctgagaatggctcttggggaatgagtaataaatcagatggtgaaatctcccatggctaagtgtgacttgttccaaaagtagagcatgtttacttggataagtttcaagaaggagttttgttggctaaaaagcatgaatctctcagaaggcagtggagccaagttagaaactagatatgatcccaaagtgaaatcttccgggaaaggggctctctccttctgggaacattgtctttatcacagtgcctgtaacatagtggctccttaatcaatgtttcctttagttcttatcttctgcctgcaaggaagttttgtttaattttgtttttcatctctacttgctagccaaatgactcttcgccattctaaagtgtctctttttccatatctcctcatatgtacctacatatacacgtgtgtatacattgagttttccatcttttagtaaaatgggccgagtaattttcttatgaactgaaagagggaaatgcaggaatgtaaacttgattgtcattttttaaattagtcctcttagccctatgccttagagggagttcttttctcatggtgtgaacaacaaagcatctacttcttttgcttgggggcaaaagggtactcatgacaagattaaaagagcaaataggagaggaagggaaattctgaaaattaatgcttttataaggctgtggtgactaaccaactccatcttcagtagaatgtctctgagtcacctatgatgagcaatgatattgacaaaaagaagcattgtacacgtaacaccacctaatcacaaattacttagctaaatccttcttcccacacaacagcaattgtttcttcagaccctggaggaacaggtgctgtgggtgaactagctgcttgttcttttgttcactttgccaggcagaatcaagtgggtggattgtgaataagatcattgatgtttacttggttgctagtcgccccacgcgctcactttcctattttgcttatttaaagtaataaaacagaaaagcagaactgaagaaaattgatcactaaatgcggtttcaggtgctaagcagtcttttcattgtttttaaaaaaattttcattgaagttagggcagggagaagataatatcatctaaaggtgatacagagcacttctggcttaacgtacccttctcccaactggaattcctacaagaactttaaactgagtgagacgtttagtttcctagtcccaaatcattatgtgatgaaaaactatccagcactggctgggcacatcaggaagctacagcaagagtgaatgcaacagcggatgaagtttagagtttgaagaaaataacaatttctttcttcatattttattttttcacaactctcattatatccatagaataacaaccttaaaggggacaatacaaacataatttattctgacttttcttgattccaatgagttcccaaactctttcttgaaaaaagcaacgcaatccagtctctctctgtgtccaccctcccctgaacacccatggtctaaaaaacagtagctcatacttagctgagggttaggttcttatcagtctaagcccaatagtgtgtggcctgtgatccagttctgggccaattgggctgctaggaaatgtttccttgctgaggatgggttggggaggtgtggagaagacttgagcaagcgttcctcttccagtgggtgttgtcctgtctggatgtgacatgaggaaccaagtcatgcattttgggaactcaaggtcgcttaacctggagtatagagtttcctctcttgcaagggcagagctaaaaaatggaaagaacctgggtcctttttttatgttgttgaagttactgaaataaacagccagagctgactcatctctctcttgttgaagtaatgtattttccttattatttaaggtgtttggaatctagtttctgttccttatggcttaagaaattctaaatgtgtgcaatgatggctaaaagttatttagct

SEQ ID NO: 43103 - DNA, 3614 bp, Homo sapiens
cagtgtcttttatggaatagatgctcaatgtttgtgaatttaatcaattgagactaataaacttttcttgatttcagaacactgttctcttatttataaaattactgcatgaaatattttagaaatcaaattttactggattttaagaatattgcgatattcccttaaaatcactgaacatagactgggaatcacaaaatgttacttcccatcttatcttactgaggtagtgaggctattgatcacgaagaaagctgacctcaggttttattctttattgactaaagaaaccagtttgcattttttatgaatctgatcttcatcaagcagattttaaccacaagcttaaatgcttactttcactctgaaacttcaggttacctaggtgatgacattatttaaaaataaattttctataaaccacattttacttcatcgagactatatgagactatatcataacaaatacaagtaataaactatcctataaaatgtgattaagttagtccataatatggttgctaacaatgtcaaggtctataatattaaaaaatcactatatgggttagaattcatatttagttacataattacttttcatttatataaagtaatataacacagctcctacagaagtccaaaacatttcttgcccttgctcatttgattgatgaatatcaataatacattcaacagcaaaacatagtgacagaagtggtatcagggcatgattttgtaataaggatcctgccagtgacacattttagcttaattcagttaggcaataggtgattcatctgtctgtgccctcaacagtatgaacatttggcaaaagctaatgacagctgacccgattctggaatataagggatacgggtgaggaggatctcagaaaatgagattataaaaatgtggccaccaaaacttctctctcacatgaaatcctcatttcaaactaacagatttttttttttggtctgatatacagctgataggaaaaactacagtttagaaaacatggccaatttgaaatgagcataagatcaacgtccttcgtggagcttcattagggtaggcttcagtttatagagtgtgaagagtttaggatcacttcctaaagtttctgaaagtctctgcactgcctcacaagcataatatggaattagaatcatcgggtgtatatggccatcttttactttctgaaccactgtggaaatacgcattcactcttaagtattttgcatgccacaactggcttaagggttgtcctgcataaacaaagcaacacaaattgccttctctcacttcttatgcttagaaacgatggtgcttttgctggcaggacaacaaatgggaattagccaggatgcttctgtgctgtatcaccataaaaacaatgtgactcgtttggcttaggaggggcctggaactcaggaatctttagagtgcttatttcactggggcaaaggagcttgagtgagtcacaggcggcacatgacagctgactctttaaaggaaagcagaaggctggaaatgaatcatttgtatatagtagtcagcttgttgttggaactgttgccacaagcccagcatctgacctagaggaagagcgagggtttggtgttagctagctctactctcaatcagcagtgaggttgaggaacagttactgtgtcagtggcttggacagacaagttgtgtggggagggggtccattctcatctggccttccctcttcctgaacaccaagtaataaataaccactccaaaagtcaaagtggagagcttgtgatgtgtccctaattataccacgatgaatgcagaatgtaccagtaaggtgttccctgaataccagaagcttcttccactccagagctagccatttaatcgcaggaagctgtttacctactaggtttatttctagaactgaagtgctcaagcctatactcataggacacaaagtactttctggcgatttctagattcttaggaaaaggaaaaagagaaaaccaagtgggagagatgttccaggttctgagtggaattactttccatgcaattatgcacaaagaattgggaacattttccctttcaaattcatatatttttggctcttgttctaagaggcctggaagagtaagataagggtgtgaatgatcccagtgtttgaaaacaaaataaaacccaagaactgagagtaactacataataaaacaacttacagatttcaacatttcctcaaacattagatttggttactataacaatactcaggaatgcagtgattatttcttggtttaacagataaataaagggattatgcgcattgcccaaaggtatggagtttgctgatcactccttcccaccttcttgtcttggaacactctccttttacttaactctcttgcttttctacatgttctcattctcatttgccatgttatccttctctacctggatattaaatgcttcaattccttctaaagactcaatttgagtccctctccttatctcatgctgcatccctaaagtcctgtgtacaccagtgttttaaatagtcatctatattccaatgactcccaaattgttaacctcctttctagactcttccttcagatctatgtgtcaaggctatttttgagcctccatttgggtatctcaaatggacctcaaacccaacatatactgaactgagcttaagaacttccaccactacaagcctgcttgctcttccatggatccccattttggtgaatggcaagatcatctctcagttgcataagccagaaagaaacctgaggatcatatttgactccctaaatccagcacctcaagccaatccattaagttctgttgaatttgccttcctcttctttttgactttttttcctcttcacccccactctctctgggtataagcacccatcatttcttgtccaggctctgtaacagccctctgatttagtgtttctgcaaccaattttgctcttcactattctgttctctacaatgcaaccacctctctctctctctttcttttttttaaatgcctatctcttcagataaccttctatttgaactcttctaaaaccttctcactgctctcaggataggtacctgaagagagactacaaaaccttgcgtaatctggactctgcccatctcattagactcattcagactctttgactttatcttctccaatccactcttgctcctttgttttaccaattcaaaatggacattctgcctcctattaccagccctttatatgtactgtcttctcttcttggaaaactgcaccccccccattttgctcctacttcttttatcagatctcaattcaactattatttcttcaaaaatgccttccctgggccaggcgcggtggctcatgcctgtaatctcagcacttggagaggccgaggcgggtggatcacgaggtcaagagaccatcctggccaacatggtgaaaccccgtctctgctaaaagtacaaaccttagctaggtgtggtggcacgcacatgtagtcccagctactcgggagactgaggcaggagaatcacttgaacccggtaggtggaggttgcagtgagctgagattgcaccattg

SEQ ID NO: 43104 - DNA, 426 bp, Homo sapiens
tatttctgtttcaaatatcctactgttaccgctgtttgtcagaatatcttctagacaactggtctatagagactgtagttatatataatgaattacaaaaacaacataaaactgcaaatgcaattgatacaaaagtaatacttctaaaacagtgatgtggccaaaggaggtgacctaactgcaaatgtgtgttcagtatgtgtgtgcaggggcactgagaagatgtctgtagaaacactaccaatgactcatacatgtagctaaaagaaccttggcaaccaaagtgaatggaggtcaagaatacctttggaatgtacacaaaaagctaggataaaaaggcggccaaatagaaaattctactgatattatttgagatgactaaaagttaaaaagttatttttatactgtatccttgaatataaattg

SEQ ID NO: 43105 - DNA, 717 bp, Homo sapiens
ttattgttaatgttgggaagttatttctatctggataaatcaagatttatatgtctcaagtgtgtgttagagatgaaataagagagactgtggtgagggaaagttcctgagtaacgtgctggaataagtccacacaactttattgctcatatttttgcctttacaggcataattgcagctgaacagtcattaggaactgtgtggtggtttatcttcttcaaccgcattactcaccttcaggtcccgatggaccacgcccatctgatggcagtgtagcacagcctccaggatctgctgaatgcaatgactgcatgcaaacaccagggggcgtgtgttagttccaagcttacactcactgtctgtataccctcagagagactgggttaaagtgcagagctagcagacaactggggttgtattgtaccaccttcagtcatgtaaacatattgctcaagtagagtgactactacctcagaacaatcagatcttaccagatgtgagccagaatgtgggtccatttgttctagaaaaatccattttgaaaacactttatgtcattcaagagatcatttcctggttataaattcttccaggaaataaagtggaacacaaatataatctttatagctgtggtgttccgcctccaccccgtcacataaattgtttcccttttctctcccatttttccagtattgttctaaaagctgtcacattaac

SEQ ID NO: 43106 - DNA, 477 bp, Homo sapiens
caaggtcatcagtcacgaaggaaaagggctagtattagaacccaaaagcctgattcctcactgcatttaggcaaagcttatttccaagtttgagttttggtttacaaactgagatacttctttttcacttttaatgccatgcaatcattaaatgttcttttcaaccatatgtctacattataaggaagctgtgaagcaagataagcctcagctcttagttagattttgactaaagtgcttcactggacagatcttattgagaacaacatttttctctgttgacgtcagtggaaaaatgctaggcatatttgccaactctcagactctgttaaatgttacatatgtgttccaaatggctagagaacacataaatgaaaacattaatcccataggcagcagacagacactgtcactgctgaatttgagaactccaggaggtcttataagcccagttttaccagggtaagtcttcctttg

SEQ ID NO: 43107 - DNA, 879 bp, Homo sapiens
agtgcttctctttcagaaactgttcaacaagaaaggaatgaggggaaaattacttacatagctaattgtctgttgacaacttttataaggtagaaggataattacctggcatcatccatagacagactcattttaactttcataatttggagacaacattgttccttcctttctaaatcttatcctttcagattcttaaatgtgttcaatgctctgtagaaaacattccacagacaatatgagcctctctctttatatctctaatttgggcacttaattacatgcttctttgaactgctgagtattttcatgtgtaaatgtcctaacttctcttacaggaagaaagccccttacaagtcaacagtgtttggtatcatgttgttcaccttctagtgctttatttaaataaaaagtaatacagctgcacagagagctttcacagctttgagcagatgaggaagtgaagaacagaaggcttgtagagtagaaacatgaactttggaatcaaacaaatgtatttgaatcctggttccacccttcataaactaagcaaccccagtcaaattaatatatctatttgagactgaactttttcactgtacagagcacatagtaaaggctcgatatttactgaactaaattaaaaacacttgatataatatttatatctgcagagtagttgagaaaattaaataagataattatgttaagtgtttagatacaatatgtttcagattgacactatctaaggatctttctttcttgcagatttcattctctagacctgttacgaaagtgataaagaggacagggagcctagagagctacagagtttaatagaaagttcctggctcaaagctttactgggaatttagtttt

SEQ ID NO: 43108 - DNA, 734 bp, Homo sapiens
gtttatccaaccttatctgaaaggctaggtaatccagcaaggagaaaaaaaaaaatccatgacatttattgatagtgctgttctgctttctggagtatcatcaaaatgctcccgaggaaggtaaggaagcagctagcagttttaggtgtctgccacataaaagagaccatgagcccctcacactcctgacaaagatgattcaaatgctgcagggtgtatgagaaacacatcaaagatcaccaaaagggtctgggccaagattccagccagcagaataggaatttcagaatacgataaggagatgttaaggaaggtcaggcagtaaaaagaggtttgctgactcatgtggtttgttgacttagcaagtcagggagaagtcaattgtttgctctcctgttttacagtctttaggtgtgggccagcccagggccattgatagtcattttagccagaaggaaagcaaaagcctgcagatgaacttaaacaaaacagctgtgccataagttaaaatttatgcttttctcttaatagaagtgtttgttcctcttcagataatctaaacttgaacttaaaaaaaatatatgtacccacacgttgtttaactcctatagcatgtatttattgagcgcagactctacggcaggtgcttttttaggtacaataataaacaagaaaagtccatgccctcatgaagttttacatactactgggtagaaaacaatcaaatcaacaag

SEQ ID NO: 43109 - DNA, 760 bp, Homo sapiens
tcaaggacctagaattgtcacagttccttttgtactcctgaaatcttaaaaggttaaagaaaacctccagtgaggtaaccaaggaattatgacatttggctgttatggatcctcgcaaaaagatgtacactgtgtcagaaggtgttgacaatgctatctaggacacaaaagtttagaactttccccagcattctttctctttttataagtttagtctgtatgtagtgtcaaaatgaaaagagttcttgttttagcttggcagtttttcgagtgtttgactttggtatcctagaggaaatggaggaaactagtttcattatccacaaaaattgagtttcataggaggacctgatacaaaccaaaccaaaccaaaacaaacaaataacaactttctgcacaggaattgcaacttcactaaacaaagatttgattttatcttaaacctgagcaagagaagtaatctttgaactatagtggttcattgcgtaatttctctttagccaatgttgtgggcaaatgatgtcctccccaaattcctatgttgatatgctaatcctgatagcacacttcagaatgtgactgtattatttgcatatagagtgtctaaaggggtaattaggtgagaatgaggttatcagtgtgggccctaatccaatatgactggtgtccttacaagaagaaatgaggacgcagacattatacagagggaagaccatgtgaagacacagtgagacgacagccacctacttgcttaggaagg

SEQ ID NO: 43110 - DNA, 623 bp, Homo sapiens
ccgagaaggtttaattcttctactccccttccccacaaagagaatcccactcccaaaataatcttatatcaaaattacagaggagttgcccatgggagcatgaaaaatggaatgtttaaaatccagctctatcactaatttttaccttgctggcctttcggcttgtcagcttaagctgctgagctgctgagctgctgtgttccctattcttatctctttagtcctgacctttcctggccttatgctccagtttgagatcaatgcctcagatctgtttttgagggcaggttaattttgcctccctggcttccttactacagccaacccaactcgattttgaaatttttcacatttgtttcatttccaagaaactacagcctcgagtaagagacattctacttgcccctctggaagaaacctggctggctactcattctcagaataggggaagataatactaaatgtacctaaactatttgaagttttatactgttgcatctgcttattacatttttttaaaaaatctcttcatgagttattgctgtcagctgttagtgctgtgaatggctccagtacataaaacagtttcaggggcacataacaggccttaaataaatgtttgt

SEQ ID NO: 43111 - DNA, 4500 bp, Homo sapiens
aagctttttggtgttgataattttggcagcatattcttgtccagtaggaattttcatacatcttctcaccactgagaatgcccccctggaaaccaataattagcaggtcattaatataacagatataatatttcattaaaaatttataaaatctgagcatttttattgattttagtggattgccagtgaagtacagtaatatccagtaaatgaacaattcttcctggaaacccagactttctttaatgttgaagaataaaagtaaattttatttaactgggagcacacattattaatcaacaaaatgaaaggaactgccaattatgaccgctcttgtttgcacaagaaatttgaaaacattttacagttcacactcacagcaccaaatgctctgagaaaaaccctgcacagaacagagcagacgaggagcagcaaaaaaatctgctgcctacttattttggtaggaaacaaaaaattaatgtggttccaagtaagtaaacatgacgattattttcattaaaatataaatcttgagcacattagtgtggtttaacaaatcctggtatggtgatttctctatgccttgttttggactgggggaggggagagatttgaattaagctgctcttccgacatattctccatgttttaacaccagacaatatatacatatgtaatttttattacttttaaaaatatttacctttcctttaattacagtataaaccaacaacatacatataaacgcactcctttcataaaagtaacagtcgaaactagtgaaagaggaattgggtttgggttccatgctacaaaaatcagcattcacggcttggcccctaggtccctttgcataagtcctcagtaggtctcctgcctccttccctaacatctccaagtagttctgccagtcgggtgaaggaggtggttttacacaatgctaggctacgcttaagagcgctctcagtctccagagggcttttccgttgcctgtataaataaatcctcccagagaacgcaaagatgcacacgtaaatcctaggaagaatgatggtgagcggtaatctggtgcaaagaacaacactggatatagggcaaggggttgggttctgttgggtggcccttttcctggacagaacaactactggatgcgaaatagactctatgccaagttgaactttcggcatcaataaatatggcaccgtctgaggctgtgagttctcatcagtacctgggtcatacggccgacacgccggctaaccaggaggcatctctatttacagaaaacatgatctatgttgcattttacatgggttctaatttcctctccaaacacacattacacacaggcgcgcgcgcacacttctcaggatgatagctacaactgcagagatcgtaaattcactaagtctctcagtgcaggagggtgggggaccgggagaaggtgggctagggaccatcaaaatgagccacagttggagtaagggtcctaccccttctgtgctccctccctttattaagacagcaccttccccagagctgacaaaccaggggccctcctcccattcctctcccaaactccctcgccccaagacggaggccggtgggtcgggggcaacgcgacccgccctcagctggaaaggggatatgcggatgccgggcaaaggtgcttactttccaagctcctcgaaaagctgatactcgtccgtgaacctggtgcaggttgtggtcgaagccatcctcggtccgggctgtgccctggctgggagcgcgacggaccagaagcgagcagacgcgcggctaaccccgggactggccccgcggcgctgtcacccagggccgctcttactttcctggtccgaaagtagctcgcccgcgagggagtgtgcgcaggggcggggcgggaggggagatgaccagaaagggtggcgtggggtctcctccccacagtccgccgatcctcctcctcctgcgggcctcgcttccttcttctccactggacgctccacccgccccttttccagtccctgtccccaaatgcagggggtaaagtactcaagaagagggggccgggaaatggaaaaacagccaggcacgggacgagtggcaagcagttgcgaaacgatccgcactggagcaggaggagtagaagcagaggggagggagtccgagggggcggaggtggagtgcagcggggccgaggccgcggagcccagagcggacagcctgagcccagcggccgctgtcagcaggctcaggcgcggggcgcgccggggctccgacgagcgtgcgcgcccgaggccggcttccctccggcgggcggcagcggctccggcgaagcgaggcaccttggcggcctcgcgctgctcacgagcccgcgcggcttcaagacggcgcggcgagagaaagagcgctcggctcaggcgaagcctcttctgccgtccccaggcctccgtctcctcctccggcgcctcctcccgccgctccctccgcctgccagcaccccctccctggcgaagccccctcctcgctggtcccacacctccctctagcgactccaagcctgtcccttcgtggatctctcgcactccctcctttggttgcacacacgagcacaccagtctagggagaaaccaggtgggtggaggaggatgtgcgggggagaagactggaggtttgggtgaatgaggcgagaagtcacagttacccatttaaacccgcacagagaaggctgcctcaatctggggctgactgagcgggaagatgcagggcaactcgaggatggcccggggcagccgccctgggtcgcggaagcccacgcccctgttttgggcgccgggcagcagggacttctccaggccggttcccgggccacgacacccggtgggccgagcaagggagagcaaccacttcatctccacgccgctcagagttgacacagcaggggccggatgtgggctgttcactgctctcagagaagggtcccaacccttcccacagccaccagcgactgtcggggcaaaacccagcctcagcagggttcactgcgtcgccagctccccagaaccgggcgcaggttttctccctcccccgcagccccttctgcaaggggcaatgacggcccctgagccacattacacttgccacctccaggcccacctcccccgctgttttccaggatggtggctgagactctggcaatccccaaaggcctttgctttggctgtgaacgttaaaagaatgaaagcaaaaactccgccgcacaaccacaccttcccttcccttctgagtaactcccctgcaacctcagtaagttctgatagtaaggcgaattctcgcgatatttcccactctggcggtcagggggaggtagtaggaaggctgggtgtcggtcacgcgacccggcgggggctgacgtcattcacatcacgtgaacacgtctagactgtttcgctttgcaaagggaaaaaagaaaaggggccgtcgtgtgtgcttttgctttcagccagatagtggcaattgagtgcactccgtaaatggctatctggaaaaaccatttagcagttcaagaatgtgtccttccctttagcatatctgccattgttttcagtaggaggaaaaaaaaagtatgcattacgatttaaaatagataaactgctgccgattgctagaacaacttctgggccctctttccagttctccttaatgaaactatgcaattgcaaatttagccgcagaccaaaaacagcgttatggacggtctttttcaaattactgccaattgttctacagcacgggactataaaaaccttgcaatcctattgctaatttgctcgtggtattacttcatagacaaaatttcacagctgaaagataaaagataatttgcagacacaagagaatctaagatttaaaggcgctgctgcttgctcccaaagactgctattaattaatgttactttgtggtcatagataatcctaattccttttttcctgatctggggaacgcttctgccaatgagtgagctttttactgaagtactaaaaatgttcacaaattttaacgtttattacaacaaaattgaagttcgtatgtgttttgattcccagccgtaaaaggcaagaaataactgtgtaaaatgtagtgctatagaaaaagatgataccaagaactgcataaaagaaacatggtctctaaatattaataattgggctataaattgaaaaaaaaaacacaatttggtcttggctaaagatttgtaatatctgaactatttagcaatgtggctccaaggtgataatgaaataatttaatatttttccctgaatctaagaatgaaacagaaaaagtaaaattaaaacaataaaggtaatataaaaatttacatctgggaagaaaattgtttcttaaatattcaagtaatgaagtctacataattacagtatttatctcagttatttaaactaccaataattgtaaatggttataattgtggagta

SEQ ID NO: 43112 - DNA, 1062 bp, Homo sapiens
acccaggaggcggaggttgcagtgagctgagatggctccactgcattccagcctgggcaacagagtgaaactccatctcaggggggaaaaagaagaaaaaataaagacattttccacttgaagggctctagggaaagcagggtttgctggagtcaggttaatttcaacaagaatctgaaggaaatgttcaataaaaagattaaggaagtagaggaattttctgataactggaaacaagctttggtggaaggacttggatgaccaagaatgtgggagatgtgatcagattggtgacgctgaaagcagggtggtgataaatacctgtgaaattaggtgaactgggaagcttggatttctgagggtgatacaagggagctggtattggactggtattggaagcatgatgaaattcatttcagaagccacagagcactgagtttggaggtcatggggtggctgttattgccttcagctgaagatggggtgatagggaggaggtgggtctcattcctgggatatcagaaaatcttgtgcccaatgttgctggcaaaagagcaataattcagttatctttaattcccccaaaagccctctctactaagtaattatatttattggaaaaactcccacagaatctctaaagctcaaaagtcccttgctttgtgaactattttctggcttcaacatcccatagttagtcatttcctctattacccaacacacaaagtgcacaaatagcactttgcacaaaccttctgtctctctcactatacactaagcttcttgacccaagaactgtggtttactttgtatctgtgccagaaagtggatcatatccacaaactggatgacaaactcaggacctactcttcaatagtctttgaggagtaaacgaattagaagtctgcttaagttgtgttactattattactagctgttgaacatttacttaagggtaagcattgtgccaggagctgcacatacataatcctgattttgtaggttttctcttgattatgcttatgttcttctaagagatagaattttaattaatcaaactaa

SEQ ID NO: 43113 - DNA, 891 bp, Homo sapiens
actgaaatgttcttctagtaaagtgtttagaaaatagttacattcattgtgggcagtgtgctcaaacattcttatttgccattccctcacgcatggtaaaatgaggtgcaagctgttcacatgtgagaaaaacagcttttcacaggaaaagaaacatatatatatatataaaatagaattaattaaaaaacccaagtgtcatatgacagacatacaaaaattcaccaagaaaatatattcttcaaggcctttgaggtgacacaatctttgactgtaatttatcaaaggtagttttaatcatgctaccctgtaacttccatcaaattagcatgcttgcggatggtataccctgtaacttccatcaaattagcatgcttgcggatggtaggttattgttctcctcctataattcaaagcagtgtttggtcagttgactgaagcacagcagtggaactcaggactcaccacgttttctaaaggagcaagagaaataaacatctccactctctctaagtgtggcttgcaagagtagcaccttggcactgagcaggacagttttcagtgtggcggccaggtggcagaagtctctggagtggcacagcatgaaaacaagcctgacgcttaggccagcgatattatcgagccaaatttgctggtttacctaggaaacagatgaaagataagaactgattaaagtttaaccaaacaggaaatatttgtgcttatccacaagtaacacctgaatggcaagttgaacctgagactgctttctgctgtttcttcttcttttttttgcttttcttttgctttttctcagcctgatttttgcttggcttctttttcttggtttcctctttataccatggtccccagacccctccattgagccta

SEQ ID NO: 43114 - DNA, 4760 bp, Homo sapiens
aaggacagaggtatagaagcaaaattaacgttaaaaaatttaagtgcattaccagcagcacaaaaggcattatcaatattatgactaaagacagcatggtgtctaatgttcacctatttgtagaaaaatgaaagaatccattaattatttttctatttgcactatgttctccaaactagacacctatgataaccaaagaaggtctttgaacccctaactttgataaagatcaggctcctacatcatagattggttatttttttctctatggatattaacctgcatgttttgactttagccgatacatatatacaaatagatacataacagagcttaaggcatggaaggttgggagaaggatgtggcattgatgtagctctttgaagagaaataaaatttcaaataggctgagaagagggtgattgtggtataaatttacctctctcatttctttaatcttctactttccactaatttccctatattttctcctcagccttcaccttcaagcatatgtctctctctatcttgaaaatatcctctcttggaacccgctattttttaaattgccacatttctctttcctttcttgcaagattaaaccccgcacgcaggctacacccactcttgccatttctactctaccaacccttttaataacctcttcagaatcaaaccatttgtgttttgggagcgggatgggggtgggaagataaaaatgatgactttcttcttaaaatagcaatttaaaagcacgataaaatttaaataataactagagctgtctgaagagaacatttcttttcaggcaaatgtgaaattaagtaatctgtttcatgttgcggtagacatttttctgaatggctcacacagaacataaaccttaaaagccaacagcatactgtggggggaataatttctgtttaccctcagttcagtgttctgtcccattaacagctctacctctaaatatgcatgacatttcctttcaaaaattttctgtttaatgtttcaaatgcacacactagatctgacttagtaaaccaattccttaataatgagtcatctggccaaacatgagtcagagtaataaagctctcgagacacttcactatttgaactttagggacatatataaacctgtgaacgatttcacagcctgaagaaagaatttttagctgttatgagaagctgggtaagagagaaccagcacttccctgttttcatgtcttatcttttctgaatttgtaacattgattagaagaacctctgttctatgattttttatttacagagattgcaatgatcatgtgtagcattaaaatacaaatttcacagacagtatattttactttgtgtatattaaacatgtttttttcttgaacatttggcaactataatcaacatgagattaactgtttcatcagaatgtgtttatatggttgcatattatcaaatggaatttggtttctgaaaaatggaatgaaagtatggaacaaaatggcagagctaaaagtcagaatattcccaaccttgtattttagttaattttactgtgatctatcagccacccaatagattttttttctgaaagccttctagtttctcttgtcttcaagactatgttcattggggtattaagtaatgtaccttctatcattgcttctctcttgaattattgttctctttccattcttagtgttatcattacggttttttttcagtattttgtttctcattcagacagcttcctactggtttccctgttttagagttggagaaataataatgagacatggataaaatacaattaggcaatgataaaacgataagaaaacaaggtattgacaatgagttgtagtgggcattttacaaaatacacattgatcgagaataaattttatgtgtggttccctatacctgttctggtatgcctaactacagcttagttattgaataatagtttccttgtatgctttcctcactactgggctattgaatttgatgacaagtgaaaaatttgagagtttgagatcatctgaaaaagcttctctacttcacaaaccttgctgttttataattattttctgtgtacctccagtatcctggtttgaatgttaaagtatttcattttcatctccatggtggtgttataaaaccgcaggattattagtgaactgcctcaactttaatagctataattgattctggtgtattcatcaaaatgacagctataatttgtagaaaaaaaagaatcaaagaattttcttataaaagatgtgtttaatagatctgtagctttttattattgctgctgctgattcattatttttacattttataacttgatgctggtacttcttgagaatgattgccttattaacatattacttatttgtagcattaagtcagtaacttattttcttgatatgttaagaaaattccctcaaagtagattgaatagggcagtgtttttcaaacaatgacccaggagccctggagattggcagaagtgccccgagcctgccttagaaggaaggggttgaggctggaacctgcactagcagatctactttcttttgttttatatgctggacttcttttccatcaagaaattcatttgactgaaaagtgacacattgaaaaagagtttgaaaaattatagaataagtttcaagtccaacagagaaataaaccaatttacctttggcaaacataggtaacgtgaactgggcagctcctctaggtgaaaaataagtaatgggagagagagactacagtgcagatcctgagcagacaccatggagaagtgacacccacactctgatcacacctggaggaggcatccagcacgttggaagtgaagtagcacttacccaacaacataacctgggttgcctaaagttttacactttaagatttaaaataaaggggcttagagaagggatttgaacttgtaaaagattatgagattcttattctttaaaaaataaacaatcacaaatgttcttttgcaggatatgttctgtagtgcttgttcttaaaatctaagaaagggaatgtttgggctaacatgttacatcagatggaggttggacgttttgatttcaatactgtgtgtggtaactaaggtgaatgcattaaaacaaacattcctctcaatgaaatctttctcaatgtctgcacagctgttaactctttggcccagaaaactgcatcaaaagccagcagtaatacaacttatgcaggttggcccataaactgtttagtgagtactttgcttttggagaacaaaaagaagagatcaccaatgtggaaaagttgtaataaatgacaatgttctataaattaaagcaaatgacctatttttagctattttaaaataagaagcaaaataggtggacttcaagttttaacaaaaatcttgccagatgtaaatccttaaaaattataattctaaaaatgtaagtgcaggaccaccaactactgctcagactcttttgccttgacattaatccaagagaaagggaaaaacatgtatgtgtgcctgtgtttgtctctctctctctctctgtgtgtgtgtgtgtgtgtgtgtgtgtgtgtgtgtgtgtgtgtgtaaacacttgatatttgatgcaatcaatagtctgaagtagcaacattttcattttgatgaaaatagggatgttgagtgcatacattggctctttctgttgatttcttttaatcatcaaccatctgaccatatggatggactaataacatgcagagttttggctacaagtccaacgtagtgaagtaagggagaatggtgaattcacccagttcattcaactctgggacagccgtgaggccagacaagcatgcttgccctaatgtagcaccctgccccaacattcacctgtgctgctttttctttcttttgaaatattagtgagtggctgagccagaactcagatgcagaccttctgacaccacttactatgataaaagaaaaaaaaatctataactgcaatccttcaaaatataaaacctaagggagtcagaaaaagaagggagaaacaaagactattatttattggtaggctttgaaatgtgaaatataattgtcaaagagattcctgtaacttgtgatacatgtctgctggagcaggcaccttttttttttttttttctaatagttgaatgaataaacttgaatttgtccttgactcctccttttcttcctgttgcatttgtagttcatcaaaaaatcttgtctgctctatctgcagaatatactcagaatccatcactttccatcacccctccctctgtcccatgatctctcacacaggttaatgctatggtctctttaacagatccacctgctctccatccgacctgcatgatctatcctcaacacagccactaaagcagttctgttaaaaatgaagttagatcaggttccccttctgctccaagcttcccagtggatcccattttagtcgagtgaaagtcagtgcccctgcctgtgcctacattacactacaggatctggcttctttaactgctttgaccccatttcctcttaatctctcctggtctgtctctgaactagcttagtggggctgtcctgtaatggtacttgaacacaccaggggtgttcctgttgtaatacttatgcattcactcttctttctgcctggagaagctacatacaacgatcccttccttgcctcccttcttatcaaggtcttccgtgacctttgtaatattgt

SEQ ID NO: 43115 - DNA, 821 bp, Homo sapiens
atcgtcagccttctgcgcctggataatttccacctttaagaacagctatttcggaaactcaatagaattatctaaataggaattcacttcaatggctttttttaaagactctttaaaattatggactttgagcttaagagtgtgccaatagtttatttgaccataattctactatcagaaagcccatatggtcaaataggaattggcagctctttgtcaaatggtttgactattgagccattctttttgaaatggatgtgtgaggtgtcaaagccaccctctccacttgttatatccattttccagagtcaaagtaaggcttgaagaaaactcttgtttttcctgaacttctaacagtaaacatgtacatttttctaaatgtttaagtatcaactaaatatatatgaaagtaatgactgaactcatataactaatgtaatttatatttattgagtcttgtctggatgtaacatgctgcttaaaactaggccttgaatgaaagaagtggatggaagaggaagcatgcatgaccatgatgtttacaataagctgatgggaaatgagtgtgtgtgtacacacatgcctatcaaatgaaataatcaaactctattgccctaagcttacttgactccttctcctatcagagtggctgaaagaattcagttaccttttcagggtttccaacactaggacaattataacttgaaaatttaatatctaaaatatttgtagtattttgtaaactggaagacacgttcccctgccttgacaggccactaccatccacagaggaggcctatctggattctatcttcctagac

SEQ ID NO: 43116 - DNA, 853 bp, Homo sapiens
tttatttgcaaaactgtaaaaaaagaagtgagtaaattactttgaaataaatcaaacacaggcagtcactttcccaatcaaccttttatctcatcaggacaactgtgaacacctagaatgctgtttctcaaagcccagtgcatagaatccctacatcactacccctcttagaatctgttgccacatcaatataaaatgggcatgacaagagcaactatctaaagttgttgcaaggattaaatgagacaatgcatataaaattcattaccccagaacacagtgactgctcagcagacgctaacatttaatactaacagtcttaatttatttttgatgatgtcatcatcacaataacctgacatgctcattaaatcactattgatttctagactcaaccccggacctaccaaagctgaagggccctgaaatctgcattttaactagcatttggactgattctttttgcacactacaacttgagaactactatccagagattagggctcacttcttgtttcttcttcatggctccaatgcaggggtctgtacacatgaacgcttattgacaggctgactgataatcaatattgccagactagtatgatgtaaattattaagggaatctgcaatttgttacagattcgtgtagtaaaagaaaatggatttttaatttttgactccagaaaaatataaagggagggctgttttgttaatagaatcaaaagtaacttcagcttcaattatgtaaactctttgtcatgtgaagatatttgaatcatgtcacacttcacataacccattttatttcccttaaaatagtttagttcatttcagtttttttttatggcttcct

SEQ ID NO: 43117 - DNA, 2157 bp, Homo sapiens
atggtgtgcaaataggctggacatagtagttctccagtttaactccttcggcagcgagcttgtcaagagtaggtgttttaatctcagatccgtggtaacccacatctctaaatccctgatcatccgctaggatgaaaatgagatggggctgggaggtggaagttgtgctgggctctagtttctctccagcttgagctagtaaggccccttcttcctcctcttctaaggcctggccccaggacaggtaaccataagtgaggaggcagaggatccagaatcctgccagcgcccccattgctagcatctttccaggacagacacaggcctgtggagaaggcggaggcggatgccccgcacagcccctgggagccattcactcaggtcccaggtgagactccacgcggagaaccacgcgccccgcgccgctgcgggcgcacacatgcacccaacagacggtgaagactctccacctggcaagaaatcctcctctcctctcagctgtcaccatgtccgacaactttaatcttccagaagtgatggcttaatggatgggactccggaagaacaaggagggctcgctcttctccagcacatttcactttctcctcctcctcccccctccctagagcagcttccaccaaggaaaaaaaaaagaaaaaagttaatatctccacccaaaagttctctggagaaaaaaaccaagcaaggaattgagaatcacagtggacaggaacttttcgtggccagagcgccctcgacgttggggagcgaggctgactctcctgggagtgctggtacggagggcggcgggatcggccgtctgtcctgcggtccccacacctggaaagaactgcgaagtggacgcgtcgcgtctggctctgatcagacagataaactgccgtagtggaccggcctcctgatcaccttctccactttcccagggctattttccccagtcctttcctaggcgtttgccaatctccccgacactcaccaggcggcgaagtgaggaagaagccgtttcctgatctccctccacctccgcagaaactccgggcagcaattccttttccccgctgctagggagcctgaaggccaaagccgggtccctagccccgcggccggtccgcgcggagcccgcttggtctttgcgtagttggcgcacccggcgcaggcgctgcaaactgcgtgcgttttctcagctaacttatttagctttggcactccgagttcttttgcctcctccctcttttctctccagtgaatcacagaacggtactttcttcctgagctcccccgggaagagggggtgggggaaaaggactgtttagaggctcgatctttcctttttcttttccgggaggtggatggccaaggcagaggaggctttgccagagagagagctgcgtgctgctccagcccagcgggattccgggggatccgcctgggctaccgcgtcccaagagtgtcgcctcctgcccatcaccccgctagagggaaaggacggcggcgcgaatggggaagggtaaagcgggcacttcttttcgtggggctgttggtgaagagccccgtctcccatccctaaagttgcgcttgcaaactttttctagcttctggagggagtgagagagaaggagcaggaataaaaacaaaatgcgtatgacactctttcctctttccaacttcctttgcaggttttcctttactagtccccccacccccatcattttcctattccttttgtccctacctttttttttttttttttcagtaacgatgacaaatttttaagttttatttcctctcccaatagctggcttttacagcctgattcttcgttaccctttccctatgtgaaaatactggaattgcccgctccctcttacctctcccctaacttacccacagggtgtctccagccaaaagcctggagaggaagagttatgcatttctccttcaagaaccccgaagccagtctgcattcctgcattaaagaagccagtgtttcccatccagtaattcagggagcttcatcattttttttccttctttcttttttaccatgtggaggaaaaccattgtaaaaacttatcttggttgtgaaaatactcttgattttactagagtcatagagttttaaagtcctgctcaaaggca

SEQ ID NO: 43118 - DNA, 968 bp, Homo sapiens
aaagtagagactatacatttacctatgttgtgagttggttcagtgaagatagcaagttaccggaagacaggagctagaaaaagagccctaagtcacactaccattggcagcatacctcgaaagagatgggcaaaatgggggcttctttttagactctaaaatgtaattcatagactgtcagtctttcctagctaattattaaaaatgaatcctgttgacatttgattatggcattctcccccccactgcccttccaccaaaaagatcagcttcaagtaaaggaaaaaaatttcaatgacctactaacctagttagattgttagagtcagactttggccacaaaatgacttcctgtgattcacagttggctctaagtaaatgttctaaaactcttggcagtagcttttaaaaaattacttttttttttttctttttgcaaatggtaagcagacctaccttgaaagttatgagtgagatgcatggaattctgctgttccctgtagaagaggcaaatagaaaagactgccagaaaacactgaagcaccggcaaagaatgatctaaagccctctttcaggaaatttgcatggttgccatcccacacctgagtgtagatgtgtgccttcactaacatcctgagtaggactatgttcttttaagtctgacaagtgaaaggcttgcccagaccttatctgattgtgtaatacttattaagcatgatcactttaacaagaaattgccttatacaattattcgcaggtaccagttcaatatcttttggattttttttacatgaactgactttatgtgaaataccccatttgtaagaagtccttacaaagtataaacaaccatttgtagttacaaaaattatgtacatggacttgaacagttcccaccaggataaaacaatagggacaagatttatccttttaagcaacaattagaaaaacaaagtatgtaaaacact

SEQ ID NO: 43119 - DNA, 542 bp, Homo sapiens
atatactaattgttctttcaaattccaaccacttcattttaaaaaataataagtttattaaacttatactttgcgagtaaagttcctatgcttgtgccaactggcagaaatcatgagaatgtgttaccaataggttgattgcacaatatttaagaatttattcccaacttcctatgttctgaccaacataaaatttttaaaaggtcagcatataggtttttgtattgaaactaaccttctcaaagtttgtgtctctgcatgttattgagtttaatgccagcactgaacttaacacataaatagaaaaaggacatctgccatttcgtagacttaccaataaaattctgttacaaattaactggttgctttgttaagtattttcttgtataaagaaaacttatcttataacctaacaaaacccaacccatgtatatctcatgtacttttcctttccaactggcaattaaactatttaaaatcaatttgttttgaaaggcattgtgacacttcttagcctgagaactgccatatcatagcaacta

SEQ ID NO: 43120 - DNA, 1365 bp, Homo sapiens
agcctcccaagtagctgggactacaggtgtgtgccactacacccagctaatttttttgtatttttagtagagacagggtttcgccatgttagccaggatagtcttgatctcctgaccttgtgatccacccgccttagcctccctaagtgctgagattacaggtatgagccaccatgcccaggtaatctttttgtatttttagtagagactggatttcactatgttggccaggatggtctctatctcttgaccttgggatctaccatgaaacttttaagtttgaggattactgctctaaataactacttttggtttaccaagaggccaccctcagaaacaacatgtccacttggacttctcaagtgcaatcactggaggacttctataattagatctgtattcatttccagtctcatacaactggggttatgaatttaagaaatatgtcttagccacaaaaagcattcaagtgtagaccttacttatttaattgttttacaaaaacaaacagaaaactaagaattgttgatgctgacagagaacatatttcaatgaacagagttactaaaggaaacagaatatattaaaataagtcaaattaacatcagtagagaagcataacagaatatcacattcataaaacaagaaaagaaaccaaaacttgctttgaggaaagaatactaaaatttaaaatgtgattgcttcaattaaaaataaatcatcattagatagatttagtactaggagaataagcacagggaaagactgaattagtaactcagaaaagcaagcctgggcaagttactagtctgtgccacatgataaaaaagtgcaaagtctgggaaaagtattcagaaatgtgacgactcgatccagaagttccagtgttcatctgggaaaggttccaaaggttcatctggtgtcaggtagggttaataacaaggcccacaaccaaagagagcttggtgaagtttcagaattccaaatgaagagataatacaaaaagtagtgaaagaagtataggtaacttacaaagaaatggaagccagattaatataaagtgggctcaaagtttgaaataagaattattttaaatgtgaagttttttattttgccaaaaaattcaaatatgatttcaaaataaagatattttcatgtgaaggacacattttgaacagaaagaagaaattttctatattggaaaatacagcatattacaagaaaatataaaagatttatctttatgcctttatcataattttaagctttatatactataagaaattcaggaattgggcaaatccacaattgcatcaggagctctgagcatattcccctgggctgtggtgtccttcccatgcttat

SEQ ID NO: 43121 - DNA, 575 bp, Homo sapiens
tggttcattttcttgggactggttggacagtgggtacagcccaaggagggcgagctgaagcaggccagggtgttgcctcaactgggaagcccaaggggttgggggatttccctttcctggctaagggaagtggtgacagactacctggaaaaacaggacactccccatccaaatactgagcttttcccaaggtcttaacatccggcagacaaggtgattctctcccgtgcctgacttgacaggtcccacacccacaaagccttgctcactgctagtgcagcagtttgagatcattctgtgaggctgcagcctggcggggggaggggtgtccgtaattgccgaggcttgagtagataaacaaacagccaggaagcttgaactgggcagagtccactgcagctcaacaaggcctactgcctctagactctacctctgtggacagggcatagctgaacaaaaggcagcagacaacttctgcagacttaaacgtccctgtctgacagctctgaagagaacagtggttctcccagcacggcgtttgagttctgagaatggacagactgcctcctgaaggg

SEQ ID NO: 43122 - DNA, 1102 bp, Homo sapiens
tgactaaagcgatacatgtatattttacccgctctcttgctagaactgctgaacttcctcgatgtgccatgaatcccatgtactcttgaaattgagggaaatagctctgataatgctttatttatattcctacttcatcaaatttttgtttcttttgcctagtaacccttatcccataccatataaataaatttcctggaaactatacctacaccttaagggggttcctcagtagtctgtttataacaaaacttctccaaaaatttgtacgtaacatttctcagttatttaccttcctgtttcttattaactaaatccaggactttttttttttctaccactccactgacgcttgtgtatcaagtttaggaacagcttccatcttgaccagtccaaagtccaatacttttacattagattacctgacctccaaggagcatcaatgtctccttcctgaaatactctatttgcatagcttccttgccacagcagtgcccttatatttttttcccttatctggctgttcaggaaatgaggtattgagtcggtcaattaaggtaacatgccaaagtgaaagtaacaatccagtctttatttgcttattgtgacagtgcaagcaaggagcaaatgagggaggcaccaactcccattgttacatttttttttcccaatggaattgcactgtgtgaagatctggtggattcagcacaaacagggaaaattgctttactgtgaaaaagtcctgaacagaaggccttttagtggacctgtggggcagagggagaaagttaggaaagagctaggagtagaaaaataccaagtaaagaggaagaaaagtacaagactctgataaagggtttttggcagaggcacctgagaagtgctttagcaaaggccttagatatgagggcctctgaaacatggtgcctgagttaacaaggcaaatatgtgtctgagcatggtttgccaagacagagaaagagtacctgagccctttactgcaaatgtttccaataaacatataatgcatacccaaacaccaagtttggtgtggggacgacagcttccaccaatgaggccagacagacaaagccttgccatt

SEQ ID NO: 43123 - DNA, 594 bp, Homo sapiens
tacgtacatatacacacacacacacatacacatacccacacactagcctgtgtaatatgcatatagacactagcttgagagcaaaattatcagatacctttacacaaacaaggattattttattaatactttccctaaaaatagataatattttcaaaccaaaaaatgtgtttttttttctactatacgtaaaaaataatgtttgcagttcaccctaactgatatctagggaaagcttttacacttaggcattaaagtttcaaaagtccaaaagcaaatgctgacaacagctctggaaatagagcataggtcaaagtctgagatctgttgcactgaaatagctcttaaaagcatcctcagtgatctacatgtttctaaagccaatatacacttcatagttttttcattcatcatggtagactaagctctgcttttgaataatccctttacttagaaaatacagaataattatcagctgctgtaaaaacaaaattttattaacatattcttctgaaaacgtaaaaatcctcagaaatcatgcagtctcaatttagtttaaacatgctaataatgtcataatctttagcttgctgt

SEQ ID NO: 43124 - DNA, 6509 bp, Homo sapiens
actagatcatactgcaatacactatacttttattactgcagcaaaaccaatttttacagcagaagtatcacgctgctagtatacactggaagtttagatttgctaagtgttttaagatagaaataagtccacaggttatttcctcactatattttctcctattcatctcagcattcatatgacagatgtgccattctatgttaaatttttctgatgactaccagtttcaacactaaaccacaaaaggaaaaaagatatagtgcagggaaaagcattgttgaagaataaatattctataatgaactgttcactccatgtatcaaaagcagaactgaaatgttacctagccatcatttgatcagttctaacaggttcaccttgcattctatctttaaaatccttaggctgggcgcagtggcttgcacctgcaatcctagcactttgggaggccgaggaaagaggattacttgagcccaggagcacaggagatcagcctgagggcaatatagtgagggcttgtctttcaaaaaaaaaaaaccttaaaaaaaaagtagccaagtggtggcacacgcctagcaggaggctcgcttgagcctaggaggtggaggttgcactgagccaagatcatgccactgcactccaggctaggcaacagagcaagaatgtttctaaataaataaatacataaaataaaatccttaagccaatcttcatttaccaaccaatttttaattcttttatttgttaccacattgtctctcctgaatatccaaaggctcaaagccttggtttgaatgcagctaaattcattgggtttgatctcaagtcaaacttagaaatactgtcatctcagccacaaatttcacactaaagtagatagaaaccactactaaatcactactttgtcttaaaatgaaagtataatagactgtaaggttataattgcttttttaagttaaactttgttttacatttacagaaaatttgcaaaaatggagtccccacacccccttcatccaatttcccctaccattaatatcttacaataccatggtatatctgtcacaataaagaaatcggtattggcactattacctaaattccacactttgttcagattcgctagttttccattaatgtcctttttctgctggagatcccagccaggataccacattacatttaatcattatgcatcattttctctggcataatagtttctcagacttttcttgtttttgagtagtgattaggtaatttgtaaaatgctaaccagcgatctcagctcaccataacttccgcctctcgggctcaagagattctcccacctcaacctcccgagtagccgggactacaggcgttcaccaccacaccaggctaatttttgtatttttagtagaaacggggtttcgccatgttagccaggctggtctccaactcctaacctcaagtgatccgcccgcctcggcctcccaaagtgctgggatcacagacgtgagccaccgcgttcggcccctttttctaatattgtctaaaataagtatcctaaacaggaaataccaaaaaaatccccctcgctttcgtgacctacaccggtaagcgtcaggatctttcgctatgcgagaaccttttggctctcgtatgtgcgcatgcgtctggatccggagccaggtgacccgctcagacgtggaccatgtgcgggggaggggggaaaggagccgcgaagggggtggtagacggaacaggtggagccgcggcggggctaggcggggcggggagtgaaacagcataggctccgcccctcgcggcgcttcccccggaatagcgtcatcagttctataagagagcgtgtgccgaaggcctcggcctttcacattcgggaagcgtcgggattaggtgaaagtacgtagttgtctttcgtaagttaaaatgataattgggccgaaacttactgccttacctaaaaggcagcgcagtcaggatattggtaggtcgggggcggctttggaaacccttaagtttacaagcatgcgcggacttgagtgctcattaggtcgccgggcgtccacgtgcagccctggaccctgaaccccggcgtgcgtgggccgtgggccctcggggaaaggttccgtgcactcggggactccggtgaagcctgttcagccgtctgtgtcatgtggccatcttgagtctactctgtcgctcttgtgccctagcaccccgagaaccgtcagtttgagccagatggtgagtaataacctgtagcagtttggttgctggttaattctggattgtgaatctccatgtatctttgggacctgtcagccgtggcagtctcccttcctagccatggaagagcatatccttgtttattggcaaagctgtcaccatttaattggtatcagattctgacttgcacaagtaacattcactgttaaaaacctagagggtgccgggttattgggcaaaatttctaaaccgttgttcaatgtttctaggaagctgagctgaacacattacgatggatgatggaaacataaggtacatttcttttttgatatttctgagttaatctgaaacgccttagcggcaggacgttggaaagctaaagttggcccgttttgctggcttttgtagtttgagttaacaaccaactgaattagctgataagatctcaaaacagtgaggtaagtacacagctcggagttttataatgctttttttctcttgcagactatcaagaaatccaagtggtaatgggcgaagtttattcagcatccggcaatggacttatcgtagttggggaaacgggtgttccgaataatatcctggaagttatcaggacacctattttaaatataggcctgaattttgtaaagtaatatttaaggtggtccgtgataattaaataaaatgcttaattcatgtggctactcattgttccttgactgagtgattaatagacggaaaggtagttaatagcataatacctcctatttagtgttacacgctcatgtggaagtagtgtgagtacagttctaaggtaattgcagcctttgtgaaaaatgtaaaatataaaaattaccaggctacccccaagggagacagcagactctttttaaaccatacaaaaatttaaggcagttatacaaggtggaaaattatgtatttatttacacaaatatgcacagaacacttgtatctttcaaaagtcacacttaagacatagtaaaagcatgttgtatgaaccatgtattcttaaggattgagcaaactgcaggctgcttgctgccttttaggtttgctagtccctgatctacttgaaacagatgttgcttgccccaacactagtttaattataagggcagcctgtgagaaagtttcaatagacatttttctcacctatattgcacgtttttctgaagcccttgtgcaagtgtgtgtgccatgtgtagttctatttacatataaacgctactttaaaagtttatcaaaatcatgagtttttacaaaagtttttaatgctcttctgcattatatgcagcattgcaaatctgcaaagtagtaaaactataaagcacctttaggtttgcaccagttattacagaaatggggatttgtgaaaaggatgtaatttgatgtagaagggcaaagtcctttaatgactggcattcaagaggattacttaaaacaatttgtaagttcatgctaacctcttccctatatttatactactgggacctggggaaggatccatgacatggaagtatcttgagtgtgccttttaaatttgagcattactgctaagaatgttctgtaaaggtgcatagttaagcagctatcccttaactcttggagaaatagccatagggaaaccaatcatttaggtaggagaaccatggggaaaaaaatcagcattttttctggagtttggaatcagtttcaccaactggtctcactttgaggcaagcctgttttcccccatttgaaaacaagggctactaccataagatttactggccttttgcaaattgtcagtgatgtgcaaagctgcctaatgcagtgcctggcatatgttataactgctgtatgtattagaacttttcaatgtgtaggccaggaaagcattttgactagtatattttaagattggattgtatcaggttgggcttgggaaaacctgcaggtataagtcagttacagggaagtgtcagtgggtggcactcttacatcatggtcggggaacgtggactatgatgaggtgcttgttaaaagcaaatatagtagatatgttaatgtgttggataaaataggttgtatgtccagctggcatttagttaccagaaatcctttcaaattttgctagtttatacgctgtaggtagaaagtatttttatcttatggtttctgtagcacttggtactcaacaaggatacttgtttccaaatatcagatcactttgagaatatattgtgacaggcagatgtccttgaggctttactactcctattcaggcctaaaagtttatagtggaattctttaaccactgatttcctcacttgacaaaggctacagagaatatgaagatttcttgtcaagtcttttgaaaagacctaagcataaatatgccactcatgagtgtagtaaagggtaccgcatttatgtcaaatgtgggtatttaatatgatttcagacaccactgattcaattaaaaggggttctcagttcaaatgtaaaaatgatcttttgtaaaatcagcatagaatgattttgagaaataggtaggggatagatgaggcttagaataagtcactccagtgaaattagggtagaaaatgttcatttaaggattatcacttccactacactgaggcctctgaaaatgttcacaaatttctcaaaagcagcagggggtacacaattttttaccacaacacaaagcaaaaacagatcttgccatttgttgtcatctctgctgagtgctaatagtgggggttcaaagttttccatttgtttaaatgctgctttgaagtttccatgaagaattacagtttggtgacactttttatccaaggtacaaaggctgagactttggtataaacaccaggagaatccttgactccacagccatacccccaggaggtcaccccatacaccacccagctctctccgggccgttcacacatgagtggtcctccgctgtctccctggcagctgtccacgcgtttgtgttcatggaggtttccagcacaaagcattctccctgtaaaccgacccttataacgttcttcacaaaaccttttaggaagtaagggaatggctgcttgttgtagtgttcttgaataggctcgtcctactcagaccaaacatctgattagtggcattccagataaccatcgcaacatttaacagttactgagcatgtaatagttatgaaaataaaatccctgttgtggcattagtgtagtttaaaatgagcaatgactaactggtatgtactattgttagctgccttttttaatgttgacacaatcttaaccttcacaaatttctcagtactgaattgtctgaggaataatgaataacatttatggatttgtagagtaaggtgacctaagaaagcatatttgtgcaggctttcgtatttgaattctgtatattaaaaagcatagaatgcattaatgctggtttcgcattagcacatcaattcatatctacttcactgaattaaactgagttctcagtttatgctaaagttctcattagaaccaacaatacctccagaatataagtctcaattacatgcatgcatttcacactaagcaaaatttctccaaataagtctgaatccatttaagatcttattgcccattgcacacccaaatatatggataataccagacacaaaaaggtgccctgctttttttgattatgccttacctgtgtcaccccatcctgttatgtaacagttggatgctgttttctgtggcctctctctccagagtggtaaacaggctggcaaaacatggctgctgaatctggcacattgctcttctggtccttgtaatctaaccagggctatgtcataatcactgcggtcgggtcgatactcccgatgaatcacaatctgttgaactccaatttcttcctcaaactcctctggtaccagagtatgataatctccaaccctaacagcatagctcctagtgctgttgccatacctgagaggcagagagtactaatgagagacttgcttcagatactgaaaattattgtcaagaaggaagactaatgaagatacaagcctttcttccaaatcatcagccccttttgtaaattcaacctttctttccatttatctgacccaccattcctgatcctctactgcaaacccattgtcataacctcatcttcatttcattatgtaatctgttctccaagaaggagcaaatgtggaggatgagtggaaaataaagactaatcattaatctgtcatttcccaaatgaaa

SEQ ID NO: 43125 - DNA, 1670 bp, Homo sapiens
ctgggactacaggcgtacgccatcacgcctggctgatttttgtatttttattagagacagggtttcaccgtgttagccaagatagtcttgatctcctgacctcgtgattcacctgccttggcctcccaaagtgctgggattacaggcatgagccaccgcgcctggcctgggctcttttttaataaccagttctcctggaaactaatgccgcaccctgggcattaatctattcatgatggatccgccttcgtgacccaaacacctgttaggccccgcctccagcactgggatcaaatttcaacacgaggtttgggagggcaaatagccaaaccataataggcacctactaagttcagagaaatatctagagtccaggcagatcaagtcaagacgcagggatcaggaaacaaggttgcagaagtcaaggaacaagccaaagagctctgccaataaatccaggatgaggtctccgtaaattcgtgtcaatttccatggtaactatccccaggaagcttgccatttggagcaggatttctcaaatagtggcctctagatttacagcgtcacaattttgctgggtaaagggagaatagtgaagcatgaaaaaaatgcagattctagtgtcgcaacccagacagactgaatcagaatccctgaggattctgaatttccaagaaaataaagccactcacttcccattgggattcttctgcagccttttgagaaccacaggtttatagggatctttcagtgactttgttttggaaaatgaaaaaaaaaaatttgaaaaagcagctgctggagtttggacaaaagctcaaatttaaaaagaattcccataacctcttcattagatttctctatcggcaccacggcagtcatcgtttacgttaccgacactgaacttgtgaaataaagtgatgctggaaacgagtctggaagcctggccctctgcaccctcctcccagtcagaagtacctttttgtgaagtgacacaatgtcctggtgagaccggcccttcctggaggcaaggacttatgttttgcatatctctgtatgccccgcctctaacccatggctagaatatcgcagaggctcaatcaataatcagttagctctgctttacaacccagcccaaaattcagtggcttaaaacagctgtcttgcttttgctcaggagctgtgagccagctggcgtgggttgatctacacttggttcagctgaggttagctgtcagccacaggttgggtccatctctgctccacgtgtcttgcattgcccttgaactagcaggccagctagggcatgttcttctcctggaaatggcagaaacccaagagggaaaagtaaaatacattgtagcctctgaaagtttatgcacagaaccagcaaaccatcacttttgcccccattcacttaggcagaggcagttacacggctaagcctgatgttatgagtaggggcagtttacatcttgagtggaaggaactgcaaatttacgtggtagaaattatggatttaaggagggatgaaaaattggggacaatagttcaatctaccactgctagtaaatttatgatcaaaagcaactttttgtatttgctggagggcagaattcggaaaatggggatgcaggacagtttcaaggtgacagtgaattaccagcatc

SEQ ID NO: 43126 - DNA, 1466 bp, Homo sapiens
ccctaaagggaagaagccaaaaaatgcatactatagtaaaatgggaaacatttcaagggacagtaaggtgtggggaagagtgggcagatgttgtggctgttacctgcgtgaaggtaaataaaatattaacaataacaagcacttctacaccgctatgtgcaaggtgctatttatcctttcaatcacagctctgtgaggtagacacttatgactcccattttacagatgacaaaactgaggctcacgaaggtggttaactagccaaggccactcgtctaggaagtgagaggccaaggttcaatcctaggcaatctggcttaagtttgtgttctgttaaaaaaaaaaaaattaaaggttatctggcaattttttaaacgtcaggactgtcatctgtggaatcaattgaaaagggaatcaacacttcagaaactgtaatacaccaagggaacctgctatcctgggaaagagagataaaggagaagtcagctgactgtcctccttcagactagctcagaccaccccaacctgcgagggccctggagacccctgtggcgcaacagatcccttactgggtcccttccaagtggcgtcacatagcaagcgtccagaaggaggcgggacttccgggccaagcgagccaattccggccgcgccggaagtctctactgaggaaagctatgaggatactctgttcgtaagctcccggtgaattttgttccacagactcggaagaaaggttggataagagttcactggagattgacaagtactcgggatagtgaaaagccggagttggaacatggatagccgcttgcaggagatccgggagcggcagaagttacggcgacagctcctcgcgcagcaggtccgcggccctggtgtcccctgtgggagggatcgagaatgcgagtgcgcggccgcctcctccctccacaccccgcctttttctgtcccttctctacctgccgctgttaaggcctttctggtcctgcgatcttgatccctggttctgcctttgtagttctcaattttcgcggtgtcccgaatgtttttccagttccttccgcggtctttgtggtgctaaaccgaatgccaggattagcctttaagctttgtggaactcccaccgagtgtctggcatgttcacgccaggatgagtgtcatgttatcccctacatttctcttcactattaaatggtcatctatttctttcttttcttcgtcgtcagccccaaattcttgagattgtggtttcattatgaaatacgtttacagtattttctttgacatctttctgaagacaacactggaagtagcctgagtgtaaattttagattctgcatcttatatagagtatccttgtcacatccacagttaatatttgaaatcttactctgtgttagtcacaataatctcctgaaacaggtattattaccttcacttatcaagtaatgaaaaaggctcca

SEQ ID NO: 43127 - DNA, 675 bp, Homo sapiens
tggaggaggaattcaccttgggaggctgaggcgggaggactgcttgagcccaggagtttgtgaccagcgtgggaaacatggtgaaaccacatctctacaaaaaattagccaggcacatgcctgtagtcccagatactcaggaggccaaggcaggaggatcacttgaactcaggaggttgaggctgcagtgagtcatgatcttgccactgcactccagcctgggcaacaaactgaccccctgtctcaaaaaacaacaacaaaaaaagtgatgagaatattactttcccaaacaaccatttatgaacagttctgttagaaaattatatttggtggactttccctaaaacttctctttttggtacaagtactcgcttgtcttttgaggccaaaggtagattgagatcatacctgctttcattccacactagtgattcataatggcaaactccctaagttctttttctaacatgtattgtttccaagaacgatatcctgcatatgcatttgttttttggacacaagtctagatgattcttaattattctcagtctactaccattatgttagacttttagaagtgaaccttctaggaaagttgccatttggtaacctcaaaagatgtgccttcaaaaagtgagtgaactcatttcttttttttaaataatggttccttaa

SEQ ID NO: 43128 - DNA, 1192 bp, Homo sapiens
cacctcaggctgttaagttacaggacacagaggcagtaaagctgcaaatgggttggacagcttatcataagggcaaaaggaaattgcttaaaaatctaccatctctgccataagacaacagttcagtttcctgtcatcccttcgaactctgccatgctcagcaactactagtgtccattggaaaatcaatgctttgaaaagtgaataacacatccaaagtctttcctaccacactgttgggattcttcttataatttataatgtactttgaaagttctttaccatagcatttctttttatcagtttgtttcttttgctttgtacaaaagatcactctaactttctaaggactcaaaacaatgatgctgtttgatttatgactaattacccagtgtcctcattagcaaaaaaaatcaattggtcattcagcacttatcttctggccaataaattaattaggcaataatgtataagttgtaaaaagaatgacggttgccttactttggaattttttccagcatggtcttcagttcttcacatatgagcttgacaagtccattctttatgttactatatgaaacatcaatcatgaagataaaggctggtgggttgggaggcttactcttctataggaaagcaaacacatcacataaataaagtaaatacattgcataatcaaatgtcaatactcattagaaactcttgaaagtcatcagatgtttcatttaatatttaggatataccatctgtggaattaaatcatttttccagaatatctagagcatctggtttcagatgctattaaaaagataaaagaagttgtttattttccaggctatgacctgggttagtattgaattagacactattacgacatctagcacagaaggttcacttttgcaaagctttattattacagttgctgaagggaaagtacagaatcatggccagacttgcttgtaacactctgccttacaggtcgaaatatgtttggcacactaaaaaattatgctaaaaaagaatacatataatagtgtttgtttttgaaactgtaataaaacttcattaacttggatgtcactattttagactctcttcttctatcaactctttccattttaaagatatgaaattgtgtatgaaaatataactgtatacttttgaaaactgtactatatttttaagtactgac

SEQ ID NO: 43129 - DNA, 1868 bp, Homo sapiens
aattacctagagtggtgctttgcacactttagtgtgcctaggaatcatctgaagagcttgttgaaacacagattccagggccttagccttagagattctgattctgtaggtttgggctgaggcctgagaacatgaatttttaataagctcccagatgatgctgatggtgctgtcctgcgagcacattttgagaagtgttatccagagagtaaatgccaatggagaaaggaaaggtccaaagactaagactaagtctttggaaaggtccaaagactaagccttaggacacttctaacactaggtagtcagagagatgaggagacattaacaaaggagacacagcctccagtggggtaggcagagatataagcaaatgggtggaatcccagaagcaaaatgtaaaagtttcatttcaaggagaacggagtaaacagatgtgtcaaattgctgctgatgtcaaatcacatgaaagctgagaattgaccattagatttggtaacaggaagtcattggtaattggactagcacagtattgtggggttgtggtgatgaaatctaaactggaataggatcaggagagagtgggaggagattaagtgaaaacagcagatataggcaactctttgggagatttcttgctttaaaagaaagccaggagatgggtggaaactgaatccaggtttggggagaggccaaggaaagcttcttttattaatgatgggaggcatcataggatatttatattctgacgagaatgatctagacacagaaaaatttaagttcgttttcaaagaagtgcagatgatgcaagagaaaggggatgtgacagttaattttatgtgtcaacttggctaggccatttttgggacaaacaccagtctaagtctaaatggtgctatgaaagtattttaaaagtattttttaagatctaattaacatttaaacaggcaggctttgagtaaagcagattactttccataatgtggctgggcttaatctaatcagcggacagccttaggagaaaaaggttccctgagaaagaggaaaattctgcttccagatgcctttagacttgagctgcaatatcaactcttccctgggtctccagcctgctgtcctaactttcccattcagtccccataatgaagtaaaaccattacttaaaataaatctccctccttctttcttttaagccataaaagtaatgactggcaatatgattatcaataaaggcactaagaattgtcaaaatttaatttctaacatcttacagcagtatacagtattacaaatcttcaactttaaattcaaatatagaataagtgacagattacaaaaatagccaaaattatctacacttccctgtatcaatgctcttttcaatgttgccttgcccctcctcccatcaagaggcaaagtccatttttgaatctgaggcagtcttgggacttgctttggccaagaaaatgtagcagaagtagcgatgtgccagttccaagcctaagcttcaaaaggccacgtacactcctaccttcccttttggatgtctgccaccccatgaacaaacccagtataccgtacttgacaatgtggcctggtcattcctcatcaacagatgggtaccaaacacaagacacacaattgacactatctatgatgggcagagtggtggccctcagaaagatatgtccatgtcctaatctctgaaatctgtgaatattactgatatgggaggcgggcagggaagtgctgggtagagaaaggtgggtccctggttagggctctacccccatggacctaggtgaggacaggcactcatccttccgtgcccaaatgttgcattttccaaaaccaccctggcccgccat

SEQ ID NO: 43130 - DNA, 3153 bp, Homo sapiens
tggtttcattgaatgtcaagtatatattttaatttacatttcactgaatgtcagagaagggcagattcaccataggaaagaattcaataaagaattactaccagatgattaataaaacatgaaaatttagcctcaatttaatcctaatcctctgcagagttgactcagttttctgtggcctgttcaacttcaaacactccccatattcaagtttgcaataaattgctcaagaaatgagatgtatgctgaagtttgtatgcggaattaagatgccaagtttttcaagatttgattgaaacaaaatcagaattttgaatacctagcccatagagaaaaaatgaaagttccaccaaatcctagcatcgttctccacactaaataaaattgaagaaaaaacaactacttctcttatttttattgctccttccttcaacttttgttgaaatcaatttcttagtagattcacacatatcagcttcaatttgggaagatgggtccactgttccctcaaattcactgtttcttcatcagaatacatcacttaaacttgattgattgaatttttattttataattaaaaacactgatttttaggttgcagattttatttaatatcctacccagtagtaactctatgtagataactttagcactgcttgcaagtttaagacatttattcttcctcagtcaaatcaaaaagacaaataactaggtatgatttttaaattttataaaacattatatttaaaaagcagtattttaaagataaaaattttacatgttaaattcaaatcaacatagtaacttatttatatcttgtttttatttgataatttagatacagtaaaattaaaatatttctttggtatactaagtacaaatgacacagataaaatgctagaatccacaaagaagagtcatatgccatctatgctctttgacagcctctgtcatcagactgatgtgattcacctgcacaatcacggtgcactttacccttgcattgcgctacattcacagaagcatgtcccatgagggcaaggcagcatggtaaccaggaaggctcagcctgaaatactatacttttccctgactttttcactttttaaccccaattctaaccttcaatccagtatgcaagttgtagcaagtgaacagtagaagagagggagtaaaatctgtcagtacttccctaggaatcaccacaaaagcagattctttaagctatcaagagattcctgagctgtcatgagtaactagattgagctcgaaggacagacaagctataaacagtggacttttcagatccaatggaaatgatattgacaaatgctaaggtgttgagtccatgggccctagtgcactgtgtaaggtactctgcatgtattaatcattaaaatcctcacaaccacatattattgttaaaatcgtcatgaggaaaccgaggcacacagaggttaggtaacttatctagctagtaattgtctgggccaagattagcaaacatgtcctgactctagagtcctctgctcttcactgggccagaccctgtgctgggctcacaatcacaaagttagggcctgcttgatggtaaagtccatggtttactcactcctaagcaacctgatcaagtgaaataaatggcaataaaccaaaaagatcaatcaattccaagctaataccagtgaccaaaacattcttctaaacttgaaaccagctgttcaatctttgcacttctttctttttaaaaaaaatatctgagatgcctggaagtttacaacaattttttttgccttgagacagggtctccctctgtcacccagcctggaatataatagcatgaacacagctcactgcagccttgacctcctgggctcaagcaatcctcccacctcagcctccaaagtagctgggaccacaggtgcatgccaccatgcttggctaattttctatttttttttgtagagatggggtctcatcatgttgcccaggctgtctcgaactcctgggctcaggcgatcctctcgtgtcagcctcccaaagtgttgggattacagatgtgagccaccacacctggcaaccatgaatttttctaggtcttctcccctttacttctggactgagaattctatattctcattttacaagtgagtctgtgagccaccacacccggcaacaatgaatttttccagatcttctcccctttacttctggactgagaattctatattctcattttacaagtgaaaatgaggacaggcatggtcaaggaacttcaccagtgtccacagttagtaaactgcttgaaccagaagaggcattttggttctccgtctttttgctcttcctctcttgcctttctatcactcttttgagactcagggcagtagtttcaggtcccaagtaagaccctttgacttcttgctccaagcttaaaccacaatcacgcttaatgacctaccctctgcatcccatagctaccatttcaaccggcaaatgtcatgttatcatgacaaacaagagccagccagtgccaagctcacaaatgccctgtaggagaattaacctgatgactttaaaaaatcccagagggagttttcctattatggaggactataggcttcatgaaaggccatgactaaaaggcttcaccattaggaggatctacagtcacatctagggggtactgcccatgcctccccacccccaaaccttgctacctgggaaggaacctgagaaatgaagcctctgggtaatccttggagaaactccaaagcaaacactgcctgcggcttggcactggcttggcacaggttctcagcagctacacctcaccggataaacaataatgggatttctaacagggaaggtgtgatactggcttctttcccagggattagtccctagtgggctgcaggctctaaatatttcatacatcttggcttctccaggcctgcttccaacttttcccttcctcaatttattataaacacaaacacaagatttatttcctgtgttgtttttactacagctctgccttttgataatccctcactggcatctgtgtgccttccacatcaagctcacagacccattggcgacaatccgatttaattttaaaatacttattaagcacccattggcactgagctc

SEQ ID NO: 43131 - DNA, 1825 bp, Homo sapiens
attgttctgagaattaaatgaaccaatggatatgacggtttttaaaacagctgtttcatcttccctggccatagcccctgctctcctttcttaagcatttttattctaacaaagcatatgcaacataattacaagcacatttatattttcattttaaaaacattattttggacaaaagtaggcaattcacaacagtagcattaaaatattttcaacttaaataattacatgcactacgagaagtcgaaaatattcttttttttttggtctttttttttctttttttaaatttgcctcacagctctccaaaaatattccccctttaaaaaaataagtaggatagcagcaattttcatgaaaacccctatagacatgtctagagaattaaaaaaaaaagctctgatatatgcaagcagaactttatacatcaatattactgtgctctcccttttgtttgggaatcaactctatggcagtgattcaaatcattctgtggcattctcaaatcattctcattattattcaacatacatttaaggtgcctttgagccatttgagagaagagacaaccatgtaaacaaatcattacaatgtcttgggatgactgttacaatatgcagagagactacctaactcttcctgggggaattgagaagagttcaaagaaggaggactgcttgagctgaatcttgaaggacaagcaggagttttcttcatatagaagacaggataagggattccagttagaaagcaaagcttgagcaaagacatgagagaggatggcacgaccaggacaggggaaaggcttggtgtggagaggctgggagggaaagtagccagagtggaagctgtccaggttggctggggtcagactgcaaagtcctatgtgtcacttgcacttcacccccagggcaaagggaagtcagtatcactgatatctgcaaagtcatagtcttcccccagccatgttattggcattttcaaaagtactcaaacacaaacagaatcaggtcctttatagagcaatatgagaattttaataggaaaggaacaccgtgcaatgagaatgaactgttcttaagacaccccccaccaaaaaaaatctaagatcacaagttggtctctcacacagcggcagataccatggaccagtaaacacaacaattccaatccctttctgacttttctattaatattaatataaggtcttgaggtggaaaagtgaaaattcctagactgccttacaatttgttttgccatatgctctaaattcagcaaagcagcacacctctgggagactctggccagcctggtggcagagatgattctcctgggagagaatggtggtgacttctggtggaatggtcctgcatgggaatgttcattttcatggaccacatactcccaagtctggttctctgcctttttctgatgttttgtttgcttcctgataccctttaacaaatccctttccactaaaggggactgttatcagcaaagtaacactgaccaaaccacatcacagaatagcatgccttgaatttggtcctggacctgacaaactaaaaccaaaattaaaagccatttgttggggggggaaaatgtttatctaaaataaacaaagataagctccctattatatgggtagaattgtaatgaccatggtccctaaagcaccatgcttgatccacctatataagctcactattaggagccctatcaccaccccacagcccctgttctaggttcaggacattaatactttttttttttttgagacagaatctcgctcagtctcccaggctggagtgcaatggtgcaatct

SEQ ID NO: 43132 - DNA, 2564 bp, Homo sapiens
caagcatattcttccttttgttcttttatttgctacaatttaagataagagatcagtgatacctgctaagacttagaatctgtctatattcaagaaataacatttcaaattaaaaatttgaagcctaaaatttgtgatttgattttgtttccatattaaactataagtttccaaaataaaagcaaccatgtaaaaatattatgagatcatttccttctcctgggaaggggagaactgaaaaagaggagagaggcaggcaaaggccttctggtccactttgtttctgacaacccctttttcctcctcccacttagcagagagagacgtggcagcctgagcgctggtcaagctcatccaaccaagagcacttaggaagtcggcacgaacacacctaagtagcagcctgttgctgagtgacagaaaagagaggctgagatggtcactccaaagaacaggaagcagccagttccctctgaactggtcctcagaggaatcagcttcctcacgcaacccagtttgccacgtcaaacttcctcacacagagcaccaagttaaagaaacctgactcagcttcaagcggcgacacggcagaaagccacttggtataagcaggcctaggatcaaaatctggggagccccaaccccagaacggccccctggctcactgtcacccagcaactctagccaaggtgcacttctaaccctggaacaagttcgtatttggccagatcagtttcactattcggatgtcccgaggcttcaagatatagttgccatttttaccatgaatatttctaacatttccttccttcaaaaaaggaaattaagttgataaggagatgagaaaaccgctggcaatgacactcgaatggtggccactgaggatcctaacaaggcagttcctgcatcccaaggcaaaaggtgggggcgggtaaaaaatgcccacgcccacctcctgctcccccatcccgccggccccactattaaactgcactagaaggctaaagaacaaagaatgagttctcctcccgccgccactgcctcaggtgagcacccggcctcccgccgcgtccccgggccgggcgccgcaacccgctccgctgtgcctgggcagggctgtcccgcatgaaggcgtccgcgggtgggaggctttacctgttcccgctcccgcaccccgcgggcttccgagcgctggcggctctgcgcctagtgccggcagccctcggtggccgggctcccgctgcggtcgcttctcccgccgcgcctcttccccggccggcgtccccttagcctggactcacgctcggagttgcagctgggctgggaactgccacgtcaaaccctttctcggctgcgcgcccccagcgccgggcttggaccagccgccgcgctcccgcctgcgcacgcgcacagccaccggccgccgcggggcggggccaccgggctgagcctgcgagcggccgagcgacctcccccttttcgctttttccctttttccggttttttgttttttggttttctttttcccgtcttttctttcccctccccctacaggtcaaagcctttaacgtcgtggctaaatcagaaccgtattttctcggcgcagccccgcaggaaggaggggagcgcgttcattcattcttccatcaacaggttgcagtttcagctcttcattcattacgtattacttaaataactaatagttcaggtactgcactaccgttacatacgggaaagtacacgatctggacctaggggagattaccgtttaaaggcgaatctggcacgtgtacacgcacatttgatgacgtacccgtgcaatgcactacagaggaaggaacgcccaaagcagcctggcaacgtgtaacgcgggaggagtggggggtgggggagatgtcccaaaggaaaagtgtgggaagtggggtttccattgatattggggttgttagcgttgtgtatactccttcttccgcatattccttgtttgtgaagtaggatggctgatcccagccccaaacaggaatctctgcatggaaaagcacccagcgtttagctcaccgtcctgtgagaaacagctcagaaataaaggcaacctatatgagatctggagcttacctctctatctcaccctaaaatcaggaccatctggctggtttcctatcatctttcactgctaaatagaaagacattcagccactcccaggtttggtatagctaccactttgctcaaacttacaaagtaaaaaccagcccggtgttgttgtttttaacatgcactttcttcccggctacaagaaagccacttgacaaatacctttactgatgaactgcctaggtaaaaacgtacatggggatgttgctactcccgaaatgctacatgaattgtgcaggaattttaagtcattttagcagtaaagatatatggtccatttatcccactcttaaaagtttttaaggcatggggcaaggcacagtggctcacacctgttatcccagcactttgggaggccaagcagggaggattgcttgaggccaggaggcagtgagctatgatcacaccactg

SEQ ID NO: 43133 - DNA, 511 bp, Homo sapiens
ctctcgtactaagagggtcatgtagatttttctagaagtatcatttatttgaatagctttgaccatttagatacatttaaagtattttatttattataaggaaagtgaatggctttttaaaggggattcttggctatctttacaaaaaataattttggtaaaaatagtacacagtgagattgcaggaatcaagaagtgttagtcatgccttgtttaccttgcatttctcttgcttcacttgcactttctgctttcatgttattgaaaaacacagggctttctggccgttaagttctcagggtccattcttgattctacgttggttctctttatattcctttcttccctgctgtacaggccttagggctgtagcctcctttacaatcctccttcattagagaagatggtgacactgcctggccctagatggtgacatcttctctattgcttgctggcctttggctaaatctgggtatgtaacagggaagatagggtctctccacctccccac

SEQ ID NO: 43134 - DNA, 541 bp, Homo sapiens
taataaagtaaacaaaaaaataaattagaactctttgtctctcttttctatgtctttattctgggaactcttatttattttttttactcatattaattgggcaccaatcattcatcaggagctattagacttggggatagaattctgaataagtcagcaatgactcctagtctcacagggttaataacctagcataggattcagacaacttaagagacctttagactgagagggaaagtacagagtgatagtagcacgtggaaggaacacctaacctggacaccaggaaggtcgggaaagtcctcctggagaatgtgatctctaatctgaggccggaggatgaggagaaattattaggtgatttatgtgtggacaaggactgaatagcttggagaaatgcctaagcaggtgaaacaaaaaagcaattttgagaaaagaacagtacttctgtgtgtctgaatcatcaaattcaaggtaggggtagtaagcaacaaggtggaagaagtaggtagtgggaggcagaaagtgtttccatgtaaaa

SEQ ID NO: 43135 - DNA, 2075 bp, Homo sapiens
agagaattcaaccatggtaatctcttcaatgaataatagtgtcagagttttgtgattcaatagatgaaaatccagctttttaatttttgaattcttcttctgtagctttgctgttagaaatagaaacaatttggtcaaaaccaaaacgtggtttcatgctatgtaaatacatgtgcatatatgaatgtttgtcccttattatatgtgacttccaggcagcaatgctaatacaatatttcaatctgtaagaacgattttgtgttactaaataggcatcatcatttatgcttttgaaaagagattttttattatgccatgagtcatttctctagtccattctgagacactgataaaaaagatttgtgatagaaatactttggtataatgtaaggagaataacatgattgcaaaatattggaaaaatagctaaatatatagtagcaggccctatatactaaatttttacattctgtcactttctaaattcaaagaacaaaaaagttagaagtacaaactgaattggcagttttcccatcaaattgttgagttaggtagaagagaaagtaggtgaagagtgcctgctgcatgagcttacctttagcaatccttcccattcagctttttatacaaattctttgccatacaaattccacattataaaaactttctagaaactgaaagttctttttttaaactttaaaaaatccattttttaaacaatgtttgccaacatataattccaaactgaaaccagatgtcttaatgtttgctgaaaaaagttattttatcatttcacatgtacccaggtgtgtatatttatataatttgtttatatgtaatagattatggtatatgaaaaacattaaacaaacctacagatgtgtttggctaagtggttcatccaataggtaatgtattttacacattatttcatagtattctgttcgttggttgttgagactatgttcaaatagaaatggaaaggggtttatcactagaaacaggtttgatttccttaaaaggcagttgtttcttttttcctttgcttctctggagaattggctgcaaactgggaatagttctcctctgactcatttgcagagcagcactagagcatatagagttcagataaaattataatgaaacattctaatttgatgatgtggaacaagagagtagtttctaaaagaaaattttacagattgcgtttacttaaatctgctttgcagataaagtaagttgttccttaaaaacaacttagtccaaacatcgggataagattttcatttgcctttcaaactcaatattgctagtttgccagaagacatgacatacacagttatattaggtagcaataatttaattcttcatcaagtattttgaaggtaatgcaatgactattttagatttccaagtccatcaaaatacagattaaaaagttttaaaatgtttttaaaaatattattaattgtaccaaccagacagaatatgctaaaattaggactattatgaaactaaatatacattttaaaaattctatggcagcaccagcagaaatgttttgccatttttagcatggtgttcctaatgaatatatgctttgaatacagacactgattcagtcatgtgcacaagtattcaaaaatactcattgaatatttaatcaaaaaggcttgcttattgaatacttacataatatgagggagagcaaatattaggcattaatatgacaggaagcgctagtcgatcattgcactcattcttctgagcctggattgagcctccctgtctctcaagcttgtttccttgtcagtcatttggaattgatgagaattggactttgagctgaaacctctttgtagtcactgtacttagccatactcccctctcataatttggctactttttgcataccgaagtaattgactgaaaaaataaaagtttattcatctaggtatcaacttttaaagctgttttgatgtcagtaaacatcagttaagggcataccataaatcaaactgggctctagggatgccaggatgaatattataaagttcttctcttcaaaaagctta

SEQ ID NO: 43136 - DNA, 1311 bp, Homo sapiens
actcctgagctccagtccactctcccaactcagtaggaaaagtgagtgacagattttctaaattagagcccagacttcgaaaggtcacagctaagaaagcacccataggcatttgccttgccatttagtaaaatttctgaccatgatacagtgatggggcaatctaagaaggaaaggggactggatttgtgtgggtttgcagaggttaaaagagcagtgtcttctgggagtccctggtggaggagtgatgggtcttttttctttttaaagaactttaagtatatactgacttgcaatgggtagagcaatttttaaaatttcaaatgaatggcataactcccttgtggaggcctctcttttcaaagttaaaaacaaatttttgcagaagcaagctcagactgatttttgagccctcctgcattttccaggtggaaattccttggcctttgaaccctgactaaaacgtcagagattataaatctaactgctaagtattatgaaatatagcgtggcaaaacaaaaacgaaaacaaaacagaacgagaaaatccacagaacgagaggagtgaggagaccactgtcttagcctctatgtagttgagcaagtccaggagtctttccaggtcagttaaaaggagggacacgaatcattagttaacctcaaggggcccttgcagctcctaaattgtatactcacataaacacaacactctgtctctggtgggttaccactgttttatgatatcctacactgtacagctaagttttggaccaagtttacaaggtagtgttactccctaaaacatttttctgatatattaaattgaactctaagtcccagaaatgctacatagaaattacattgcactttgtaaaagttgtatatggctccaaaactgcattagagactaaaaatatatttccaaactcttacatgcatggtgttcgtttaaaatggaaaatgtatttgtaaaaaagtacgtttctctcccgatggtaatactgggtttatattatccattaccagtgctttcactgccctctgctgctctgaggaggtgtggagcgccagtcttttatatcccattggagaaggccaacttttcatttatggtcatgattattaatgttcactggcatattccaagtgtaatactatctgacttggaaaatcccaacaatgaggtagccaatggcctgaaaccaaagaagcactgtgttcctgtgaaccaggactttctaaagtcttctggggttttattaagttctgggcgttctttctataaggtcactaatatatgaaaatagctgt

SEQ ID NO: 43137 - DNA, 700 bp, Homo sapiens
atcattcattcaacaaatatttactaagcacctactattctggtgccaagtactgttctagggaagccttaaggaaacaaaaacctttacccttagatggaccttaatttctagtggagagagaaaaataaacaaatgattaagtagaatatttattatgttagatgagtgtaagtctaagggaaggattaaagcaggggagaaaggtaaggaattttgagagagggagggaattgccaagctgagtgatcatgtaatatttgagtaagtcctgaagaaaacaaggtaggagtcatgctggtacctggggtgagcaagtacaaaaatccagaggattggaaagtacaaaaatcctgaggcatgagtgtacctggtgtgttcaaggttcaaggccagtgtggctggaggaaagggagaggaagagaacatgaagaagatgaagtcagataatgcaaggagctagttggcagattttgtggggtcttgtaggtcaatgaaaggactttggtttttccttttttgaaatgaaaagccatgggaagtttttaaacagtagactgaataacataatctgacttgagttttaactgggtagttttggctagcatattaagaataaactaaaggaagcaagaatgaaactagggaaatcaattaggagacagtagcaataatccaggtgagaatttgtgatagctta

SEQ ID NO: 43138 - DNA, 1698 bp, Homo sapiens
cccagtttcccaatagttccttttaaattctcttttcaacctcaagtacttgcctttgagggaactctgaatcccttgagagtccccagtggagggtagggtgcctaaagttccagtgaccaaggagctggggtgggaagggaaaggtgctagcaggagtagacattgctggcagagcagattgtcagcagaggttcaagaagagagatttcaggtgacagagaagttcccatgagacccaatacaaaggacagaggaaacagaatagagaggtcttacagagctaggaaaaggacttccagctcatagtcagtgaatcatccccactcaggaaaagaaagccaggaagaagagatttctagcccagggaattggggaataattcccactcccaaaaaggaggcaggaagaagagcttccagcccaagagatacctttcaaaagaagcctggggactggaacccagccccaaaaagtatacttatacctttagaatcaacatctgtccttgccagcttcaaggaatgtttgtctggaacaatggttcagaagtctgagttaccagcgaatcctcagtcagtcaagagagaagacaaaggaaaggcacacattcagtgtcctaggtgagagtcctgggggtccaatgatgagtctaatcctatctgagtcacagcacaataactgttaaagaaaaaattacttcataatattctttaatattcaggaccattgcaataggtatagggaccattgcagtggggaagtgcagtggggagagagaatgggttcaaccatgaatacaacataggcaagtgggaatttatagccaaggggcagtaagaggatgctggctaaaccaactaaatgggattcttgatcagacatcaccttggggatgatggaagataaagaacctgctcataccaagtatgaccagatatcaaggataagcgttcttactaaactaacttagcaggattctttgctaaaactggattgtacaaggaagtatacaaatggacctagcagaagactcagaagcctgactaaagtttggccaagcaaagaatctttgacgttagtcatcaattatttacctacttggcttatgcagtgtttgatgttaggagtacactagtgaataaaatgtgacctctgtccccagggagctgacagttctagggagggtacaatgtaaagagagaagaacaatgatgggattacacacagagtattatgagaacacagcaagaataaaagaaaaaatccaaactttaatgtggaaagattggtgcatgaggagtggaaggattctcacagcagattcctggagggatttatggcagagtcttagaggctgaggagtagtaactggtagagggtgagaatagcctagaggcaggccattccagacagaaggaacagcacagtgctggaatattccaggcagctctctgttagtcttgaataataaagtgagaatcagaaagcagtggatttttttccccatagggcagagtaaactttttctgtaaagagccagattgtaaacactttaggcttaaggaacctttgagtctgaattcaactctgcctttatagtgcaaagtaaccatgtccaatataaaagtgaatgatcatggctcaataaaactttattcatagacattgaaattggaattatatattatttgcaca

SEQ ID NO: 43139 - DNA, 1664 bp, Homo sapiens
caatgtataatgtagaattaatttcaaagctctaaagccctgcaaataaaaacatgtttcatgagaaatgaactctagaaatcattcatgtccagacaacagtgatacctgtgtgagtcagaactaaccgtgcctatcctgaaatactacattataccaagtgaatgggtaatggttgtaagctatgtttcaaaacaagagggcagtggggcacattgtccccattccttatacccacacctcaactcatgactacctgaagttcaaagacttcgtccttcaggaacaataaactttgtttgttttttgagatggagtctggctctgccacccaggctggagtgcagtggcgcaatctcggctcactgcaacctccgcctcccaggttcaagcgattctcctgcctcagcctcctgagtagctgggattacaggcgcccaccaccatgcccagttaatttttacaataaactcttagggcaaaatttgttcaaagaaattagcaatcaacatgtaatcttcgcttttagatttaacatctcaaaataaaactctgaggcttatatgccaaccatcaaaacaaatcctcattcaagttgatgtatctcggagcagagtggtggtcacactcaagggcaaacccatctggccttcacaaaaagcccatagttttgaaaaggcatcaataaagaaggggcagatggagctgccagcgcacaccacacttgtatccaggaagttccttgctctctttttggctgagtaaatgactcactgttgtaatcttgagtaagtcacttaaattccaagcattcaacttccttccatccactaacaatgacctaatactaaacatgcttgaaaaatgatgtaagaccatttcctctccattaccagcagctaagagtaacagatgactaaggaaaaaaaaaaaaaggaatgatccataaagcaaaagtaattcaccctttattataaaaccactcccactaagttaggagtatttttcctaggaatgtttttgagctatttcaacatgggtactgggatagctaattcaagagctagggttcagcttttttcacaaaaacagattttcaaactatgatctgttgtctaggtgagaacgagtgtgccagtgtcttttaaaaagtgttttatactgtgtgtccatgaacttgtatcctaatcttctagtttaattcaaaaatgctcaccaaatataataaaagtttatagctttagttcagaagcaaatagtaattagaaagaatgaaggctttagccagttcacttttgtacaatataaaatgcagattaaatttttttttttcaaaaaaacccacaaaggaaaaactataatatgggggttaggtatgtagatttagccaacacacctagcttcaaatcttgggtctgtttactagctctaggttgagggaaagcttcttaattgctctaagttttagacttttcatttgcaaaatgtggatagtaatgcctgatccatgcatattgctgtgaacattaagcaagaaaaaatatacatataaaagttatgcataaggtatatatgtagcaattaatgcagtctgatgcataattaataattgggttttataagtgaggaaaaagttgacctgtgtaatacagtagtttaatttt

SEQ ID NO: 43140 - DNA, 2576 bp, Homo sapiens
gatactgtgtgaaatccaaaggatgttgcttaaaaatgtccgacgtatagatatacacctgagagttcttggtgcacaggacacgtggtaggtaaatccatgatgggaaagagactgctcaaggagacatggattaacattaaacagaaacagcaaaagaaaatggagtgctggcgaacagagaccacgcagcggaaaaacagtatttaaagtgcaccagaaaagtagctgcagaatgaggagaaaatgacattagagaaacggagggaagagttaatggtgtgctcttattgttttaaaaatgcagagtaggatctttttttcccccacccctcccaaagtttttaatattttgagggcagaaaccacggctttatttcatcctatttctgacagtgcctagttcagtaaagggaacatagtaaatgctcaataaattcttaatgattcagcctcagacattacaaacgggtcctatttgtctcctgtatcaacgaccaatatttcttccccctctttcttcaaataaacttttagaagtgcctctgggtttactgaaatccatttttacaattagtatgttcaacttacaccagctttggaatgagttccaaaaccttctttatttacttgagagatattcggtatcagtgacgatgggtttttcctttactactattcctaagaaaggtttattcaaaatcaaagtttagcccaattcccagcagtaccttttaacttaaaacctgttcgaaagcacggcaaagaggcggacagacttttctgacaatcattaaccaggtcaacagacttattaaagctatctaattaaaggcaagaaacaactgcttggggaatacacattcacgccacaggaagccatttaactgcaaatagatcgtctaacgactcacggaaatctaaaggaaactgcgtgtccgcatggggttctgatgccaaactacggattgttctctcaggtaacacctaacctaagtgaagtccttggtggatccgcgttcttgagcttagaaaataccgaatgaactaccaagagcaccagaataatcgcctcctcctgaagaactagcctctttctcaccacaccagacagcacgtcctacaaccacctttcccccaacaaccaaactccagcgccaagctgccgcttttgcagaaatgttctatctcttggtctcgcgcgatctcgcgcctccgaggaagccaactgtatcgcgcacgccatcaaatccccgcgggaatagaattccgcaggtccagaaagccgggaaatcgcgagcggaggcggagttacctcggtgagcgtgaaggcggagcccgctccgaggggcgggctcgaggcggggagaggggcggggctccagggacctgttgatcgcaggtgtcactggcctgactggtccctgggtattggggcgtatgcgcatgctccgctcacagggtcgggctctgggcggcggagaccagccgcctgtgctccagttcccggtgagcctcggtactgtggcagcagtcagtgtgtctggcgggtgtcggcgtgaagcggggctgggccagcgggaggtagctctgtgggagtggaaggcctgtatttctctacctggaccgcacgctcctcgcgcaaggagggtagagctcaaggtaagtctccgaaactagccctctggttggagatccagagacctgcgacccccgcgggcctgaccgggacactctcattctagccccagagctcgtctctcccctcgcagcccggcgacctcctatggccccggccctctgggcacacacacactctctttgctgggcggttcagacgccagaggtcacgcagccctttcgccccttctcgccgcgtctggcggagatgcctctggccaggctggaggcgctcgcgaggcgggaggaggtgctgtacttgttgggtcctggatgttattgctgccgtgtttgagggcggcgacaagctggagtcctgctgggattgtgagtaatacccttacttggctcctgcccctggctgtccaagccacattgcctcgcctgagcacacagttttttacttaaaggggtccaggatggttatgctccctccttggagaagagagatgactggactcgtgagattcttggggtggtggtttctcagtggtagtggtgatgtatataaagttaatgtttagcttctaaagggcggcttacggggcatttaccaaactatttttaaacagtgttggagaacaggaagtacttgcacaggtgtaatagggagggtttctaaaacctgcaatctgaggatgttttgaggtttgtaaccctgctacaaggttttctttatcaatgcaaagtatgcagggaattaccagttggacagcaaagttttccgaaagtttccttatctggaaatagatatatatatatatatatatgtgtgtgtgtgtatgtatgtatgtataaatatatatatttgcaaagaatatctaaggctatttttgaggtaggtttaatagtaaacttaacctgtagtcccagctactcgggaggctgaggcagga

SEQ ID NO: 43141 - DNA, 2649 bp, Homo sapiens
caagtctgtaaaaagcaagtatttgtcagcaatatgtgctttatcttcccagtttttaacactttatgcctatttacatattgataaaaagaaaagcctagaacatttcttgtaaggcctctattttctatccagagctgaaagttcaggtcataaaaacacacacacacacaaaacccactgtatttgagattatcagtctctaccaaaacagggagggagagtaaaactctccctttacaaatggcttgacagagaattttatagaaatccctatcccttttgccatcctcccattaatccctctcgctcccctgccacccctttttttgagacagggtttgctttgtctcccagactggagtatagtggcacgttcacagctcactgaagcctcgacctccccagctcaagcaatcctcctatttcagcttcccaagtagctgggactacaggcgtgagccactgtgcctggccctctctgtcttctctaacttactacaccatccaagaaatgagacagtgaggcttaagacacccaaatcttggtgaaaatataggatgggggttgggggtgtagaagaagtgactgcctatcaagaagtgagaatttcagaagtaactcataggcatggtgactaaggagttaacagtgagtgaacaatcaactccaaagtccaggagagctgtctagatgggctacactgctcttctcccataggagccctgtttcatctcactgcttctccttagcttgtctcttaacaccatctccatttggtgtctgcttcctcctgccctattctcttaagttcccttcctttaccctctgccagaattgtcttttcagagcgagtggcgatgaaaatggagagcatgggttttacaagtaaactctacagaattttgtaacttggtgttttaggatatgtggatgtgtgtaagaaaagggcaaagtgtctcaggtttctgggaggtaacggtggataaagttggcgtttactgaaatggtaacgctgcaaggcaagtaaatttgggtaagaagctgttaagagttcagttttggacatgtttagtttgagacagctgcgtggtctgctcatggttaaacagctgtatagtaaaaatagctttcgttgagcacttactactgccaggcaacatgcaaatcactacgatctcaatcttcactacacccctatgacctgggttactaatggtcccaaatggcagatgaaaaaataaagctccaaaaggcgaaataacttctccggtcgcttcatggtgctgcaggaactcaagcctagctggtttcattccaaatcatgagaaaatatgacgccaagttttctccacacttctttggagactcccacggacgtgctaaagaaggacattttactcctagtccttctcccccacccacccgactgcgccactcaccagctgtgtgatcttggacatatataaactctctggaattcagtcccctccccgcccaaaagcgagcaaatgatctctaagctccttaccaccccaattttgcattcgagatactcaccatggcaaaaaatacacaaagagaaacaccaccacatcgaaaaggatgaaaagccagaggtccaaccagtaggagtgtttgggaagcccatttgccccagactgaggcctcacatcgaagttctgcctccctccctcgctaaagcctcgccgctcccggagaccatctcgaccatcaacacccggtgcgtccacctccatctcgctcctgcagcttcgtaacaaccctagaaaccgaaaatgcttaagttcccggactttggtgttcgccgcaccggaaactgagcggagtccggccgcctgcgcagtgcgccgcgccccgggttccggaatgcactctgaacctactcttcccagcgcgcaggcgcctggctcggctttccgctgcctccgtgaccgctggcatgaagcgcggcctccgccttgacactaagtcaatgggcccgcctacttctgcctcgcggcgtcccaggcagatagctggttattcaggtttcgttggaagaaatacgttctcgtccccctgaaaggcccagtccagtcaggtgatggactcctccctgaaactgcacgaggtcacctctcctatccccgtattccgtttggatccttatgccaacgtgttaggaaggccccctctggtgggttttgtactgtctctagcatttgacacttaatatttaaacaccaccaatgaggtggacgtcctactcacgggactgagtttccaaacgggccagagagcagcacgtgagcattttgcaggtacttcaagggagtgggtttaagaataacctggccgcgcccccctgtaatcccagcactttgagaggccgaggcgggcggatcacctgaggtaaggagttcgagaccagcctggccaacatgctgaaatcccgtctctactaaaaaaaaaaaaaaaaaaaaaaaaatccaaaaattagccgggcgtggtggcaggcgcctgtaatcccagttactcgggaggctgaggcaggagaatcgcttgaacccgggaggcggaggttgcagtgagctgagatcgtgccactattgcactccagcctgggcaacagagcgagactccat

SEQ ID NO: 43142 - DNA, 820 bp, Homo sapiens
actttgtacaggttttttttaatccacatctttaattatttactgatgagaaactcttagagttgatttgttggagaaatagccatggtacagtcagctctctcacagatgagggtgagtgttcctacctctaggatgtgtcagaacaccctggctgcctacaagtgctctcctcctatttcatttcagattgtttgctctgccctggcatgcaataccctgggttaatgttgcctaggaactctgctctgtaggactggattctatcaccaaattgttttgcaaatagcttataaaaagaaagataaaattgtagttgacaaatacaaagtgaggtattctgtaatggttaaataaacccccaatggggaataatagatacatattctaggaagaaaggagtttgtttccacaagggattagtttggctcacttgaaaatgattaaacaaacttcacagaaaatcattctcctgatttagaccatcacaaatgaatgattaactggctgaactatcactgaggttatatatcaagcttgtatatatatcaactctgttatgtatcaagcttgttcagggcaaaggaaagagcacttagaggattatactgaagcaagcagattgctctctgattacctctgtaaaatcagattacctctgattatactgaagcaagcagcaagtgctctctgattacctctgtaaaagggttcaccttagtctttttttccctcatgtaagagataatggaagaacactgatgctggacttctgtttaactgggatgtatggtgatagtatagagaaaggagatttcaa

SEQ ID NO: 43143 - DNA, 1356 bp, Homo sapiens
tttcctctactgaaaccacagggatgtaggaagaaataaaaatctttgaaactgctttaactttttttttttttttaaagttgaagtctgctttgtggtgtgtgtgtgaaagcaagattctgcagtcaatgactttttcccaggatgttttctttttctttttctttcttttttttttttggagaagatgacgtttctccagatgtttttggggtaattatttttaaataaacaaaggaaaaaatagttgagtgttttttttttcactctaaagcagggcaatatagcatcttagagcaatccatacactaataatacacatactaataatattatgttcagtgtagcacatgcttattctgatcttttggttgtgctgactgtggagaggcgtactatgtggcttgactctgtactatacatcttttcatatcagtgtcccctttcataattattctgtgtctgtgtgaggctcaggattgcaatcacatgacaaagcacaggggacaaaggacatgtcacccagtcagttctccaaaacatgagatttttcaagaggaaacagccagactctgatactcaggcaagagcttgctatcttttcccatcaaaggtcagcagaggacatggttgttacatcactacaattctttctacatgaagttttccatttatttagataagaagaatgtgattagagagctttctgaaattccctctagatatcagacatctggaatttccttgagagatctgcccattagttgaatcacttgtgtacttaaaaaatgctcagtagtaagagatcttgcacttaaaatgtagacctttcaactaaattcctgtaagaaaataaaaatatcacagtggctcaaacatttgatgaaaagtgatgtcacctttatcctctcatttgtcatctcaaatgccacttaagtatggctcttaaaggagcctgacacttgtcctaacggatagtgtctcactctcaaactcagtcaatgagcagacatctgatgacagtacatctctagcatctgcttctaatatttaagacttaaataggtaccaagcattctgcttggtattgatgtgcattatcttttacaactattatctccattttacagatcaggacataacggtatagagaaattagacagaggaccagttttccaacagagtgctatgtagcttccactaagaccaaaagcctccttctactgagcacttaataagtatgtagggccgagctaagcacttttcaaatattatcttttctactgtagggtaaaatgttaccttttctaaactagtcttaatagttttctaaggaagctgttaagctggatatat

SEQ ID NO: 43144 - DNA, 2144 bp, Homo sapiens
ctatggacaattgttctttattttcacctaagaaagagtaacataaactttggttaaattcaggaagaaccagatttgggcctccaataataccataaatgacaatgtattaatcttagctatattcactcttagttttcatttctgtgaagcctttgagagcagggacaactcatcgctgaaatgtgcccctggcagagtcctgaattaatacaatgctaaatagtggaggccttcaagatatttaaattttcagataggaaatctgtacaaggagactagacattcaactgatcagaaaaagtaatttttaaaggcaagattactgaattcttttttttaaatagtcctttctgctgcttcttattctttgatgctatatattataatacatagccattatgaaacaacggaattccctagtatctccaaactgatattagaagatatttaagtttttctattttctgagaagtgaataaggtaagcaacagaggttaaaatcagttttcatcttcacccatatgggtgaccctgttccaactaaaagcttggcctcccatcaggcccctttatttcctccttcattttcaaaggagttcactctgcttcggtccttccctgtacactattgttataaccattgcagtgagatcatgctacttctctgcataaaattcctgtgactcaccattgttttcagggtaaaatccaaattcatctgtacggcttacaaggttccgtatcatttgcttctcaccttcttccattgcttctcttgccattcttacccctcaacagtactcctggccctcacccccaatctctgctgtcatgcctttgaacatcctgctcctatttttaggaacactctcccttagtcttcaccctgatacttgatacatgctaggagcccattaaatgtctttttgataatgataatttttctttaaaagtctcgggtatatattaggtgacagtatattaatcactaaaatgtaaaaatccctattccatatttgcattcaaaaccaattctctctcttacatacacacacacatacacatagacttttccaaaggatgttgctgcattcctacctcatgtttcatctggaagttctgcacaaggttgaggtcagtaaacatccgaattgtacacagtgctgtttccagatcagacagctcaaagtcactgaagctaaagtcagtaattttaagggtctgggcagatggcaccacagcagccttgggtaaggaaagaagaaaaaaaaaaatgctgttaattaaagcagcagtgatttgcaaggttttcttgttttgctgcagagaaatagcatattgtggcttttttttcctttttaatgaaagacactagaaacctttttgtacagtggcaactccactctctgcatttttaaaactgagccacataagggtaattaatatggttcaaagtaggctaagtggagaaaagggagttgtcacccttagactgtacctggaacagtgagcaacactaagaactcctctagtgatctggctcctttatacctccccagtcttattcactcaaaagaaatttataatttattgagtaaatattctggaaccatcccagtgctctgggctgcaaatcatctggtaagaagggtaatgataatgttctaagcattttatggttagttctcaggacagccttatgaagtggacactctagctccatttttcaagtacaggaacttaagcacaaagaggttaattttcttgccagtggcagcccagctagttaaggaatgaggatgccaggcctccagtccaggaagactatcctgtgcccagactagcagaacctgcctcccaccatacttgcctcacacaagcctgatcataagaatcacctgggtgcctattaaaaaacattcatttggaccaaggagccctggctccctcagactgagcagagcgcacaggctcctctcctagatgttttgctgggccctgtgggatgggaatttaaaggaacctccactcctctgaccttggaccatttaccctgtcagcactttgttaactgttttagctagatcaggctattaactggaccaacggaggcctttacgtggtttgaagtagagggaaga

SEQ ID NO: 43145 - DNA, 1296 bp, Homo sapiens
taacaacaacaacaaaagttatacagtcaattttcaatgatacatcgtcccactggtgccaccggggcgccaccacccagcacccgagacccgccgcgcccccggaaaaagtgggaagggacgtagggggatgctgaaggaagtaccttgttttgtctccaaagggcaacatagcaaacgtgggaagttcgttttcgaactccgccgatcctggactccaggaggctccgtaggggcaacaacgcgcgcaggtgaggtgaggtgaggtcggcgactcagaaccagctccctcacggccccggcctccgcgccgccgcccgtcgcctcccgctcgccccgcgctgcgccgccccctggcggggagcgaccggcagagccgcggccgcgcgccggcgagtgggacccgggcgtcgaacccgggcgggctcctcgaccatcactgccgggcgtgtgtcaccctcccggccaagacggccagcacccgctgcccgacggccgctgcccagagcaggcggcagcggggcacggactctttctgcaaaggggcgcgtcctggagtccacgcaccccgactatgcatcaattcctcaggcttcggggcacccgcccgccaagcactctctgctccactcttcttgtccctctgctcccagtctcaattcctccccaactctcccgcgagcgtttcccacgagcgccccgactgcccgctgcgcagccgcctccaaaaggacaggctccctcctccccgccctccgcaagggccgccccggcgcttggctctggaccagaaagagctggcctctggggtctgcgctgccccttggggtccgctccaggcggcgcctcccctgcgccctttgtgtgcacgccgcaaacccctctgcagagctctacttttggcggcacagccttcggcggaaaagcgagtgaaaggaggcgcgcgggacaagcaggagactggaaggggggaaaaggcaaccgcactcactttggcaaggttccgtcatgttgcctttgggctgtcccgtggactcgtccctcaccccagcttccccgcccagccagggccagggcgaggggggacgggggaggagcggagccatcaagaccgacttggaaatggtgcttccggagctgcagggaaggggctcagaaactgtttgggttttgctgattggattttggggaaccagagggctagagaggggctaggggaaggcccgtgagcacggatgtatgaaaataatcatgttcccggggaataccaagagggtcgggggtgagggtgggagg

SEQ ID NO: 43146 - DNA, 1201 bp, Homo sapiens
ctggtggcttttctaacaaagtatgagaaggtaaagtcccagtgatcgtccagccatgcttcgaccgagtcctgatccctctgctgctgcttctgctgctggggctgctgctgctgtcgctgctgcccgaagctggggccggcccgctccatggttggcaccgcgcgcctcggaggctctctggtactgcttttccaccccagctggggtccgtccctcagaagaacaggactcggcctcgagaccctcccccttcgtcctgctccagtcgggccggctttcgacaaagcggccggagcgccaggccagcctcctgccccgccccgccccgcgcggttctacgggcgcccaggtgtggtgggcggggccaggcgcagctgctgcgccccccccacccggggtccggcagtgttccgctctcgcaggctcttcagtcccctggttcccaggaggcggcggcggcggcggcagcggcagcgcccggcgagctctccggaagccaagtggcggcggctggaaggaggccgcgcggccgctggggtgcgctgtgtgccaagccgacttctggggagcgcgctaggtgactgggtgtgttctcagagtgccccagggagggaaggtcgcgatgtgggaagttttgcccgaaagtaagagatgatgagaccctgggcccttttcctggggcctgggagtgcaatgaccttcccgcctagcttttccctagccctacgcttgggtctgggaggagcgggaccgacctccttcagagcccagcccgctcagtgacttaaagcggtccagccacggaccactgcgggtggagagagctggggcgtgtgctagcaagagagatttgcaggtgtaggtgggtaacttgcaacaaagccatacccgtgcttaatgttaatgataacagcaataattataacttaagtgcctttaaccattgcctcaaacttcccttatgcataactggaaaaagatttacttggaaaagaaaaagcaaacaaataatttccaatgctttgtgcatgaagttagaaaacaagggcacctctgtacaattaggttaatccgagagcactggcgcaacccaggtgcagtcgagggcaaccagttatcccaattttaaattaatgcatcattttaattaaattggaattaacactccctcaaaagtatccattaaaaatggctcagc

SEQ ID NO: 43147 - DNA, 591 bp, Homo sapiens
ataaaagtacaggagagggatcaaagaaacaaaaaataagagattatttagaaccctaggactagcaacaccagagagccattacatctcctagaactgaagaagcaagggaaaagagaaattaacagaactccaagggcaaccgtttgtagagtgtctgacaagagctgtgacctttagaaaggactgcaaataaccagggatgacccaggggagtaggaggagggtggattaacactgctatcttgctgccctcttgtcctctgatcttctgcttttctatcccaactggatgccataaggccagaacaatccatacaggtcagcctcctgggatcaaaggatagggtggatgatgggtgcgggcaggcaaacagaagatacccaacacaccaacatattcctgggagtggagttgggggtgagcaaggaatgtattttggaaggtcatcaattgttccttgtagagcttcaggtgaatgctgctggagtttgtaatgccatcattgacagactctataataagttgagtcatatgaaattatcaaaatactgggcaaatattagcaatttcatctagttcaacctagt

SEQ ID NO: 43148 - DNA, 574 bp, Homo sapiens
tacacaaaaaagggactagaaatgctacttcaataaagttgagtttgtttaaaatctctaagaaacttacatattgtccacttctacaaaggaacaaaactttttaaaattagataataactcttcttcctccaaaaagctttcacatttcacaatcttaaaatacatttccacagcaggtactttgtcatgatgagtgcattggagcatgctccttggaagataaacagtggaagataaacaaaatgttgggcttcagttatagcacagccttccaaaataaataaagtgactagttaatacttagagtactggaatttgctggactgttagccaaacgaatgtgtacatatgttcaaatcttgaatctctggtctgaggaaagagcagaaagaagataaatgaaggaccactgactgaccttgtccagagggtgttaagtattgtagggaccattcctattcatgaatgtgcgtgcttgtgcatgcgcctatgtgtgtgtggtggaagatgggagtgaggtagggaggaaaacagataaggttagcatcaccttttttttgacagttgaagc

SEQ ID NO: 43149 - DNA, 862 bp, Homo sapiens
actccagataagaagggactctatatagacctaaatccacaaacacaggctcaaagttgtataaataaaactgggaaatctgaataggatgggtatattgtatcaatgtcaatatcctggttgtaatattgtatgaaagttttgcaaaatattctcattgggggaaatgggtaaagggtacactaatcctctattatttcttacaactgcttgtgaatatataattatctcaataattatttcaattaaaagagtgtcagtgggttgtccttgccacgcagataaagaatgaaatccttgctacaccgtagagggatggcctgccacctgtttactttccagtcccatcttacaccaactctctttgcactccacccacaatggacttttaaacttttccttgaatgcattacattccctcacatcataagacctttgtacacattgcgcctaaggtgaatccaggtcatgtggacctaaaacttactcagttttggaggcagttttgagtaataacaacaacacaaaaattatgaatacaaaattaattacagaactttgacagggacctgagaaattgaggggcaccaaaaacttagttctgatagctttacagaaaatcaatttctaattataccctttacttaaaatttctcaccccttcaacttccctaccgtccatcccaggtatgtatcctcacagtgctgtgtcccttacctcttagcattcattacaatttttaattatacatttatttttgtgatattcgactaatgtctctcttcctcactgcagtctaggcttcatgtaggtatgggttgggtttgttttgtaaactattttataccaggagcctagcac

SEQ ID NO: 43150 - DNA, 1893 bp, Homo sapiens
atttttttaggatagtttggcagagagggctagggaatggggaatgttgattgcttgggatggggataaaatcataggaggtcaaagctgtctttttgcactgagtcagttcctaggtggggtcacaagaccagttgagccagtttcttggcatgggttactagtctgggtggtactagctggtccatcagaatgcaggggctgaaaaatacctcaaaacaccaatcttaggttttacaatagtgatattatcttacaggggcaattggggtggatacaagtcttgtgacctctggctacatgactccttgtggttagttttacaaaggtggcagtggagggtgtttagtttcaggaaggggctgtgatcatctttgttttaaagttgaactataaattaaattcctcccatagttagcttggtctatttccaggaatgaacaagggcagcttggaggttagaggcaaaatgaagtcagttaggtcagatttctttcagtgtcataatttttgtaaaggtgatttcactctgttgcattgccattcctctcctttgactcaagtgccaaaagtagaacttgtcccaacccaagtgattacaataacaatttcaatccaccaccctaatcttagaaagagtctggtaagtccatgctgggggtatttaaataattatgtgtagaagacattaaaatatggtttaaagtgctaaagactaaactaacatactttaaaacaaactatacaaaattagtaaagaatattttgtcaaaacgctttgatacaatctcatttatctttactaaggtgtcaacacctttgggttaaattcaccccagggttactgtcattatagccaaaggtctacatctcggcttattccataaagcctggttattttttttaaactcttgattatttcttaataatagttttaagtttcttaccaagttaatgcaacaacgttttgcacccatttgaaagcaaggcatcaaccaaagtttcccagttgcttttgtatgggacagaggaagtcagctctatgtctccttgtgacttttggccctcatctaaattaactgggacgtttaactgaaaatctgcccaaacagttatgaatatccagcaggatatttttggaatttcatgagaaaatatcaattaccagaggaaaatttattaacacaagctgtacttcccttaagtgaatttcttttatcttgaagaattacttcatgcaggtatctggtgtcaccacagaccatgcattgtaacttgcttatctttagggatgtttggcctgtctgtgtgtacttggcagctttccctacgcattggccagggccatgtcatacaactgccattagtcaggcaaaagcaaacataaacaatgtttgtgaatcatttttccacttttagccagttatttaaaagcacaacatcataaacttgggaaaaatgagagataagctgacatatttaatgcattctatagcacactaaaagattccactagatcgtaaaaagaatcctaaaaattctgtttaattagttatacattgcgtgatggacatggaggttacctgaaaatggtataggggccaagggaaaactttcccttcaccttgtaaaagtttgttgaaaaataactaacaaaaagcagattaataagagaaaggtcatagaaatttattagtgtgcacaggggagagtcacagagtaattactccaacccttcaagggggcatggaagctcatataccatcttgaggttactgaaagaatgagggctcagagcatgaccccaaaaaaggttatggtgctaaatcaggttttaggagggcaggagaagaagacctggctaggaaaagtggttttgttatgtagaagaac

SEQ ID NO: 43151 - DNA, 523 bp, Homo sapiens
atcgattcgtgtatttctagctcttcttaacagccatctttaaatatttcaaataaatatattttggggtgaaatattttgatttccttcaatggcaaatattttttcctaatgttttcccaggtacctgaacacaaaataaaacaaatcctaaatcatgtgggaataatgttatgtcttcttgtgattgactttcagcttgatattttgcatcattgctagataaaagaatgcttggaatgttaatatggaatgttgagcactaaattagaattcagtgttgtaagatttgaaacaaacatagcaattaagaggttttaaattcttgtatttcatcacttctgagagaccatttctttatagagtgttctacaaaacagcagcccaaatgacagggagatggagaaggaaaatggaaaaataggaaaaattatccttcttcttttggttcaaaggcatgtttgaaaaaaatgttaggggtaaatagtgataaaaaaatgctgacagtgtgaacttaccagtg

SEQ ID NO: 43152 - DNA, 1711 bp, Homo sapiens
tttcggcgctcccgcgcagggtgattccctgctcccgggagagctgcagcgccatggccagggacacaaacaaaagcacgcgcttccactccgcggacagcaaccacagcggctccaacagcacttccccgccaagcgtttcaaaagtaacgacgcagcacgtcgtcaggtcctttgcgcaggcgcgacgagcctttaagcccagccccacgcagcggggacctgccctttctctcagccttcctgtgatgtcgcgggagcggccggttcgcgcaggcgcagttggtggacctggtcgcgctgtgccgggtgtgacactacggtaggtgtaggttaggatgtgtcttctggtcgtggtctactagttggggccgagggaagaagatgacgattccaatttcagtagccactctctaggcttatgaactgaaagaccaaggagcacaatttccgagtttcaaagatactttcaaactgaaaggaactgttcgccagctgctcgcgaagtggcccatgtgacccctagtgaacggtctaaacttccgctagatgctttgggaattcgtaaagcgactgcgtgcgcggcagccaagccacagctttacagggttcgccttctgtgtgggaacgcagcttttcccgagaaattgggttagggattaaagagaagaactgcatcctttttactgccctttttccacgtctgtcctgggcttagggccctcctcagaggccagaggggtaggcgagtccggggcggtagggggctgcgtccggaagtccaggctgcgttctg[450 bp omitted]gggtccttctaagccctctggcagaatttcgttgtggttgttggactgaggtccctttttgtctcgccagctgttggccagaggccagctgtgtgtcagctagaccttttacaggccttctaacacttcccatcttcgtggctttcgggagcccccagccccttttaaaggctcacctgattaagtaagactcagtcagatctcccttttgatgaacctagtcccagaagtgatatctgctcatatttgtaggttctacccaaactccaggggaggggattatgtagatgcgctctctaggggccaggaatgtggggaactagcttagaattctgcctgtacagcgttgtatatatcatgtttcgattagttggaagagtaaggcatgggtgtgataggtaacaggttgacttgacccagtaaaatttttttccttaaatcctttaatctctgtgtgtgtataaa

SEQ ID NO: 43153 - DNA, 452 bp, Homo sapiens
tcccctttctttaggagtgatagaagtttcataatgtgtatttcgttttcctaataatttcaaaaaggcaaatttcactagggccatgaaagtattcttggatttatccagactatgtagaaaccaccatcacagctggctaaaaagcaaaagcttggttaaattgacttggcgtggttcccagggtttcccaggcattaagcaatatctgaaagttaaaagtctgtcaccttcagaagctgcaataactctttgattcactgtagtccaatttaacacattgttatgtaataatatatatatgtgagtaatatgagaaagctgatttttcttcaacggcagcacattcataacttaggatataacatctctgggatgttgtcaattttaaagtctctccttcctagttggttggttacataaccatgggagtactgttctttatctgttaa

SEQ ID NO: 43154 - DNA, 3668 bp, Homo sapiens
ggagcacagatacataaagaccaatagattccctgccattcattcgataccttaatccatatgaaactgaatggttgaatactgacaacttcataaaaggagttatagtttagaagagaaattgataagatttgagaagatgatgctcaaaattagcctgtgttaggaaagttctttctctcagatcaagttacagcttctctttaatgagaccacttcaaattgatcagtatcattgtaaaaatgaataaactctacaagttttcttaatgtgagaacttaggactgaatgccccttgcagtccatctgtctttttactcattgactcaccatcttttgaatgtctcccccgtccaaagtattatactaactactagttaaaagtcaggatccctcaagttaagtgtgaaatgacaggcatataactaatcaagtgcagtagaatatgtacacacagaggctggattagggcaatgtgagcacatttgagaggactatattgggaagtgtgaaaagagaaaaaattcggaaaaaaattccaaacagtcttgaaagttgcctgtgaatttgccaggccaatcttggtactttggctaaagagttaagtatttcagcagactggaacaagcagtaaggttgaaacaaaaacaagggaaaggtcacagtgaagggaggggaagggcacaaaagccatgctaaaatgtgcagacctcatcctgtaggcaacaggaagccactggaggacactcaggcagggaagaacaatgtcaactctgcacagcaagatggaaccgactgtgcaagagtgacaagaagactgcttagaaactaacaacacaaagaaggaaaggaagacctaaacaaaggcagggacagaaacaggccccaggtagacaggaactacttagggtgattctgttttttggatgagaaagaggatggctgactttgcatttctccatagtaggcttggtgagttgtcagcatacgccggtagtagctggagggggccaccacgcaagacaatattaatggggtggaaagagccagaggagaaggaaagggaaggtgacctacaatcagagtggcagctagtatctgctgagtgcagcaatgcaccaggcaccgtgcacagagcttcacatagatcatctcagggaaatcccatcttacagacaaagaaacatactggctcagaaaggttttagcaagtgagtcacccaaatgaccatcaaacaagcaagtagcagagatgggacttgaagccacaggaccttggctcctgggctcttacccatgaagctacactgtactcctaaaggcaagaagaaaatccaaggagggtgatggcatggaagctgaaggaggcaaatgttccaagaggaaagaaagaggaggcagtgtccaataccacaggaagtcaaggaagagctaagagtgaaagggtccactggatttggtaactaggagatctttggtggtgtttaacagtctggctataggacactcaggaatgaattgagggaaagacggtctcaatgaaacaacagtttgcaaagcaggcttttaaaaacacagttaagagaaaaaaaaaggcttgataaggtttgtaggctatgaagaaacttctggagagacagagaggtgaaaaacagggagaggttagaaacagaagagacatgagggatttgcctaaagaaaaaagatatctgacaccagagactgaaggaaattaggtgaaagatgaatggaagaaaagcatcttaaaaatctcacctactaagcatgaagaaacaactgctagtcctctttttgagagctttctagaaattgtgaaacacttttgctacattccatacagtcagagtcatccactaaggatagcaaagccacgtagcggtattaagagaccagatgtgaatcagagaaatgagtaagaagggcagaacccttgtttggacatcctgtgcaaaccccatcactgcccacccaaaactgtctgcaaatgtgactttaaatgactcattcaagagggcttcccctgtttcctggagtccccacactttacccagattaatgccaactcttaagtaggtactgttccctcacccattcacccatcctcagttcatcctcaattccctttatctgctaccaccaatgccttacgaagataattataatatattcttagataatacttggccaaaatatacaattcactcttttaattctcaccttcaaaaatatccattctttaggtctataattttgttggctttttttttctctaaatgaaaaagttctttacccgcaaggactaggtatgccaaaaaaaaaatgaataagaccaaccaaacaacaagggaagggtagcttttctagacacagaacttagacataaataacaatttcaagtttaaagatgagaaagtattcacctgtctggaacattttaaataaagccttcctgaagacacagaaaaggactaaactctctttgttctccagttccatataatcaatatttactcaaataccgcaccctccccccacctccagcattccacgtaatattaactaggagctggaaatcatgaagcaaaccacaagctgagcaactgctaagccgctatgcagtgatttttaagggtggttcttctgaggcaggtttccaaagaccttggagccactccaaaaaacagtaagctgggaagacaattgcctccccactccatgtacatacactagggccctaccttatgtacgtattagaggcccgttaatatttcctgcaataatggttcccgctaatgagaaaataaattatttatcactgtactaagaaaaaaataagaagggcataaaagagggaaatgtcagtgtgacctgattatgctttgagctgtaaagcaaaataattatcagggaaaaaattaggacctccaagaagactgaggagtacaaacacatcagaggtcagagacatgctctcaacccccaatcctaacccttgctctaatcccaactcagaaaaagtgaatgatatagttcaaagcgttaaactcgaactggcctattgcttacttttgtgtaatttcctttccttttcatgctccatcttacttgtttttgcttctttccatttgtctatccatcctaccacctttgacctgtttcttaaaatcaaatgcaagggaaaaaaaacatcactggagaacagactaagttgtttgcatcgtggtagaaaagaaggttttgataacaaagtgaagatttgtaaaatgatttaaatttttgttgtgtatttctttaatgctctgtgtttaatgttgtgtctctttaccagtgtaagaatgacttcccttgacaaacaccaataaaatggaaagttaaattgtgtgctcaagttgcccaagaataactccagtgatgtcttgagtgagttaaagtgagcaggtggcattggcctcccatgagttcacattgaaggtcagaggagagtatgctcttttaccaaattgttccattgggcattccatgaataacacttgaaaagttctatcccttccaagacaaggcttgatttccccacctcactgcagtttcactccatcatgccaaactcttttacacccctaagtatttatttgctgttgttacctct

SEQ ID NO: 43155 - DNA, 3827 bp, Homo sapiens
actagaacaaaatttaacactctgtatcttttttaaaacattacttgtaacttttatgattagtaaaaactgtagttttgatagaaaacagtcttggtgttatattgtcatagggctcaggtacataattttatatgcaaaccaccattctcctaggttttctatacacatggcctttatgatactaatcattctttgaaattattaaaattaatgtccacaactggaaaatatgttcgcttatactatttgggtaaacagtctacataatgaaaaggaattgatggaccctcagacatcactggggaacttacaagagattcaagaaactgctaaatgagcaaagatagagggaattattattcgatgcttgttaaatcttcatgtacatcaccacaccagcatatcaagataggaaaaatattactcaggaaagttaattccacataaaagtatcctttctatggagaagaacttaaaccaaactttccacttgaagtaatatgagaattggtttactgtaacatttaagtgcaaaagaggaggtaagaatgggatcactgtgtaagtttcataaagtaatcaactaatcttaatcctcccattttcacttggaaaggaccaagaaacctttttcaattttgataagtcaatctgataaaaagtgaactataaataagagacagcattgttttagcagttaaaacacttgtttaaaaaaaactatctggactctgacaagccggttagattgacaagatctgtgaaatcagttttagagtttttaagccctggtatcttattcacaaaagactgtataacatggtcaatatttaaagaccttaaactatcttctctttcctacatttttgataaacattaataacagtaaagaaaccaggcgcagtgggattacagtcctgaggccgaggcgggaggatcacttgaggcaaggagtttgagaccagcctggccaacatggtgaaaccccgcctctactaaaaatacaaaattagctgggcatggtggggcgcctgtaatcccagctacttggaaagctgagacacgagaattgcttgaacccgggaggcagaggttgtagtgagcgagatcactacgtcactggactccagcctgggcgacagagtgagactccgtctcaaaaaaaaaggaaaaaaaaaaaacagtaaagaaagcctgtagtagattatcaatttctgaaacagtcccaaggcaaattcaattgagaactcgttccacgagttcattgcttaagaaaaacagcgcttgtgtttaatcttttggattaaaaaaaaaatcagagcctacgtcctacagttttagtaaaactgggctgagcaactggaaaaagccaatgctcaatcacagtattaaaatacagaaaactttgcggaaaaaaaataaaggaagtcggggggcggggtggggggggaatgcgttcgcctcacatgaccacgatgagctgttcttgctccggttctaatttgagctactctctggattttggggaaggcccacttttacacattcactcatgaaaagggagcgcacacaaatccggccacgtcaccagctgttgcgcgcgaaggcagcttggcggcgtcggtgctggttccggagggcgctcagcgggaagaaccgggacacagaaacgggggcagggaagcaaagggggaacaagaaaagtggaagcgatgtccccaaagcaggttccctttcctcctaaactttttggctctcagacaaatcctaaaagtccctcgtcgcagcatacaaagttgtgggtaaatccagcgcagtggggggcgcacggccttacctgtgccatggcgactactcaggtcaggggaaggtgaagcaggactgcaaaagagaagaaacctcgggcttagcgcgccatttgcaactcgtgccctccccaagcgcaggtccgcggggacccggcggcgctcagacagcccggagggccccgccacggggccgacccgccctctcgcagctaccgggacagctctcggccgagcgtccgcgcgaatccagtgccccgcgaccacgctctcctctccagaaggagccccctccccgggctgcgaccactcacccagactgtgggacccaagtgccccgaaaccccgggagagcggcggagagccgggcgacggtacgcggggcgacgccgagatgcagacgctgaaggatccggcagctgcacctagactgatccaagcaacggaaacgccagcggccccaccccggccctgcccggcttggcccgtcccacccccgccagggccccaaccgcaggccggccgcgccagccgggcccgcccctgccccggcctcagcgcgcctgcgtgggtcgcggctcgtcccagttggtctcccgcggcgcggactgtcccgctggtctcgcgggcctgggtggggagcggccgcagagctgctggaaccaggaggaggcgccgctcccccgagggccccggagacctcttgtcctcgcgccgcgggaagggcctggggagctgtccagggctcggggttttggaggtgcttgagcctccctgccctctgtgaccgcaggaaccgtagcctcacttgggtgctcaacatagtgcgtgggcgtctttttggaggcgagacaaaatcatcgcagctaaggacagcgcgcctttgtcgatgggatagaaaaaacgtgaaaggagggccgtttcccaagttgtttttgtttctgttttgttttgttgttttgttgttgttttaatgcctattattgcttcctagatggccctctcttaaatgtacagccttctagtagcgtatgtgggctatttgaaaacctctgcttccaatcagtttctgttttcaaaactagcctagaactttaatatgacttaaatttgagcaatgcctcatattggttcaacataaaatatatgagtatatgagagagagggggagggagggagaatctacagcgtattgtactagcatggtgctgtgttctgtgaaagggctttatatgcaaagcagcccccaaacgcgaaggagtcaagaaaccaaagaacgagacagacaaatccagtctgtaggtaataggggtgctattggaggatgtggtagacagaagcgtggccttgggcggcggcaagcagataaatttctgcactgttactccccagaccctggccttatataccgtaaggaaagagtatactgctctgtgcaagacaattaaaggcagccctccggaacaggtgagaatgccgtatgcttcatagcctacaatgtgggcaatagcatcaaggttgacatgttcttatgctaaggacagtttaaaaaaaaaatcctaggaatcaggaggtattcatgggactggggttattaaaggtcaacatggcggattagcatccgggatataatcacttttgtctccatatgctggaaaaggaaaagtagaagacacagggaccttctcagacttactggtgtggggagggaaggtgccagggcagagggggcaagaggacaagtttgcgacactagatgcagtgttctagacatatgctagaatgggaagggcaaagtgcttctcaacgtggaggttaagggtaagagatgaggatctagtcttctttgagaatgaggaagaataaattaaatggacagcaaatgtggttctttgtatagaacttctcattcgctttcacgtgtgaaccacatgcctattccagccctgacaaagtcacaacagagtggttgttctctgggaaaggaggcaaaattgcaaaatttgtggagcttgccaa

SEQ ID NO: 43156 - DNA, 1308 bp, Homo sapiens
tatgtttattaattaaattaaacattaattcatgcttattaattaaattaaacttattgattaaattatgtttattatttattgtttataaacaataaatttatgtacgtataatataaataaatttatgtatgtataatataaataaatttatgtatgtataatataaataaatttatgtatgtataagtaaaatatattatttcaataaatatttattataaatacttatgtttattttacctcatggaaattttaccttaatctaaaaaagacaacatgaaaaaatagtatgtaatactaaaatcaaatcatgtttccctattgaaaggcaaacactctttgagaagacataaacagggcattcagaacatcaaatagaaagagcttccaccatcacacaagtgaaacaaaatcagtatttccaaatatttttcagaaactacctttgggaagagtaaacctcagctattggagccatgataaatacccactgattctgagcacaagccctgtcctctctccagctggatttggtaggaaaatcacgatccagcttgcctcactcctgagcctttgctctgaacggagcgcactcacagtgcggggtctgggcctcccggctgcgaggcggccggcaaggcagagcccaggagatgagtaagcggcagtgggcgggagtcacagcggtccgcgggtgactcagcgtccaggaatcccagggggccagaaagaagattttggcaaagaaaggaggccagaggaaaaaaaaccacattgacaaggcctcacagctgccggagggacagatgtaagctgctgctgggacagaaggggagcgactggcagccttagacaagactggggaaggccaggggcctctgcatgacaatacagggcagcaactgggaacgaaggaatcgctatctggcccgatgtggggagaacagaaaaagtgaaaacggtggggccactgaggcagaaggcatcatgtggggaggaaatcattttgtaaagaatttgagcatctaccaatgaaatacagacaccagattcctcacctggtctctaggatcgctcttgccctgcagctgaacaatctttatgattcaccttcttctcaggatgaagtccatcatcaggatcatggtttatgactcctttatcatttctcctacatcacagagagagtcccttcagagatactgagtttgtttggaaatgtgcaggggatttgcaaatctgggatatgcgagctgtggggcccaaaagtacatccaaagacaatgagggaaagcttataaaacc

SEQ ID NO: 43157 - DNA, 1157 bp, Homo sapiens
tcatttttattcctcagaataaataggtttctcacttcccctgctttgtttttgtttttgttttttttttgccggtgagtaatgtgaagcacacaggttaacttgcccagggttatagtagttaatgatagccttaaaatttgaaccctggcagtgaacactttttaaaactactatttgatactgcctctccaaaaaagctgagtggttggcagcatggccccgctaaggcttctctgtgaccgtaaaaaaaagtctatcgacttaaaataactggagaggggataagaaataaacggtgcatttactttcagtccacagtagtagtaacatcgttagttactacgtgcgaacattctccattctcatcaacttctcagatcccacaagatttcacctttggccacaaaaacatcccatttcaccaatttatctttctcccccaacccttatgccgcctcattccagtgtttgttcatttaatctgctccaaatcctgcatctgcggctttccagggaccaatgtcaactcatctgtgaaattgcagaagtacatgtctagtctccaccccgtgagaggactgagcaaagggtgaagtgtgcgagcggtctactgataataatttctatcactctcatggttattttaagtatccttttctcctctgcactttatgagaaaagaaacggaacttcacgttcagaaacggcctcccaaagccgcaatggcttctcgcagctcgctggccttccccaatcacgctttgagtctgcgcagtagctgcagcccaagccatttcccatttttccgccgccgcgccttgatgacgtaattttcctgcgcctcggggcgagcagcggcgcgcaaggaaagatcgggttccgtttttcccgcggattctggtgcctgtggggccggtgacccaacaccatgaaggaaacgccactctcaaactgcgaacgccgcttcctactccgtgccatcgaagagaagaaggtatggtttggtgcccgcagaattgcgcgctgcgtgggcgctcgggtctcaaggtgtggactgatacctggcccgcctgggcccggggagctactaggggaacgaccggcacgttcaccccatccctcaggctttatttattttttttcgacaggttctt

SEQ ID NO: 43158 - DNA, 860 bp, Homo sapiens
ccgggttgatattctcctggtcctcttggagcgccgtctgctgcaatgctagcagcgccgagcccgcctcgcgggtcgcaggccccggcgcagagttgcccaacatcactgctcccgggagtggacggcgggatcagcctgcggcgccaagcagcgtgcactctgcccagccgaccactcgcaccgacccggccaaagaatagtcgtagccgccggtcgcagcccaggccagcctaccagcccgcccgctcgctcacccagctcgagaccacgcagggccgaggaggttgcgaaaggcgcaggcaggcactgcccagcgtggcgagccaaagacgcccagagatgcagcgagcagcccgccggagcggcggctgttcttgcagttcaagtatcccgcgactattgaaatggaccaatgaaagcgctcgcggccttgacgtcattcaaggcgacagggtcgcaggcgagtgaagggtaaaccaaaggaaactgagcaggggcggggcaggagggagaaacaaactggctggggcgggagaaaacgcctgcgcggggcggggagaggtaggatttagggcccgacgcttccgattattttaagctgagccacctagtgagcgaggctgtccgaaggctgactctaagccttttagggaattaaacggaattaaactttggcgactatcatttgggttgcccagcctttagctctgggacgtctagttagcttaagtgactttttccaaaggtctaaaatctggggcacgtttttcagtatctccgattctccgttttcttatgtgttaatagggactaataactacagtcatatggttgttaggattaaataatgtgcataa

SEQ ID NO: 43159 - DNA, 1625 bp, Homo sapiens
tagcaagttatttaacctctcagtgtcttagtttttcaatttgtgaaatggagataaacggggatgagaatagcctcacaggattttggaaggattagtcaataagccctgctaaacactgtttactattgctagtatatagcgcagacaaataaatatctgcgacattcctctaattccaagaagtcgtttgccttggttcacccgctaaataatattaagagcctttctctttaaaaagaggagcagcaaattacttttcattaatatcatcagcataataatagacttagttgagagattcagcgtggcagcacttcacacaatcgagctctcttattgatcatgtcataacagcatctctatttcttaaggactcatttcacgtcatacacccatccgatgctcctttttcgttagcctccgtctcctaagtgggcttatctgtctcctgctatcaggaaggcactaacttttcctttgggttgttagggtagcaaagtgattttcaaattcagggttctggctccttctgcagcccagagaggaggaaacagggcgggacgccgccggattcctgggcagggcttgagtggcgcacctcgaggcgccggcgacgctggcgtgtgacgttgctgcctgacgcaggcgcagtgccgcccggcctcggttgggacccctcccctcctcctccgcccccttgggtgtcggtggctgcggccagggtctggacctgggcggcggccccgggcggcggggctaaagggtgtgggcaccggcagagcttcgcaggctgcatccggctcggtgctgctgccgtcgccgcccctgccgccgcccaaggccctcggcgttccccggagagaggccagagggatttcgggctgcctcggcactcgcccaggtgaggggatgggccgggccagacggggttgaggtcgtcagcccctttttccagtgtctctggaactcaacctggtcggagtctgagagctttggcttagtagtggctgcctgcggcggcgactccttcatattcctttgccatccttacctacagccctggcacctataaaccgagggttggaggtcagtggcaaagtctggaagggccatggcagtcggatggctggggactttgatacaggagcagttcctgcgggtgatggtaaggcgctccacttgctggtgtgtggactcggcaggaaggaccgtgcacccgcaggctcggactgcagccttgccagctgcactgggttgtagtagaccccatgctgcttaatatagggtcggttgaccgagggcggggaagccttggaacaacccccgctttcttctctgggattgatgtgttttgtattctgaattggtgcttgctgcactgcactctagaagactacgtttcagcagaatttcctattggtcaaaggaaggtgaagagaagttgatttttcttccggagagtattagttgttgtcgttttttttttttttttttttaccttcctgttggccttagtgttgacgtttgttaaaggtaaaagttcatgtgaatttcctttttaaggaaatcatgggctttataactgtctaagcgcctgtaagtttcaaccggtttagtggttt

SEQ ID NO: 43160 - DNA, 1498 bp, Homo sapiens
ctcttttcttccattggtctgaacttgtatggtagttagatgcctgtaatacacacacatatgggtgaaagataaattatataactggaatagttagcagaaccagaataattgatgataaactatattaaagtacctatttcctactataaaatgaatctcaacaggagtaaggaaggagtgcagttgctgccaggggcagccttccttgctctggcggaaaaacttcggccccggccccagcagaaggttacagcttcacactcaccaggtccccagccggcagccggcgctctcagccgggacctcccggcgtcacctcccgcagccccgcccaacccaagtcttcacagctcactggcggttgctaaggccgctctcaccgacctctctcagccccgcccacccagcctgagttattgacatccagttcatccaatggacagaaaaaaaggcctttaaaccagccctttctctctactccctaccaatagcgtgacgtccccgcctttcgcagcccggcgttaagcggaacttctctctccagctgtgtctcttagcaactaagcccccggctcctccagaagcccctcttcgcacatgcgcaaactgcggacggggaactgggctccctagccctggcgtttttggtgttgctgtcccagccagaatcgcgtctggccggtgggaagccgggaactccagccccctgtaggagaggagaaaggagcgaggttagtagtgaggtgcttccgctgactgctaagctaagtctttcctgaagacgtgggagcccgtgtgtttgatttttctgtcctcttcgggccagggaaagaatgagaatctagggcctggaggtcctggggtgaattggtccagcatgtggctaggagtactagaggaagaggggactgccctttctttttgccgctagactttcctcattttctacagtgcctggagctgggccttcagccatttacctcctccctgttttgggcagggattctggcatggtagacaccagaattctgtatagcagtggcatggggtaacagtgtcgttggagggacgtgggtattgggataagcatgggtcttgggatgtatttaaagcttcactacatacatagataaacgtttttacatgtttcgtgtagcatttgtttacgaggtaggactttggccccacccataattactatcggaccccgccctccaaccccaacacacacacacacacacacacacacacacacacacacacacacacacatccagccatttccttggcccagtcctaagatttggccagttgtcaacgatatcaacttgatctgcacttcagagtcagacacaggtagtctgattatccagttgattcagtaacggcctagatttagatacttgtgaaacttttgtaaaccaactcaatctcttgtccagagggccagatttactgcttctgcccgttctgaatttggccaggaatcagctta

SEQ ID NO: 43161 - DNA, 4102 bp, Homo sapiens
ccatgttagccaggctggtcttgaactcctgacctcaagtgattcgtccacctcagcctcccaaagtgctgggaatacaggcttgagccactgtacctggccgacgcatacattttaaagtagtgaattttatgttatataaagtatatataatcttaattttaaaatgttattaaaaatagtaagcatgctgtatgaccatgtttgcaaatttcaaaaacaagcatgtcttaaccaaagtgttagaattcagtttagtggttatctttggggaagagggaagaagtcgtgaatagccaggagaacaaggaaggctctgggatgctgacagcgttcctattccttatcctgggtgttagttacaggggcaaacttgctttgcgagcattcatttttgagctgtatatttatgatttgtgctttgggaagactctgagtcatcgagagaagcttaaaaaatattcaagctcctcaattttcctgcattcctgagaatgcaggaaagactgactaagatttctatcttaacctataatcaaagcaagtctcctaagacatgacgataatttttgacagtagaggtcatttaatattggaacagtttaccaaagaaggctatggaatctctgtcttcagagttctctgaaaaatagccttgctgtaaaatcagttctgttttgggacagtatcttgtagtaattggtcagatactatttgagatctaatccagtctacatttaaattatatctactttttattctggaaataaaaaataagacaaaacaaaaactcggagatccttgattcctcctaccaggaagatacttgccaagaagacttaggtaatgcatatatttttagttatagcaaactattgtaatctagtaagccagtcatcaagctgaatttccctaaactcaatttaattttttctgtctttctcttattgccaccacatttttcttaattgctgtcaatatgctgacagtcctagactcttctttccttctttctttacttactgcttttccaggctctatgaatttagttctttctcactttctttatatgctctggggttttatcacttcattgcctcttttaatatttctctagtttcactcatatgtctaagacttttcatttccagaaatgactacgatattgtgaggctctagaaaatgtccacttcatttgcaatatgtttgtaagctaagacagtatggttcaacattgttcaacattgactcctctggttccaggattacctctttagaattgagtcatttagcattgccactgatttcataatctctctttttgcatgcaatccatttcctttgaaatctttttgtgaatttccagagccccttcttattccattacttatcccattccaagactatgcctttgtattcttacatctaaggttttatttcttttataaagaaaccaaacagcagttttaaatttgctttgttcttaattgttctaatttctccaaggctatcaccatattataagttctcataatattagccagattcagagaaaatgcctaattttttttctagttctcaatttttccaattgtttcttcattgattgacaaatcttatgtcagctttttattaatgatgctatttgttttcacttaaggaaagtaaaataacagaaaaagtgcgtcttatttaccagctactgagtatgtatgtatccccttattgaggatcaaatccctgcagtagcagataatttttctagctagaatgaattttatagattttctctttgaatcacctcattttacagatgaggaaactgagacccagagaaattcacatagttaactactaataaagtgatttttatttcacaattctttgtcactttatcgtgcttaacttacatctttttttctgagatatgtgtgtgtatgtatatatctgtgtgtgtatgtgtatatgtgtgtgtgcatatatataaacatatatatactttttttttcttttttgaaaagacaagctctttcttgctctgtcacccaggctggagtgcagtggcgtgatctctgctcactgcaacctctgcctcctcagttcaagccagttttgtgactcagcctctgtctggagtagttgagattataagtgtgcctcaccatgactacgcctggctaatttttgtatttttagcagagatggggtttgacccatgttggtcaggccagtctcgaactcctggcctcaagtgatccacccgccttggcctctcaaagtgctggaattacaggcatgagccaccgcgcctggcctctaagcaatattttttaaaatgttaataatatttttaacatgggcacactgagccagtttagctttcctcatgtttattttctttaaaactgtttggtaaatcattacctcctttttagtactagctgttcaagttaactatttctgcaccgtttaatacattattatattagcacaaatttaagaactttctcaaggtggtgcacctttctctgttgggggtagtgtttaatatattaatttctttttaccccccctttactgaattttccaagtctactccaagaaaacatcaatttttctacattatcaagcttgatttctttttaaagatacaccttggatgataacaacagctgacctatattaagcattatgtttattgctcccattttactgatgagataactgaggcacagaagtgctcttcgtgacacggcgggaggaagcctaggctttcttgttctagatctaattctctttctactttttttgcagcaatttggttaacatgattcaatattgctgacaaacttcatttttgaataaacaccattgtaaatcataaaaagtttatttttgtaaaattaccaaggctataaatgtggaaaagatattaaattcattttctctagctttaggctcaaacatagtaatgactagtagcatctgaagtggtgtgcacccactccacagagggcacaaaaagatgcatgggagcacagggagaaatatcaaaactgcatttttatttaacattgtatatatcccattaataaattcaactttacgtgttgcttaatgtgcattctatacttgtatatagtacttgtgtataatttataaatttgtaaaagcaagatttaacctcatccaaagagaggcctggtctttgccctcagctcccaggaggtgatctctgagcccttgcagtgtcctgcctgataagagtatctttgtttacctggggacgttgggccacactggatagtctaacagtgtgatgtatggtgtggtgggggcttggggccatgcaatatcagtgtgacatttggtgggactggagaataaaggcatgaccaagccccactagaaactgtggacatcaaggtttgagtaagcttccctgtttagcaatactcgtgtgtattgtcacacatcattcttagcagtagttaatgctgtccatgactccacagggagaggacagttggaaaccctgcccatggaacctgcctagaccctgccctatgcactccttcctttggctgattttaatctgcgtcttttcattgtaataaaccataactgagtataacaacagttttgaatgagttctgtgagtcctagtgaattattgaacttgaaagtggtcttggggaccacctgaacttgcaattggggtcagaagtgtttatggacctgggttctttcacactctgttttggtagctatgaacagaaatgttgggcccattagtctaggccatattagcaaatgattacctattttcttcttaaagttctaggaagatgtaaatttctttaatgatctgtgtcttagtccatttgtgttgcaaatggagtaaatgtttttgttgttgttttgttttgttttgttggggttttttttgagacggagtgtcactctgtcgcctaggctggagtgccatggcaaggtcttagctcactgcaacctccatctcccgggttcaagcgattctcctgcttcagcctcctgagtagctggaactacaggcatgcgccaccatgcccagctaattttt

SEQ ID NO: 43162 - DNA, 6996 bp, Homo sapiens
aaagtgaagttaaaaaagagaaaaagaaggacactgtccaagctcagaagattcttgacttcgatgaagttgtaatataaacagtttaggggaacatgggatttaaaagcaattttaagtgttggaaagcaaacagcatttccatgagactatcattggaccatttaccaatgtcagttcccgcttttagagctaatcatgagccttccattacaagttcctagccaagctgatctagtccagcttaaggtttgtagtacatcctttcccaagtcaacaaaacaaaacagaacaacaacaaatactgtcactaaatgaacatttcattagatatccctttcccagctagattttttcttgccctgttacaaaattaaacaagttatttcttctgggttccatgtttgaaactctccggtagatagggttgttgtaaagatcaaaaagacactgtatatgcaagcacttttaaacatacgaagaatcatacaaatatatgacaaatagtattaccaaagccacattgtaatatgcggattttttccttttgttttcatttttctcttttattccattactattttcttaataaccaaaactgctatgtcggaattataaactgctatgttgaagttcagttaggttgaaaacgaacatttttggttttggctttcagtaaaactaacaaaagtactcaacattgcaaatttttaccctcaatcgaggctgatgtgctaaaaaagatcagaaaacagaatctaaagatgccattttctaaaaagtagtttttctcctcagttttaatgattatgagtttcttttgttgttcttgttgctgtcattaaaactgccatggaagtaaaattccataaaatggcatgcattccatagaaatctcaatttatacttcagggcaatttgagttgttacaaataccattttactggaaagaaatcagtggccatgataaattatttattttcttagtgtttgcaaacaaaaacctcttttgagaaacagggtatgtataaaagaaggtaaagaaaacaagaacaaattgtcagatgcctacagacacagggagtatggtctgtggtttgtgtctcattcctagggggttccgcttagaagaggtactacagcaagcacacagtttgtgtattaaacatgtaaaaatgaaaagccaaagtctgggccaggcgtggtggctcacacctgtaatcccagcactttgggaggctgagacaggcagctcacctgaggttgggagtttgagaccagcctgaccaacatgaagaaaccctgtctctactaaaaatacaaaaattagccaggcatggtggcacatgcctgtaatcccagctacttgggaggctgaggcaggagaatcgcttgaacccaggaggcagaggttgcggtgagcagagatcgtgccattgcactccagcccggccaacaagagcgaaactctgtctcaaaatacacacatacatacatacatacatacatacatacatacaaaaatacaaaaattagccaggcgtggtggcgggcgcctgtaatcccagctactcaggaggctgaggcaggagaaccatttgaacccgggaagcagaggttgcagtgagccgagatcacgccattgcactccagcctgggtgacagggtgagactccgtttcaaaaaggaaagggaaagggaaagggaaaggaaaggagaaaagaaaagggcagaaaatatgtaacacaccttagaaaaatttgtaactcaaaggactaaaatgtttatcaaagcactgtgctagagcttgctggccagtttacactctgtattggtcagttcttctgtatagaggtttcataaaaagtcaaatgcgcattcctcactgttgccattgccaaaattcctaaaattcctgtccacactaataggagctattgtcatcctaatgactctagctccaccagggatccagagccaaggatgccaaactagtgacacagaggcagctagtgctgcccgtgctttcccctcagtacccagggccctcgccttgctgtgtgcctgccaggtcttgctgctatcatctccttttcaccccattgaaacttcctcctcaggccagcctctgtggtttaggcagtgtaaaattctgataatttctttggagttaataagctaatgagaaaagtaaaatgagccttcctctatcctagcaaacgggcccaacttcacagcaaccttctggagctatgtgacagtgctgttaattgaatctgtctcatgcaaaaaagaaacagcaattatgcagttcactgtgaatagagccccgtgctaagctttgctgggggcatttaaaattgtgtgagacattggagcgatcttcacaagcttcagtctggagaagaagataaacatgagcactgctacctacaattaaagtaaacatgttaccaaaccaatctggccactgtgcaagcctgaccatgcaaaaaagccctgtgcacttcatcctggacctctctgagaaccatgaaggctgtgagaactctgtgaatgggacctcccttcagcaactgaagccagtgtgatgatcagctaaaaagaagagtttaaaatctttttagagccaaccagagatatgaactcagaatctggcttcacttggtgaatttcctccttcctcctccacacctagccctttaaattcctgctcctagaaatcagctgaagtaatttcttaaatgccatgttaaattaagtttagcctaaaggtgcctcctttcatattttaaattcaccctaaaggtttctctgcaagtgatgaactgtaacctaactggatgtgtaaagagactgcaacctattcttgtaccattaccaagtttctgcaaatcaaaggcagccaactgttcaaaccgattttaagtaaggcaaatgccaagatgtaaccaatccagttgtttttctgtaggtcacattttttctgtctgtaaatactctccaatcacatggcaacactggagtctctctgaacatattctgatgtggggggctgccaaattcacaaattgttctttgttgaattaaactctgttaaatttgatttgtctacattttttttctttttgtttaaagttttctcttttaacagatgtcatcaaaagtgggacccctgctagaactgataaatgaatttattaaagtttcaggatacaaaatcaatgtatacaaatcagtagcattgctatacaccaatagcagtcaagctgagaaatcaagaactcaacctcagccaggtgcagtggctcacgcctgtaattgcagcactttgggaggccgaggcggtggaacacttgaggttaggagttcgagaccagcctggccaacatggtgaaaccccatctctactaaaaatacaaaaaattacctgggcattgtggtgggcaactgtaatcccagctacttgggaggctgagtcacgagcatcacttgaacccaggaggcggaggttgcagtgagccgagatcacgccattgcactccagcctaggcaacaagagtgaaactcatcttaaaacaacaacaacaacaaactaaaaaaagaactcaaccttttacaatagctgaaaaaaacaaaacaaaacaaaaccacaaaaaaaacaccaaggaaggtgaaaggaagtgaaagacctatacaaggaaaactacaaagcactactgaaagaactcatagaccacacaaacaaatggaaacacatcccatgctcatgggtaagtagaatcaatattgtgacgatgaccatactgccaaatgcaatctacaaattgcagtctccatcaaaataccaccatcattcttcacagaacaagaaaaagcaatcttaaaatacacatggaaccaaagaagtgtccgcatagctacagcaagactaggcaaaaagaacaaatctggaggcatcacattccccaatttcaagctatattataaggctatagtcaccaaaacagcatggtcctagtataaaaataggcacatagacccatggaacagaatagagaacccagaaataaagccaaatatttaagccaactgatcttcaacaaagcaaacagaaacataaagtggggaagttcaccctattcaacaaatggtgttggaataattggcaagccacaggtagaagaatgaaactggaatcctcatctctcaccttatacaaaaatcaactcaagatggatcaaagacttaagtttaagacctgaaaccacagaaattctagaagaaaacatcagaaaaacccttctagacattggcttaggcgaagacttcatgaccaagaacccaaaagcaaatgcaacaacaataaagataaacagatagggcttaattaaactaaaaagctcctgcacaacaaaataaataatgatcagagtaaatagacaacctacagagtgagagaaaaatcttcacaaactgcatcaacaaaggaataatatccagaacctacaagaaactcaagcaaatcagcaagaaaaaaaaaataaccccatcaaaacatgtgctaaggacatgaatagacaattctcaaaagaagatatgcaaatggccaacaaacatataaaaatatgctcaacatcactaatgatcagggaaatgtaaatcaaaaccacaatgcaatatcaccttactcctgcaagaaacgccatagtaaaaatgaaatttaaaaaaaaaggagattggcatgttagatatgagttctaaatttcttctcaaagaatcaatatgtcagtatgttcaattctttgccttctacttttaaacttaacttccttataaagggacttttttcaattacttgctccaccctgactcatttcaatcacctgctccaccctgactcatttcaatcacctgctccaccctgactcattccaattacctgctccactctgactcattccaattacctgctacctgcttccccttactcattctccacccctcataaccattttctcccatcaaaccaccaccctgttactgtctttaaattagccaatcggaattagtttagcctgtgcggtctaaccctagccaataggggaatgacacagcatcaggggccacgtgcgtcaggaataagaacccctttccctccctcgtccacatgtgcgctcaccattgctccatctgttaaggccgcatccttctatagaagtaagttgccttgctgagaattaaaaagaaaattttatattcgggtgctatttcttttgcggcaccaaaactttacttataacagtgtggatatggtgaaaagggaacacttttacactgctggtgggaatataaactagtacaaccactatggaaaacaatgtgaagattccttaaagaacgaaaagtagaaccaccatttgatccagcaatcccactcctgggtatctacccagtggaaaagaagtcattatatgaaaaagatattttcacatgcatgtttatagcagcacaattcataattgcaaaaatatggagctagtcaaaatgcccatcaatcaatgagtggataaagaaaatgtggtatatatatataccatggaatactactcaaccataaaaaggaactaaataatggcatttgcagtgacctggatagagttggagaccattattctaagtgaagtaactcaggaatggaaaaccaaacatcttattttctcacttatagtgggaactaagctttgagaatgcaaaggcataggaataatacaatggtctttggggactctgggtgtcacctgtggagggtgtctcaggttcttggcatcttgaacaaagtattggacaaaacgcacaagcaaagcaaggaaggaatgaaggatttattgaaaatgaaagtacactccttagtgtgggagcaggctcaagcatagtggcttaaaggccccattacagaaatttggggagtttaaataccctctagaggattccactggttacatggggtatgtcctatgtaaataaagaggatgaagtaaagttacaaagttatttacttggcctacaggctatggagaagatatttcctgtcacagctgaagtgcaaattggccttatgttccctacctccagaccctgttgtcctgcctcagggaaaaaggatgggagggggtaagggataaaagactacacattgtgtaaagtgtacaccgcttgggtgttgggtgcaccaaaatctcagaaataaccactaaagaagttagctatgtaaccaaacgttacctgttcccgaaaaacctattgaaataaaaataaatgaataaatagatccatagaaccaccctaaaaaaacagtgggacatgaagtagagcttccagcagcccccaggagcactaagtgaccaagcaaggtacccaggcttatcgtggccattgctctctcagagtaactagggatcatgggttaagttctcactcagattctgaagtttcatggatttgtgctttcaactatctgtgtttgtctgagcaattttttttttttaatctgaactgggtttggaagttgcaacagaaactgtggactgggtccaggattggatctgacctgataattaactggactggattcatttagaagccttggatatccagctgggtcagacagaaactggcagtaagtggcaatactgcaggggtacaaactctgacttttggaaatctgcagggattttcatattctttgtttctttttcttttgcacttaggtaaagaaaaatgattggcttagttggtcaatggaatctaagagccacagccaagattcaatgtaaaattagaatctttaatttctgaataactgactgctccaccctctggctacatttacctgtgcatgtataaatgttagaccatggaagcagtaacacttatagcaatagcaaaatcttactaaaggtaatttaaaattatagtggaacattccaaatgaca

SEQ ID NO: 43163 - DNA, 2927 bp, Homo sapiens
tattttgatttgaccctagaaacaatgccaacaaaatgaatgttgtgaagaagttgcggttgatctggagaaaaagggctttctatgtatagtggatccaatactttataggccataatctctgatgaagaaatgcagcatttaaaatttttttgccttttttttttttgaaatggagtcttactctgtgccccgcaggctagaaggcagtggtgtgatcagaacttactacagcctcaaatccctggctgggctcaagcaatcttcctactttgcctcagcctcctcagcctcccaagtagctggacttaaaaggcatgagccactgcatctgctaaacttagtctttatgtttctcctgatgtctcaaaacataatcgagttggttctacataaatacaatcatttcagtgtgtatcttacttatttcagatttaaacatggccagtcattcaagaactttccccaactcctcattctcccaaaatagtagctggtgttggagggaatgtcttaggtgagattctctagaagccaagcctaaggcagagattcttatgcaagtgactgattgagggagtgctctcagaacaaagctgtaaacaaatggaggcagtgggattcctcaggggaagaagttaagcacatgaaatttcaaccgaaatctagcctcagcttgcaaaggaaccctggaatgtgaatggaatcacaaagttgagcccacctgtgtcaggtggccaggtttttgtgccccatctcagtcctagtcattgactcccagcgagggttggagtgatgtaacctcccagctagttttgggcagatcccagctgagggcaattttctggagaagagtagccgtgtcagctattatcagccaacacttacaacagctggggatgggtgtgctggtcaaataaaggaaatgggtgagacaaatagtgtctactagaaggagctttcaagatgtccaggcattgggccagtgttctgaatatttggtcttccatcgctgtgtcactactatgtcattcaacagtatccatttatcagcagataaagggataaatgctgcacagatgtgctgacccatttggtcctcagctggccatcatcagctgagacatacctgacaattcatctgatccacaaatgtagccaacgctgtagcacctccacatcccagccttgagatccccataggttctctctgtctctctttctccctgtctctgtcactctctcctctcttggagcctggaaagcattgactactctcctatcacttggtgggtgaacagggttatgagattacattaggctgtgtgtgggtcttcttttgagacttacaaccattcctgaaatacatcttgggacatgaggctccctcaattttggaattcggcaaacttattgggagattctcttctggtaccttccagagtttcaaccccataaggaaacaaatgtgccccttatgtgccctcagattcccatgccagccacttcccctgagctgctttcctccctctgcttgggcaatgcttcttcatctaccttctttacagtgtattgttcaggttaaacttcatgcctggtgattttcctatttgaaactaaaaaaaccttttctttctcaacagccttgatttttgtttttccttcacaaactgttgtctcagctgtgggtttcaaaagtctattcttaaaacacaaaagctaaacaataattatttctttctttttgcgttcctgatttaataattctaatcctccctgaggcaacggatgcctctgactggagcttctgaaacaaggaggttttcagaagaaaatacacacccctgccacagtcaagagggcgtggcaaagtctaggccctatcttggggacacttggaggatgagaagttcagtaaagagaaggaagggtgccagaaaggcaaatggaaaatcaagatgagtttttagaggtttcagtttcagtcttgttagggcaatccctagatcacttcccccatccagggcctccctgcagagggcatgtcaggacttgcaggatctggctccggagaagagaataggatggaaagaaaccatttaaaatttattcaagatattcaaaatatgcagcaatgaaaacgttggcctaggttcagatacaccaacaaatatcctaaatgcctactgctagagaagaatttttaaaacataagaatttatttcaaaatacatctgacaacgaaataaaaggagtaatagggaactggtaaaaggaaaatattatttttcttcattctaggaaacacagatgaagagggaatattattctggttaaaaaaaaaaaagaattagtggcatgattgaaaagggcttagtaatttaaataagaggtacagctatccagtgtgttccggaaactcaccagagtgaactgaggcttggccacatgatctctcttgattccagatttttgggtcaaagaaacgtttccaaaaaaaattgtttttggtaagcatttttggctgtttataaataaatgtttagagtttgcttttttaaaaactttttggccttttaactgatagttcattatcagtcaataagctctgaatcaggttatagttgtaatcatattgttaacatttgctgagtgcttattatatgtactttacatatagtaactcatttaattctcacaagaacccctgagatagatattatgagtattcccgttttacaactgaggaaactgaagaaaatttaactaaacacttactatgtacaaggaattaagtgctttgtatgcagtatttcatctaatgcttttaaaaaatagctatgaggctctattattttctccattttatagatgaggaaattgagactcgcagagttgaatttattttaagatgacataattagtaa

SEQ ID NO: 43164 - DNA, 1834 bp, Homo sapiens
actgcaatctcaccctcccaagttcgagcaattctcttgcctcagcctcccgaatagatgggactacaggtgcataccaccacgcccggctaattttttatttttagtctagacgggttttcgccatgttgctcaggctggtctcgaactcctgacctctagtgatctgcccgcctcagcctcccaaagtgctgggattacaggcgtgagccactgtgcccagccctagtttggctttgaatgcagccactttaccttacaacttgaagttgttgttctgtcttggagtgacagattgagttcattaagcaggctgaatatgtcacaaaagtaatcaagttttgtgacccattctgtggcactaaaatgtgctgccagtggtgacttttttctaaatgcctgcagcggctcttgtaactcaaaaactctggccagtgatctacttttagaaagccatctcacttctgtgtataagagaagacttgtgtgctctgtgtccatctcctcacagagctgtgtgaacggatgtgagttaagggtatgtattttaatgtggttgataattttatcaacatcctgcaaaatgttgttaagttcaggtgacagtttttgactagccagcatttctgtatggatgacacagtgtcttctgaatgtgacacactcacattcggagtgacatctttgacccaagtagtgaaatcagaaagctattcagtcatggcagccactccatccatacatatgctggcacaaaatgaccaatgcagttttcccgatatgtaatcattcaaagactttaatagttctgcagccatggtgttggttggcaacaaaagtgcatacaacatatcttcatgcacatcctcttgaaaaacatggcattgtcccctgttgtcaatatctctggagtcatcaacctggattgtgtaccacagtgactcattaatcctctctaaaattgtgacgcaatatcgtctgctattttatcatttcgtctagttatggtgctagccaaaagaagaacatgtgccgccttttgaactgcagcctctcctaaaagttcacagcaaatatccttagagcaggcagggtcaactcttcaccaatagtaaagggcttcttagctttagcaatgcagttagccactaatgaagctctcagtggagacacatttgatgacgtggtggccttcgaaaattgcttctgttcatgttcacattgttttctttttttttctttcttttttttttttttagacggagtcttgctctgttgcccaggctggagtgcagtggcgtcatctgagctcactggaacctctgcctcctgggttcaagaagttctcctgcctcagcctcctgagtagctgggattacaggtgcctgtcaccatgcccaactaatttttgtatttttagtagagacggggtttctccatgttggccaggctgatcttgaactcctgacctcaggtgatccacccgcctcagccttcacattgctttcttttttaaaaaaactccaaagacttgtcttttaatgcttggtctccatgtcacgaagcagtttttaaggttaccggttacgtggcttcgttggatagccagtcaccacatattatacaaagtgggctcagagaatgtcaataccctgttgcaatgagcttgtaatttaagtcagactcttggtattttcttttaaatgcagctttctttctgttggcagtcttagagccttctgctgtcacatcactcggtctttcccccttttcaaagaacctttccagtgacgtttgtttttcactcattttggctagggttagcctgtgggtt

SEQ ID NO: 43165 - DNA, 2597 bp, Homo sapiens
tctgtcctttaattttaaagtttatgccccacttgtacccctcgtcttttggtgatttagagattttcaaagcctgctctgacacagactcttccttggattgcaacttctctactttggggtggaaacggcttctccgttttgaaacgctagcggggaaaaaatgggggagaaagttgagtttaaacttttaaaagttgagtcacggctggttgcgcagcaaaagccccgcagtgtggagaaagcctaaacgtggtttgggtggtgcgggggttgggcgggggtgacttttgggggataaggggcggtggagcccagggaatgccaaagccctgccgcggcctccgacgcgcgccccccgcccctcgcctctcccccgcccccgactgaggccgggctccccgccggactgatgtcgcgcgcttgcgtgttgtggccgaaccgccgaactcagaggccggccccagaaaacccgagcgagtagggggcggcgcgcaggagggaggagaactgggggcgcgggaggctggtgggtgtggggggtggagatgtagaagatgtgacgccgcggcccggcgggtgccagattagcggacgcggtgcccgcggttgcaacgggatcccgggcgctgcagcttgggaggcggctctccccaggcggcgtccgcggagacacccatccgtgaaccccaggtcccgggccgccggctcgccgcgcaccaggggccggcggacagaagagcggccgagcggctcgaggctgggggaccgcgggcgcggccgcgcgctgccgggcgggaggctggggggccggggccggggccgtgccccggagcgggtcggaggccggggccggggccgggggacggcggctccccgcgcggctccagcggctcggggatcccggccgggccccgcagggaccatggcagccgggagcatcaccacgctgcccgccttgcccgaggatggcggcagcggcgccttcccgcccggccacttcaaggaccccaagcggctgtactgcaaaaacgggggcttcttcctgcgcatccaccccgacggccgagttgacggggtccgggagaagagcgaccctcacagtgagtgccgacccgctctctccgcctcatttccatttcgtgggttctcgcccgctctctcccctccagcctgcaccctcctcccggatcttcactgcgaccctagcgctccgtgtggtttctggccgcgcggccctcggcggtttcgggttcaccactcaccccctcctttccgggctgcggcgtaggcccgggtgtcccctgggctttggggtgtgccaatttgccctgtaaaccagtacccccggcccggagccgcggcgcgccggggcctcgcggactggctgtcttcccgcggacaacctgtcgcgtcggggatgcccgcggccccgccatgcagctctggccgcttctatctgctgcgtgctgtcccggggacaaagacaggaaggaccgcagcagaacgaaacggtctttactggaaaaacacctttctagagtcctgcccttaaattccgactcgggacgacccgaggcatatggcacactactctcacccactctgttttatatttttccgaattgacgaaagctgaaagagcaaaaacaaaaaccaaccagccaaccagcaaaaaatccagatgttgttaataaagtgccatagctttgtttcagtagtgaaaagaagtgcaaacactttaatcttccacctgcagtgactagctttgagaccttgagccgacgcttaaccccagagccggtttcctcatcgctcacgtggggctaatatattactaccttgcagcaggcttgaggatgaaatgagaattgcagttttgctttctgtaagaaacaatgtttgtggttctagaaagaacactggcctaaataaggagtgcttggactttaggggattccctaagtctggagtgggggctgaagatttgcatttctaacatgttccccggggatgctgatcacatcacactttgagagccactggtctagaggaaagagaaagaaaggggcataagatgagccgatttacaacactgatggaatttgaagtgagagaaagaggactagaatatattgtaacctgtcctcctgtaagtgtatgtaaacatgtgttttaaaagctgtgtgttatggcgttccttcctttatgggttccaggtggagaatctgattctctcattgcctgagaaaagacccacaggggtcccagcgccactcccctgtagttctgcctttgtcttgggatgctaatgggatgtcatgaggggaggtggaggggggctggaagagaagaaaattctacaaccaaacgtgaattggcagaagaatgggcaatacactttcatatgagctgagtctttattgcttccaaaatagcaacctgcaagagaggcaagtatttaatttttttcaggcttgccataatttaaaaattttatcaatcacttaatcccgtaaaactgaaaagatgcttgtaacctattagatgggttagtgctagttctctattctggtaacttgaactcatctatttca

SEQ ID NO: 43166 - DNA, 906 bp, Homo sapiens
aattgtgtgttggggtgaaactttagtttatggtgagtgattttgtgagaaacatctctgtgaagctcgtctctgtgtataattaacagaaacattaaagaaatgttgaggactgttgttgatctcattacatagtgtccactctgaggttccttaggagaaacttctctgtggtaactatgttgggtctagttatgcttttccttagcagccagcttatttttatcttatggtctctgggaaatttcttattgctgctggctactagaaagccaaatatatggcctgcttctagcaagtataataatctcactcctggcttcatcagttttaaacccttcatttgtatttgccttattaaaaagccatttttaaagttttttgttttggtatattgtcaatatctttgtaactcaccttaaatattacttgggatcaaacacattatacctcaataaaaataatatattgattaatttgctatttttaaccacaaagtaccactatattatacagagcattgggtgctggagatgaaaaagtcaaggcccttgtcccttaaaatgtgttttgtttggcacgacaagaaagagatataaatcaataagggcaataaaatgttttgcctgctttgcttgtggtgttttccatgggacagtgagatcatagcaaggatagcagtaagttctaatggggaagtcataaaaggcttcaaacaggagtgacactgaacagaatgtttggaatcaagtagatgtttgccaggcagacagggcggggaagggcaggaaggccaaggaggcagggccaggtctggcatgttttgggaaccaaaagaagtttggaatggcaagaagtaagacctgctagctaggcagggactggattatgatgggccttgcaagc

SEQ ID NO: 43167 - DNA, 1477 bp, Homo sapiens
actctggttatttttaaaacttgtaatttaaaaattatatgccaatggaaacactcttcaagaatcttacatgtaatgcttattgcttagtggtttaatgaatgacaacaatccctgagtgtgggaatagttgaggtctacaaaaggttaatgagtaaatgaattatgtttactttgggtattgagtcactggtactgatctggccatacacgaatatccctaatcaccctcatgactagtaatacacatttataagatggtggaccagagctgggctagcgttgattgataagggacagaaagaaagtatagcgattgattattcagccttgcctcatgggcatttgtacatccttatgagttaaagtgagatgcaaatgcattcttcattaaaatggcttatctgaatcattttagagctgtatgcaataatttgcttatactcattaagataagtttggttatgttgattaaaaacaaagcttattttctgcattttccaataatattgtaaaaaatacttcatacccttcattgtttgggtttcatgtcttcattacattccttttacttcgtattatcttttaagattttgtagaagaatttcacttgggtaactgtaggcttaaatgatgcaatgctttctggaatccaggggtgactgacacacagaggtgactcagacatgaaatgttcaacaaaattctaagattgtcttttttttaaattgtaaattcttaaacattcataaaagtagtgagattagaataatgaaatcctgtgcttctaatgactgttaacacaagtgaatcttatttatcctatccactttattaaaaatttagttatctattatttaaaataatatattagcttattttaaagctaatcccagatattatgtttcattttgcatgtctgttgctgtcttggtaggaaaaattttaaaacataaattactatgacataatgatatctaacaaagttaattatttaagaaactttcaaaagttgctttttcatgccgtttccctagctacctataaacacctggaaattatatttattttatatttctaatgttattcaaatgataatatgctgatttctaaaattgcatttttttctgttgctctcaagaatatcctaaacatatccataggatgtgggatgacctatgaaaatagtctggacaaacatttatcttgtttatcttatgataagcagagttctgagaagtttggtaataaagagttaacttggtttaactaagattttcctaaattatttgacaccagaacctattttttatttaacatctgttagcaaaaatatatttgggggaatattgttctaggcaggagaatgctgcctctgaatagcaaaataatctttacttcatttttatttcaattaattaggtaattatttgtccatattacattatcatcataattaagtaatttttttttgttt

SEQ ID NO: 43168 - DNA, 607 bp, Homo sapiens
gtcttcttgtctatgaattcttttttctttttttttgttggggaggggcaggtggaaagatctgatcttggaatagggataaatatagaaaaatggattaaaaacaattatgagatgacatggacaatattcttatggctgacatgattacttttcttcctgttagagttctatctatccatcacgtgataaaagaaaagaatgagaaattataacatactcataagggagctgtacctttggctagtaccctatattcttcattcataaaataagttatggtccttttactggtttgctttgtgacacactcatttcctggatgaatgcttcttaaaagaatgtgtcatttctcaactatgctaggttggagaccagtggcatggttcccagagtttccatagactgttgattatgtgggtacagaattcaggctttcagtgtctgggctaggcttgacattaatttataaaggatattatgctttactttattaatgtagaaatatatctgtaaatatacctctatatcaatgcactgtcttctagattccatttggaaatattcccagaaggtttatttctccagaaactatgcagtctttgtc

SEQ ID NO: 43169 - DNA, 573 bp, Homo sapiens
ggatcaggaatgtgtgctataacagaggaataagtattagcaaatgtttggctatgacttcttaggaggctaaaggccagaacagagccttctgtgcactacaggctggtactaccactttattaaggtttttaattctctttagagatgactacaggttctaagagccaccaaataaaccattcatgaacctatctagggttaattactcaacagtcaccaagcctaaaggtatgaccttcaaatgactgtaaaggccatacaaaagaaactcagagtggaaaaagggaaaactctccacttgaatctttgtaagtaaacattacaggatgaactcagttattccaaagaatgatgcaaacagtgccactgtggattgagttttcccctacaatgggatgacgcctatttatttgttttgtcattaggtctggatctccctttgttttctgactatgttgaaaaacactaagaaacatttcagaaaacactttcacttatttgaaactaagatgaataaaactagagacgcattaagtgcaaccatgatttaacagagaaccataaaagttt

SEQ ID NO: 43170 - DNA, 3734 bp, Homo sapiens
agggaccagaaccagtgctatttcattactgatgcagatatgttatgtgtgaagctaacaacatattgcctgtttatccctctaacttcagttgttggtaacaaaacatcaatagttcatgttctaaaagaatatgaatagttgacttcttattccaccaagaatatggacttcttagtccataaagactaagaatagcggacttcatgtgtaaatagtctctctttataggcactaccattcagttagttttgttcaattataacaacagaaccagcaggagttcttcaaggtagcatagtgcagtaagaaaggtgtagagccagggcaagtaaatttttctctctgtgcctcactactgtcatctttaaaataggaataataatgctatctacctcaaagggttgttaggaggattaattactatttataaagatcctaaaacatctaccattaagtgcaacaaaatttgttttattgaaaaaatataacaagtatttggtacttaagtttacaaattagtttcatctttgatcaacgcatctatccagtaattagagctggcgttattcacaaaaagcaagctaagaagcaaatatttttggtggcaatttgcctaatgcctggctaagcacatggcagaacctggtacttaaacccagaatgtgcacctccaaatcgcacagctttctgctttgtcatgctgactggggtagtgctttgatcacctgtttggtcattgataagtatcagtgggtacaacacctgtgtctacccacacactggaagataaaacgattgattctcctattagtgacactgttgcagtataagcgggcttgtcagcaattactagcaagtaggagagaaaataatgtgaagaggtaagaagtctgggaatgaggatgagtaaacattgaaataactagctcaattatatttacagatatgcttcttgccatattgctcaataggataaagattattttgagtttccagtgtgagagatttttccatagttgaatttgcatgctatgccttcaattagattataaaaccctcagaggccgtttgaaaaactgctgcaccactaaatcgacttcttccaaagtgaaggctcctccatccaagctttcttatcattgggctcaaggttgaaagccagtaaaaagttttcttattgaagactgaaaccacccaccaccgtccctggttaatcataaaagaagcgttattctaaaaaactccagttctcgctgagacagctgttgacccaatttgtatacaaatgtgacactctgaacctctctggtttagtatttgatagcccaacagggtgactatattcaataaagattcaggctgggtgcagtggctcctgcctgtaatcccagcactttgaggggccaaggcgggagaatcagttgagcccgggagactgagaccagcctgggcaacacagtgagacaccgtttctagaaaaaatagaaaaaagccagatgcgcgcctgtagtcctagctacccaggaggctgaggtgggaggattgcttgagctcaggggttggaggctgcagtgaaccctgatcctaccactgcactctagcctgggagacagaatgataccctctctcaaaaaaaaaaaaaaaaaaaaaaacaaactgtacatttaaaaataactaagagtaactggattatggttgaatgcttgtggtgatgagtatctcatttaccctgatgtaattattacacatttatacctctatcaaaatagctcatataccccataaacatacacacctactatggacccacaaaaattaaaaataaaaaagaaaagcctctttggtccactcagtccaccacccgtattagaatgtaagagtttttttccttgggaaaagtgtccgacagaaccaaggctcggtaaaggatactaataatgtaataatataatattaacaaacatctactgagctttaaatacgtggcaggcactgtgctgtgcactttatgtgcattatccaaattaactctcagtaattccaggagttcttatcaccggggtctgtggaagaggaaatggtggtttacggcaatttccgaatgtcgcacagtagaaagtggaccagcaaccagggttgcagatcccaaagtccgggatcttcaccatttcacccaaccgccttagagacctcccagcaaaaggtctaagcacgaatgctccagaaaacaggtccaggtcacgcgtgccttctccctttccctctgggctcgacagtggtgcacagagcgactagggagtgggggccgcggttatttcattagaaaagctctggagccccgggagcccttcgtcccaggcgcacttgccctgcaagcccttctggaaggcggcagcgtccaggcggtccagcgcatcgagccgcgccaggcgcaccgagatgcccccgaatctgtccagctcgccctgcagatcgcacgctccaactggcggattccgcacgtaaccctgtgcgcccgaggcccagcggtaacccgccgaaggcccggggccgtaggttcgggcaagcatcgcgcgccagcggccccagctcagtggctgccgcatctccacgccgcttaattcgtccgttgcccaaatgacccctccgcgctccagagcggagatcgcggccgtacattttagaagagtgccatcaataccctcagagttgagctggggttaccactctgcagagctatgccaaggagaccgcgaagtggtccaccagcccttctcagcaatttgccccgctccagttaagcggggaaaacctcctcccccaccgccactcacttattttgtttggtagtttaattcaacagacgttggtttagggatggggaagccgggaggagatgcaaaaacgtcctgtttttcaggaatttacaatctaagtggcagttccgttcctggaacctatcttctttcacagatgccgttacagctgtttcaaagactgctggttttgaaaacgctcagtccctcccaccacgctgtgcactgctgcgctccactcaggggattacggcgcaggggcggaccctcgctgacttctgccccggaagtttttctctcagttgaagcgcgcacattgagtcggcttttctactgcttcggctagggtaccttgtgaccatgtcttccaagaagaatagaaagcggttgaaccaaagcgcggaaaatggttcgtccttgccctctgctgcttcctcttgtgcggaggcacgggctccttctgctggatcagacttcgcggcaacctccgggactctgacggtgaccaacttattagaaaagggtaaagaattccgggtgggagactagaggccgagggggcgcaacctgaggggcgggagactcagtgatactgacttggggtgcagagacttttgaaagttgggcgtggcatgggtctgagagcggcacagaagcgtgtaagacttctgtatgtaagaagcatgcaaacgtagccgcgcctgcactggagaagttaggctgaaatggtttatccgtgtccaaggtttctcttttgtaaattattttgaatttttaagttgcacttgaaacgctttgtctcatttaacattaacgacacatttaattgcaaaattgttcataactagcgaacatgggatacttatcctaaaaaactaaataaccaattcagtaaaaatgtggatcactctgcct

SEQ ID NO: 43171 - DNA, 544 bp, Homo sapiens
ttattacatactagaaactacttacattgctttacagtaaagaaaaactcacagaaaggtccctgcattaatgcaaagtaggatattatacaattggcagttgactctagtactttgtcttacctcctgactagcttacatttttacctttttcaaggttatgatgtggtgagtagagcaaactgggcagtaaattattagtcaaccttgtcttaggcaacaatcctgtcatcaaaagtgcagacatgtagggttggcccagtctcctctgactgacgaaatgagtactgactaacctgtagatttcccataacaacttctattgtccaggacatttcataggatcctaagatcctgaatcatactccttagctgacagtgattacttagtagtgccaaacttcaagtaggactagaacagatttggaactaggaacatattcctgaaacttagggtcattagctagagaggctcatcttttttacttaacttccaagtaatgtgactccttttgtttggaccccacttagtgtattaactcct

SEQ ID NO: 43172 - DNA, 1427 bp, Homo sapiens
gcttattgttttaacattctcctcccctgaatgtaaactcaggtggtagaccgtgtgccaccttactcaccatcgaatgcccactttatacacagaaagtattccatgaatatttctggaaagcctgaatgctccataggcatttgtggacggatgcctcaataaaatgagcccaggtcttccaagtattcttcctatgacatggtacctatcctgtcattttcctgtatcatcgttaaagtatcatcacagcaggcttgtctcctcccctttctgtccaggctggcgcccaagaattcgttagctgtggggcgaggaggcggctgaatgagttaacaaactgcccttccagtcgctttggattttgcctggactccagctccgtggggtgctagttaatgtttagtgagcggctctcttcactcccacccgcaaagcagggctgtgtcgtgctgccatctccgcggcgtaaatactcccgccgtggctgatttcaaggtacccaagggaggtcgctggccggggttggggagagcctctgactgtcacagagcctgctccagccccacccgtccccatagacaacagcctcccgtgttccctgagaaacagcacctggcagaacccatgcgtctgccccatgcccaccctgagcttccctataaatccagagtttaaaaaaaaaaaaaaaaaaaaaaaaaaaaaaaaaacacacacagaaataaggggagtgggaagggaagaagaggggactaaatttcttgtaggtctactgcctgcttctcattaggcctttgggcacatggacacgtgcctactttcatggcttccccgaaacacgtcagcttattacaattacttgttttcttcctctggccaaaatcagtggggaaaaaggaagtcgttcttttgttgctgttttggtttcttttatttcactacattcatttcttttcttcccgcagctcccacaacaggtggcatgacttaaaaagacataattcagtatcatgcccttcagtgagcgtgtggtgtcccacacagaaagctgggatgtcctcagagtaccaggtttgtgggagatttttgtttgtttgttttttagagtatgcttcagaagtgtaatttatttaccatgtttttatttgggtcagtgggaaagggctagcaattagttattttggcaaaggttcagttatgcctcaaaaaggaacacagacttaacatgttatataatcactcttaaaccacctctgggaagttctccaagccctgtgtgtcagtctccattgtgcttgtctggacacaacctctacaagaatttctattttataaagcagggtggggaaatgcccagagacagagctgagtccaattgcaaggtgacttgttatgggggagctaaagggaagaggttatcttatcct

SEQ ID NO: 43173 - DNA, 3680 bp, Homo sapiens
atatacgttttccctctagttggtcagaagtgatggcttggcatacaacttttttcattttcttttattcttcacaattcttttctaattcaacttaagagtagagtccaccaatccttttaattgagatcgacaactgaagattgctaactaaatccgaatgtattcctctatgacaaactgcatttgcagaatttttagaggcactcccgaagttttaagaggatgtttattacacgagtctgtagggcaacatttccaagttggtacacataaacgaaagaggaaacgatagttaaggaaatcctgttccaggttttcgggcagcccgagtgattgacacatgatatcaccggaggcgtgtcctggagtggaggtggaggtggaggcaaggagctgaaattctgcgtagccggagtgagaccgctctgcaaaccactgcgtgctttgcagagtgattatcagcacagttccctgccctggataaggaacagctacagtcgctgttaaatgtgcctgaaaagcaatttgcaatctttgcattaggtaagtaccgtttccttccgtagacattttaggaaagataaggtgagaaatgttgacttttgcaaggaactgaacatttatttatttgaacttgctttccagctaaggttactggttgcatttcaaaacaccggtagcattcccactgctaaaactaatgctcttaaagtaaatgctaccgctaaaagaaaaagcagggtccctttcacctttccttaaccgaacagtagacgtttaaagtctgaaacgatcgaatttgtgaaacacagagccgttaatgcctttatgcgaagaggggctagcactcggtgtgtggaccaaatgcgtgtttgtttaggcattgttggcgaccgaatcccgagtgaagcattggtttaaaacctgaatttcccgtctctgtgtattgattcctaacgcgcagaggcgttgcttgaacgttgtttgaactcctaggcattccagggggcaaaagcacctcggcaaaaacgtgcaggactgcatgttactttggttcgcggctgacacgccgactgtgcgccggcctgtcaatcaccgggagcagcaacagggagcacatggcaacgggctgcgggcgagctggccagcggcccgcccggggtcccagcccttcgaagaaagggacattcacgagcttctatctctaattctctgtcgcaggcatttcggccgtggaaccccaggctcggaggactgggtgtgagcgctgcccgggagaggctgacctgccgggaccggagtgcccggggacgctgtgcccccacttgcccaacgtgcggaatcggctaagcgcgtcggcctgcgcggggcacaagggacgacgcccgcctttctctctccgagaaggatccccaaacctcactctcttcactcctccccgctaaaaaaaaaaaaaaaaagaaaagggtaaaaaaatccccctccccctcccggccgcggcagcctctgcctggcaggcgcgtgctccgaggtttcgccggggtactgcgcggctccgtgacccacccgccgacggcggttcgggccccgacccgggcgctgcggagtctcgaacgcccgtgacgtggatttttcgctcgtcaggaagccgccatcccttccttcgttccttgcgaggagcgactagaacccgagttctctgagcacaccgtgccgtcagctggcccgtcacgcactcgactccgccactcccctacttgtttttctgagacttgggaagccttcctgaaaggatttgtaaaaactggttcttggaaaggggctgcagaagacctcccgaggtggatgttactgagccgcccggcgagcaccagccgtgacaggtccgggcccggccgcgcggagccgcgggagaactgccctccgcagccggaagggggccgcggggagcgctcctggccggtggcggcgggggcgggggaggccgcgagccgaggcgctccaactccggcgatgccgcctcgccctccccgccgcggttgatgcggcacgtgcacgccgccgcccgcaccaggacctgggccgggtcgcacggcttggcccccggccaccgcttcggcctaggtgagtgtgtgcggcggccgccctcggcccgctgggctgtaggcgcgcgggcggggctcgctcggcgcggcaggtgcggactcggcggcgctgctgcccgagccaggactccgggagaggaggggaggggagggacgacctcgctcggcgcggcccctcccgccgctccctgccccctgggggccgcggcttctgggggctcaaggttgggtggcggggtgggcgacggtctgcggctgcggaacgtaacaggacagggtctcctccatccccgattacccggagcggcggcgcggtggcccaggttgtcctctcggagagcccttcacgcccaagggggatttcaggcggctctggggatgtccccggaggccctctttggaggagtgtgcctcaagcagggggacgacaaaggctgtgtgtgtgcgtgtgtgtgtgtaggcacatccccggaattcgccgattaccccctcgatagaattaggcagccccaaagccagccgcaactttcttctggtttggagcacagtgcaaagacaggggaagggagagggcactgccactttaaaagtggggaagtcggctgggcgcggtggctcacgcctgtaatcccagcacttgggggggccgaggcgcgctgatcacctgaggtcaggagttcgagaccagcccgaccaactgatgaaaccccgtctttactaaaaatgcaaaaattagccggccgtggtgacgcgcgactgtagtcacagctactcgagagactgaggcgggagacccgcttgaacccgggaggcggaggttgcagtgagccaaggtcgcgccactgcactccagcctgggagacaaagtgagactccggctcaaaaaaaaaaagtggggaagtccgccctcctgagctcatggtaacctcagcctcctcccctcctcctaccacagagagagggagaaagaacttgttttcattcataactttttccttttccttcttccgtcaactatttattcagtgcggattgcagagggcgcagctccaccgtggtaacttgcaatgtggccgcccctgcgctggcttctttctcctcggccctcggtgaacccagcttttcctttaaagcatagacaaatccttgcttagggtcagccagaccgtgggcttgctttgggctcccgcgtggacgctgaaggctcttcatgatttctcagaaaccttggtgggccacccaaaaagtgtgttggaaatccacggtgatccttaatatggtgatgggattgtccgaaaaggtattctacttccattcgcgttttcttggggaaggcagtgtgccgagcgcgtgtgagcgtgtttggggcttgtccaagactgtcactgcttgaaaatgggcttttcttcggatcggaggtggcgaattttctttgcttttaatttttttgtctggcaactttatttcccagccagtatgaagtttgttacaactatcattggaaatgcaaattgaagttgtgcctggtgttatgggttacactattcaaatcctctgcggttttgtgaatct

SEQ ID NO: 43174 - DNA, 1082 bp, Homo sapiens
ctgggaggaggcagccaaatctgtctttgtaaatcagagaagccttcataaaaaaagccttgaaagatgagtagtaatgagtcaagtagacaagggagagaaaagcattttggaaaagtccaaaggcatgttaagtgggaatgatcatggcatgatgagaacattgcaagtaatttagtatgtttggagtgtaagatgcctgtggggaaaagaggagccagtcatggaaagtggaaatgtcatgtttaaaagtttaggctctatcctgtgggtgatagtcattgacagatgataataaggagaatggcatgaacagattagagtttcagaaggatacttaggcaacactgcatgctgctgatggactggggggcaagagggagaccagctggataaataatataggagccaaggtgattaatgtgacagggacagtagaggctgaaaggaggttgtgagcttgatctgattggttgtagaaggtgggggaggagaagtcttggccatttggtaccgggttaactcatctctggtaatggaaggcagagacatttgtgtaaatgaaatatagaaggagatcaaaattttccccactcaacattctactaattgtgcagatttaagagtctctccccgcccccaaccccccaacccccatctctcctggaatggttaatgagtaatgaagtggacagaaggcaggaagcaagaagacaggaaagaagcaaaggctttgtaaatcaaacagaaactaaatttttcattctttcacctcagcctcccagagttcactgtatacagcttcactgtatacacttttcagtgacttatgtatctgaactttgttgtcagaaacacccaagttccagaactttaaaattcaccaagcttggtggggcacagtggctcacacctgtaatcccagcactttgggaggccgaggtgggcagatcatttgaggtcaggagttcaggaccagcctggccaacatggtgaaaccctgtctctaccaaaaatacaaaaattagctgggcatggatcccagctactcaggaggttgaggtgggaggatcgcttgaacc

SEQ ID NO: 43175 - DNA, 1512 bp, Homo sapiens
ctattcctgtagtacaatttataatgcttttctgagtgtggctttgaacaatgtgacttttatcagatgaaccgtggtggagatggagccctctgtttgtgtttagaacaggtctagcctagggaggaacgaggaagacctctcaaaggctcacctccgcacagcaggcctgatcggctggctggaactcagaagggcaaaaggggagtgaggctccactttgatgtggttcgcttgcagccccgttgctgtactgtggtgtgcatatgttgggggcagggcaagggtaataaataccagggacacttttgcaatgcgtgcctgtcagctgagtgctggacaaacatttttaccactggctatttccctgaggcttctgacagtttgtgcaacttgtgtaagacattcctgaaagagaggagcatttgttcaacttatataacttctttttacatcataagactaaagcagtccttccgggctcatgtcctgttgaatgtgatccaactgaaacttctttcctctgcatactcagaaacctgactacctgtgtaaattcctcctgatagcatagctttctgtttgccctcagtccttctctggccctctcagacacccaggttcataatgacattccttcttcctcttgtaattctattgaattgttaacaaaaaaaaaaaaaaaaggagtaatagctgtgatcgatttctacaatgtgttcttaaattgtgtgtgtgtgtgtgtaaaatgtgtatatttttgcacttgatcttagccaaaaggctgagaaatgaccaaaggtctgtatttttgaattactatataggagcataggaactgctgtgtgattctggaattgtaacagaggagtagctaatggagttttgagggatattatgatgtgcatatagctggggaaactgggtgctcaggagtatgaaccttcattcactcacttcctgctcccagtaggagattaagaaggcatgtgcaacttcttatatttggtatagcttttgtttcctgccaatctttttttttctttttgacaaaaatgctgattggttttgccttgatttatttgtatttagaggttttcaaaatgagttggtttaaggcattacgattgaatacaagttaatcgataatcacgattgtacaccagttcttcctaatacattttatcctgtggccctgtaaaatttccaatcgaccaaagcaagcttggttggtaagggaatgacttacacaggatctttttcatttaggggtttgcaacttacagtgcaccttcacataggtcttctcatttgacttgcgcaatagcccatgagtaaacagcacaagtgttattagattcagctgacagaagaggccaccacaagggctcagagaggtgaaggggtttggtctaagtcacagctagtaagtggcatagcaagtctactttcctgcaaaaagcatttattgcttaatcatgctagtgtctattattgtggttggtttttgtg

SEQ ID NO: 43176 - DNA, 1462 bp, Homo sapiens
caagtgcaaaagagtattcactctcactttctatctttggtcaaagcaaaaaactctactgctaacataatttagagcaacagtttccacacctggctgatgatgagaacaccatggagaatttaaagtacacattcccaggcacctatcctggatctactgtatcactttccaagagtggggccccagaatctgcattttaaaaagagctgttgaggtgatgtagatattctggcagatttgaaaaccactgccataaaacaaacagggatttaaagccctcaattttatcttagcctctcactgaatatgctcttgtaatggtttaaggtaataatgaccttgttgtaggctatttcctgttgattaatgaccagctggaagaagttgtctctaggctttttcaattcagcctgccaataattactcaactaaatctgcgcctgcagttcaaatgcgtaaagttttcctctacaaggaacactgcactgttaggttgtcttaattgcattccttttctaattcatctctcaaatgccacagttgctctaaaacagaaaaaagcaaacaggaggatcaaagtgtctgtctccattggaacaaactgaagcagagaggcaggggagaagatttagctcttaggtggattttgctgaaatgttctatttgttgagcagtgatttgtaccaggtaatgtgaactaagttgccctcagtctctttacagattacaccccatttcctttactgtgctgctaagtaattcttagggaattattccccctccaacttctctctgctaacaaaatgatctgccacatatgcttccactttatgtgctgcaggacagccatgggcttcataaagctgcctgcatttcaaactgttcaggctggaactgtaatctttccacccacccctttcccgtcaggtaaagaaaatgttcatacctcaggttttgttaccaagcaacagagttccatttgccaattgccaccatttccttctcatagtattacaggccttattaattaacatttagttcagagaaattgctgtcattatgtgaagtaacttcctttagaggttattcattaaccttaggtattttactgtgtaattataattgccaagtgccgcgggcttggaaaacgtttgaactcctgaaggtatcaggggacggcagaaaagatattatctgatttttcttccatttccagttaaggattaatcttgaagatcccctatttcccctgcagagttatctgccttcccaaaagggtaaactcttcccttgccttagtccagactgtccacggtaaactcagaagcaaaccatggaggaacttccctgttagcgtgtgatttttcacaaattctgtagggcagagtgcaaattgttccccctttgtcttaagaaaaaatcgtggggatactgagatgacttggtggttggtaaatgg

SEQ ID NO: 43177 - DNA, 2133 bp, Homo sapiens
agctgtgggctgagagatgaaacaagcggttctaccaatccatgtgaaacctttagggagaatgtagggctttaaaaaacacatttgggaaattttctttataaaattatcagaagagtagatcactgccctgtttacactttgcatatgcaacaatacaaatgtagaaaaataacccattatgagaaagcagtgaaaataattgcacattaagagagttaggtcactgctggccagatctggctatgatttgcatcagttttagtttttccgaaaggaatgtttgatccaacagaaaatgggctttgagtgtgccagagctcctctttcttctcctgccccctcctcttcccaggttgacgatggatcccccaaggcacttgttgcttcctccaaaggagctccccattacagctggaagagaggcttgtttctccagctgtctaacctttagttttatctgcctcttgttgacctcttagttttataatgagtcagtttatttgcttgtacaaattgagttttcttagaaatataacagttagaaagaggccaatgttttgtttccccttatgaaggagaagtagctatgggaccgggcacggctgaggctgttcattccatgccagtccctgttgttggtttattttagtaccacgtagtgaagccttgtgggcagagaaatattgtctcccttgtcggaggtagaaatatctgcagggtttacaagctaattacttctcgattccctgggagttctaagaatttgcttagcaactggcctgaccagtctcccccagctgccccccaacatgactacacttactggtggcgctgatggagcagttttcgaactaaacaaggattaagcattttgtgaaaatggtgccagtcttttcctcgatgggacctgagcctgtaacctagtccaacaaaacgagggagaacaagccaaaaaaaacctttttaagaaacaacacaggcagtaggaaatcatactggtcagggcttgttttcctggcgtggggcctcattccaacctgttgcaatcagctctagagtgtctatagggacaccctggtgcaggggccccgcggaggaaaggaacttttacatttctgtttgactgggctgcttgccagggactaagttcaaagtgcagtttccagtaatttgctgagacttctctgtgggtttgataggccaggacagaagcctgcaagccgaagtaatatttcctgatttctgtcattccttaagaagagaaggaaggttgttgagggactagggattggagaatttgttggctctgagagcagatcggacccccacttccccctgtcaaccccagccccttctcctcaatcccgtctagggccattggcagcctggcactagatggaatcacacgggctccctctcagagcaaacgtgaggtatgcattccatgagccagcgaaagcctgcattgatttactgcatgctagcattatttggagctataaagttgtcgagtaatggcaatatgttcttgttttctcatatctgtaggatgaaagtgaacatttttataatccttctctcctcaccacatttagttcctggtgttaaacatgtgggcttgattaaaggggaaaaagaactgcaaaaagttagatttttacattcctctcttacaatgcctcattccctcaaccatccccttcccagaacactgatggcaaggcccacattcttgtcatttcctctttgtctctccccttctccctgccctgtgtctatcagaggactcgatgcataataattcaaaatgaatctttattaaatgaaggggtaggtagtggtggaatctcacttcaaagaagggttgggtagaatgatatcgtttctatgtctcgtagaggctcacaggaatagtgctttattgattttgattacaactgcttttctacagcaagaaattgtgttgcaaaaatgtttgctgtggtccccatatcagtcactctttacatggaaaggactcagttgagcatgaaagacattaggaattggggagagaacagagaggtagtggagcacagctgaactctccaagattctttagccctgtcatcaagttgcagtcacctttta

SEQ ID NO: 43178 - DNA, 1606 bp, Homo sapiens
tatgccaaatagccattccatgccttacagaatgtagcagtaaaatgaaattaactgttggcatcaagtagtaagactatgattacaaccaatagtggccagtctttatttagtgccatgagctagttctgagggccttgtaggaattagctcacttgatcctcacagcaaacctgttgagataggtattattatggagccccattttactgtggaggaaattgaagcccagaaaggttaagcaactggcctaaaattacacagcaataaagtggcagagctggaatttaaacccaaccgtacgattgtgtaaataaagcaaacacataataaccactattcagtgactatgtttgcctggtgctgtgttagtcactttcatgtaaaggtgatgtgaggagactgaaagaaggtgaaccttttcatgtattgtctcatttactcctaaaaccctgcttggtgggtgttaaactcatgttacagataaagaaacctagacacagataggattaggaaattttcccaaggttatgtaaaaccaggcctgtctgactccaaagtctatagaaactagtaattcattaaactctttctagtagcaagtgggatactgttcttccttctcagtaattatgtttaccacttcaagttctttccctctggtacttttctttcattctttgtgtttttatgatacacagctcaataaagcataatatacaacctgctaacattttcagagcccagatgtgtgctgggcattgtgctaaattgttttctattaattacctcatttaatccttccagcaaccatacatcataggtactattattagcacctttttatatatgaggcaactgaagttgagaaagacgtttttggcagaggtttgatgaagagtctggtgatgcaatttttctggagagaacatgcagcatttcaaagcctcattgccttcctctgtactgagaataaatgaacccagattcagaagttttaacatttttgaacattaaaaaatattcaatattattttagaatgctttttttttgggaatcagggtggcttggagttgtattctttgtggtgtatttcttgaaaagatccattggctaatctggctaattcaggacacttcctcttcctctcctctttctgtggctctctcttctgttctcagggcagccaccattagcatgtgtctactgaaggaacaagtgtggtggggaacagggtgttgggtctctgggaaacttatttgcatacttcttgttacaaaagccaaccacatcctggttaagacaatgtgctgtctgataaacagactgcatcccccagtgtctgcctggagctcagccagcgtgtggcccgcctttgtcacaaggtgctgtttattctgcctggaagtccaaggacagaacaaaccagctaaatgaaccttttatttctcccattctctgacagaaattccttgagtcaaaaacatgtattaatattaggttaagggaaaagcatcagaattctccaaatatgccttcctaatcctgtggaaaacatataaaaagctttggttttcctctctagctacaaattctttggggttt

SEQ ID NO: 43179 - DNA, 1193 bp, Homo sapiens
ctaagtcacttattcagatcgagaatctggaagtctagtcatggtgccaggcttctaagtcatcacatgagttcaattttggctaatcagatacagaccgtaatgcgtactagaaagttcatggaaccatgcagaccaaatgaatcctgggtgtgctagagctgtgaattcttgggcatgttacttaatctcatctttctaacatgcaaatggagaatctcatgcttatcttctactattattgtgagcaataattaggtaacaaatgtaaaattacctagtagaatgcctagcacacagtaacagccaaaaaagagaaataattgctcttgttgctgttgttatttttactgctcacccagaggtgacaccgggttactttgtgtgcaatttttaagttgcaggtttcaaaattccatcactctcactggccctacttatataaacaggttttgatttcttttgcattgtggtgttactatgccaatatcctaagctagtttttaaggactgtgaccctatctggaacttcggtgaatggaatgagtgcctaactttctggccagcccttttctgcagactgtacctacctgtcccctaggtatcccaccactggcctggctcttcctctgccttgtacatagttcagaaaaagcctgaggggccatttttaaaaaaataaataggcttgggtttgccattccctctggagactgtgctttgatgttttgatggtttgaagttcatgtttgcctctgggtcggttacgatgtcaccacagttctcaagttaggttgtggaatctggactttcgtactctgcttaatgttgctgtgtgatctatcagcattgcatccaaacacgctaagctatgactcacatgttgtatacttgtgaaattggattctttgcttataaacacaggacttttaatttatccctgcttagtcaattgcatctatttatgttaaatgcctgcagtaggtagagtatcttattctttggcacttccagctttgtatccagcctatatttgataagaatgtcctatgcatgtacatctaagttactgatgtaaacacttagcaagacaaagccattgacagtgcccaatagcataccaatcagaagctttctccagagagagatgtatcatttcaaaagtacatttacttatatttgtataggaatca

SEQ ID NO: 43180 - DNA, 2358 bp, Homo sapiens
gaaataatcacattctcccttctgcatttttcttcctcattgttatgcttcccaaacagccacattttaatcaagttacccaagatttttgcaacttcaccatagcaaaggagggggggagaaactttacgcacatacagtaacacccttaactccaggcaaaacgctcattcacagtagactggtagaacagcgccagctaaggaagctctattaacttacacagtccagtcagtcaaggactgtctactcctccagccacacttctttgttgataatgtgcaaaaatctaggggaagattaccagggttgcagctggatgggaaacggtttaaaaaaaaaaaacaaaaacgatgggggatgactgttcttataagaatgataaagcaaacacaagtaaaatgtgaatccttccttcctctgggccaaggatggaggtcagggataaaatctaccagtctggccggagaaaaggctgctagagagaaattccttccaagacaggaaagggataaagagtagagtgcttcggtgctggtgggtgtctgcccacaggtccggcctccagtttcagctgacagacaaaaggaactccgggattcccagcgccgggcaccaccttgggttggaaccgcccagaggagccacaggggagccacctcagagaggccacgagcgaaggtgcagcctccacaccgaggtctgcccttccagaggctgggagcgcctctgcaccccgccccgcaccgagattggggtgtgtcttttgaagggggagggggtgactgaggtccttgccaatcccagacgaggggtcgcctcccggtcggcttccgcctctgcgctcccgccccatgccccgctcccgctcccacccggccgacggcggtgcgagggaagagggcaaatctggggctcgaggccggagagggtgggtggttgggtcaggtccaagccacggcctcggcctcccagcttccaacccgagggaggggcctcgcttccaccgccgccgccgccccccggttacctcggccccagccgccgccgtggccgccgctgccgctgttagggactctcagtctcagacacttgcttcgctgagaagtcgctgccagcagcgctcccaagactccactccaactgcagccgcctcctccgccgggcccggggcacgctcccagctccggatcctcctcttggcccccggcggctgccagttccagctttcccagcagaatcggtcgtgctcgccccagcccccaccggccaaccgccgccgccgccgccgtcagggcagtaactgtctcaggcagcccccggccggccggctccgccccgcccgcccagcccagaccccgcccccgcccccgcccccgccccgccgctcggcctttctttgcccgccggctccgcctccgcgtccttcccctcccccaccgcgctctcccgcagcatcccgtgcctgggcgtgtgcggccgcctgggacccgctgccggcgcggcggggagacctgtctcggggcggcgtgggggccccgcctttctcaggggaggcggagaacggggcgggggctgcgttctcacgtctccgagctcacgcgagtcgttgcccccaccctccccgtcaccactgggccctgatccttcctttgtcttccaggccggagggactcgccggctgttggtgccgtatctgctcctgggaggggcagttgggtagggggagattgcctcttgcctctctctgctcaacccttttgcctctcccttaaccccgttgcttccaaagccacttcgggccccgttctacccctcagtcgtccggtctcctttcagtccattaaattccagggatgcttttactttggctgggacgaagagaaggaaggaaaagactgggaagaatgttgcgaaaatagaaatagtgggggtatacagcgacattcctaccagcctcatgaaaaggacgtggcctccatcagatggaggttgacagcaggcttgactgggtctcaggcccctgctcctcagggccacttgatcacccgcagcgtccactaggggggaaggtcttggtcatgtggcgtcaggaaatgccctagagggcctgctcacaggggcctgttggactaagcatgtcagttgtttgcacttactggacctgagttgcttagattccaaatttctcccgggaaaataagtataccgtcaactgatggaataggaaatgtagcattttttattttaattgtttatgctaaaatccagagtgctctatttcccattcctcattaacttgcatgtggttatttgccaaaatattaagccagtctcccatctagttttagaaatttc

SEQ ID NO: 43181 - DNA, 1907 bp, Homo sapiens
aatccagttgggaaagaaaacaaaacaaacactgagttcccctggcctttcctatagtaggaagtccaaagtgcccttgctacggaggcctcctgccccctagtcacctggaaggtgggggagaggggcaagtgagtgaagatttagagtttagctcgccctagacagcagggagcccactgtgtagaaagaggagcaaaggggaggatttgatttggattctgtgggatcacactgtatggcagctctatcccttgcataaagagagaaggggcaggaaatggttaaagcaaatctgcactgtgcattcccagacaggctttgcttaatccttcctccccgctttaacagaccctcaccccccgcctttcttttatttctctcgacccccttacccctgagttattactagcataacaacctaacggtcttcccccagaccctgccactaaagttatttatctgcaaacctgaccccacccccatctattctgcggcagccttttgctgttattgctctgacgccggccaagatttggccgaaaaggaaaaaaaaaaaaaaaaaagaaaagaaaaaaaatcacccccctttttagcgcctccgcctcgctgtgctcccacaccagaccgcctacagccctccgggaggctgaagtgattagcatcccgagaagccagtcggaggccgggcaaggcggagggcgctcgcggtaggagtgccggtcggggctgcttcagctccggcccaatggggctggggcgagggaggggcagaaggtgacaggactgggagctagggggagtccaggcgaactaaagtgcggggatcaatgagtgtcgagcaaagtttctgagtgctgctccagctcgcggtcttccctccccctctgtttgtgtttcggcgacgcgctgtgtgtgtgtgtgtgcgtgtgtatgtgtgtgtgtgtgcatgcctgtgcggcggggaaggggcggggagagtgtgagggaccaggcgggaggtggagaagggctcgcggagccctagctccaccgcagtccaaccttcggccccggccggcgagagggagagcgctgacaggcgccgtccggagctgcggagggcgtcactacagcccagcgccgacttcgccgcctccgctgccaactgtgaaggagagagaggcatcaaccaccccccgccccaaacaaaaagccttgtggattacaaagtgaaactgacacgggacaataaaagcagagatagcgagggcaggggcgaggcgcgctagagtgggcttctgactggggccgccggagaacgaccccccctggcatggtgaggggagggcgactcggggaccgcacgctgtttctgcccgacccctgcgaggccgagaagaaaggggaaactgcgttcgatttggatgtacaaataatgggtcggcaggcgccccggcagaggtgaaaaatgccgaggagccctggctgttgtttgtgccggaccacgggcttgaagccgcaacaggggcggcggcggcggcggctgcaggaggggaaggggcagagttgagcgctcccgggtacgggagccagagcgcgaacgctagcgcttggaacgcagttcccgaactgcctgcgcgcagacgccgccgcctgggcctcagcggccactgccggcgccctgttggaggggcgttgcagcctggtttttgaggagtggggactccaggaattccatcgcctccagcttttgggaaagaaattcgattctcccggttccccaccaccccttccccggtgcgcagttgtgcttggacgtttgttcctccctcttcacgttcttcgctgcgggtaagttctaaagtttctgaagaccgttctttgcaatgattcctcatataccttagatacaggcaacttctccc

SEQ ID NO: 43182 - DNA, 3361 bp, Homo sapiens
gcatgtctttacctggtggatgtttatgccatagaaaaatcaactgcttttcccagaacacagagagcagaggtaatgattttgtagtcatttattatttgttgatttgctttttagaaaaatcattctctttatatttactctctataattgtttaccttcattgtttattgttaaatttgtgaacaggaacacctaaaaatgttctgtcaaaggctaacagagagttacataaactttagttttaatcttggttgcaactaaacaacaaactttcttttcactttatattttactttatagcaatcacatatataaggttaaggagaaatctttagccatttcagaggggaaaaaatccatatatctaagctaaattgctgaggtaatctaaataccactcaataaggaaggctaccagaagatgggcactttcagaattaagaagacctattccaaaatgaagagctttggtaggaatcagcattgtaccatagctcttcaggaagagtggccatggaggatgggctgacagtgtacaccaggacagtattaactttcacatcctcagcagtcttggcagtttctttatagacagtgactaattttaatgtgctgagccaagttttggaagattcctgatttcatctgccttaacattttagacactgtcttctgacttaggataatccttccttttccctcttaaattaaggcatgcaatgggctgtgaataatcagagactagggattgtttcttgacaatactgagttcaatgccatgggatagatacactctgttctgtttgttggtgagtaagaaattagtgtttcatagcataagccaaaagaattccaagctcagccttccctggagtgtattttaggctactgcctccttgtatcgttgatttgctttttaattgaactactttcaatgttattttgataatcaactagaaatgatatagctatactccagaaaactcttgtttgctgtttctcagttcattctttccctccccaggcccctcaaagacattctagtgtcagtcagccaaaaacacaaacatcaaatgtggtttgtgatacttggcagtgacccagacacaacatgcaagtgaaattgaggctcatgtgcttgttttcttgcttcttttcttttttggggggaggaggtggggattttctttattttaaatgataatttattattattattatatatttttgtatcctctgtgattttttttcatagtagttggttatgtctatctatggatggggaagaatatttatggcttaaaggaccatattaattagagatataattctaaggggaattcaattttatctttacctacatagcactgaaaggatttctaagccaaataacctcttttacctaattatttaaaaaatattttaatatagggcttatatgttgagctatttggtgtagctcaggccatgatttatatgtaattgaattttgatttgaagttatccatcttctaaacccacaatcctctctctaactttcttctctggaatgaatacttacatgaaaatatttgattagtttgaaaaccaaaatattgattgaaggcaggaaattaagtcattccagactttagatgaatttgttaaactgtaaaacagattatgttattagatgctgttgtttggttcagtgtagtacattttattagaatactatggagaatgagaataaatgctcagttttatcattagatttattgtgtcttttttatttacccattagctatgcaaagattggcttagcatgaaagtattaaatagtgctgcctctgcaataggcaagaagattaaaaatgtttataagtaattttgttattaataggggatgatttgtttattactttttataagtcaagtaacaccaatatgaaaagttatcatatatactatgttctattcatttaaaaatctggggagaattcaatgtgatgatttttttaattaaaaaaaagtcagcatatcttctgtgaacttaagtgctgaaattgtaaacccaatttgagttctcaagatccaaccactttgaaaatgaaaagcaaatgtgtttctccaaagaatattgaaagcagtggttgtgagctagaatttcatattattattggttggatttttcaagtgtatacaataaagtgctgttttccttctgctcaaacaattaatttactgtgattctgcaaaaataagttatacatttcctcttgttatcaaaggcgatttttaaattgtttgtttaattggactttgtccagcgcattttaaaaaattattcatgtacactgataagagtctgggttgcttactcaggtttctggcagagtcatgctgatcacattccatgggcaggcagagagtcagcgggtaaaagagaaacaatttcatctgcattcttttcctagctctgacatttggggtaagaggctaatgactatgactctgatattgttcattccaaagatgtgtccagttatacacctttacttacgctacttgttatatccaaagatttggcattggtagtaatgtcattgaaagattgtgtttgggtttcagacacaagattaattacctttttattttgtctctttatgttctcagaagagcttagatagtcttgattatgttagaataggccatgtaaagtttgtggcatttttctaggttcaccaaaaaatagatatatgtacttcagtaagcatttatcctttaatgtgtattacataggaacatgcaacttaggaacgtggttagacctcatgatggtcaggggcttgttttattggtctttgttatttcagaccgtggcatattacctgatgtatagtaggtgctccatacatgtttgctgaataagatggtagaagacctaagatcagaacatatgtctttataacttgggaataaatcaccagagaaaagctgaggaaatgaaggaagttaataaatctgatgctgctcattaattgaactcaggtcagagcataataattatctctgctctacaaatgaattgataactgtcaggaaactcaacaaggaagaggaatttacgtgggtgttctgatatggagcttagtgtttaaatggaaggaagcaatcttatacattcaggtagtcaccaggccatagttcccaaacttgctacattcaggacccctttatgctcttaagaattgtcaaggacacccctggagactttgtgtaagcatgtcttgtctattgatatttaccacttttaacagtacaactgaggaaattaaaaatatttgttaattcattttaaaactacattatattttaa

SEQ ID NO: 43183 - DNA, 521 bp, Homo sapiens
tatttctctagttaggatatatatatatatgtatgtatatattatatatatgtatatatatatatatataaaaatcatattggataaaaaatgttaaccctttctatcaaatttcagactttcctgattctgaaactcaaaactgaatgcaaattaagatttttaaaaagtatgattaaaaaaaataccgcatacacacatgacatctggcaatgccttagatctctctaaaatgtcaagatgggaaaatatccaaaactttttttttttgagagagagagagagaaagagaaagttggcttctagccataagcctgccgaggaattcttacgagaatttctggaaactgtactttttaaggcaatcatgttctccatgctttcgtggcctcagatgttacttgaaggaatttaaagtttcatctatttgtgctttgttgctgtacaccctttagacttcagtggtcaagtttcactttggagaactgacaaaagaaaaatattgtgtttggcactacaca

SEQ ID NO: 43184 - DNA, 1216 bp, Homo sapiens
gttctaaagaaaaaaatgcaccaaatgcatacacttactttatgataatttctgaaacttaagtagagtttgggcctgcaacagacttgtgttttctagtagttatgtttcattcatgcaggtggtagtggtcctattagttttccttaataagtcccatatagctctggccagtctttcatagaatgagttggtaggtctttcctccaaagtttgatttctcccatttttttcacattgcaatttcaaactttcagtaataccatcaagatgagacagtaaactattattagagttaccacaagtttgaacaaagttgattatacatcgcaaacaaataaatacttaaaaccttgttcatagagatcaggccttgcatacctacatagtccaaacattacattcctgacatttagaacatttaaatgcaaactgttctttgttagggctttctcataactgaaatatgagtcacttgcaaaccataatagattttggctctgctacatgatgaagtgttctggatgtcgtgaaacatttcacccagacttatggcagtagaattcccagtggtcacccaaaatagggaaaaaaatgaagaacaaacttaaaggaaatatgcagactctggcaccatcctttcgtggcaatacagctctttattgttgttaagaaatggaaatatttagagcctaaacccataaactatagtacaattaggcgttgaattttttttttgttcctaattacgaaatttaactctatacttgattctcatgtttaaggtcaggtcatagagtgtttctttacacatcaccctgatgcggtcatactgagttgtctcccagcactgagcttctcactgcattgtgggcaaactcatattccacactctacactcatctcaggcaggaaaggtggagttttccttttcagggccaaaggaagcaacagctgaggcgtgatggttgtactgatattggtgtgggtttcaatttggttagtttgctttcaatttcaactcctcacttgagattccatacagaaaagtaaatggtaggcttccagcatcttgtttcactctggtgaataaaaattgttttgaatgtaagattagagtttttccttgcttaattttagtagtacctacacagcataaactgaggcatcatttagcaaaatgttattgagttgacatcataatgacctattaagg

SEQ ID NO: 43185 - DNA, 889 bp, Homo sapiens
aaattattttatatgtgtgtatatatatatatatacacacacacatatatatatttgcttcagacttgtgaagtgttgaagattaaacaagtttattgtgtataaattgcttagaatagtgcctggcaaatatattatttttatgccattaattattaacagtaccattattgacattaccattactattgaaaataaattctaaattatttattttacatagatgaactattaggagaaaataaacctttaagtcaaaatgaatattattttaatgtatgtttcacttcttaaacctaaacttgatgagaattgcttatttgcttcaaaatacccataaacatctggacttgaaaaaatattcttctctctcctgctgtctggtgtggatcttctcactccaaaagtggggcagaagaaaccagaaggataggtatatacagcataacttatgagcgcctaagtgttaggtctgtggctgtcatccctcccaccttctgtgaaattcctccagttggcgtaggaagtgacaaaggttcaggaatccttggataaatataaacacaagtttgaaaactgtaactgtgagtttgtttgttataatgactcatccagatgtaagcaaacaatctcatcaagctctacacttactggatttctagagtcactttcttttatgcttaggtatcaaagtatgccatacaccctcagaagtttttgttctttctaggtggcaaacttcctgaataaatttgtatttaaattaatatgtaacaattgaatttcacttagaattgttttattctgatgtctcacctttgttactagcttggtgcaacaattgtgagttttgcaattacttttaatggatattaaatattaatgtttt

SEQ ID NO: 43186 - DNA, 512 bp, Homo sapiens
gaagttctgaggaagaaagtgcttccaagttcattcaggccattggccaaattcagttccttgcagctgtagaattgagattcctgttttcatgctggctactggccaggggttactctcagctcctggaagttgttctagggtcctggacaccaactctctccatcttcaagccagcaatggggaatctccctcacatgtaagaatgttggcatctacttgcttctttttccatttcccaactttcccagagctgaaatacatgtgctgacctcattcatctggggtcagtagctcagtcctgtcacagggccagctttctgatttgcttaatggaaccaagcaaataaaatctctgtttcacagcagctgagttgttatctccctgcaccttctgggttcaaatagtcattcagccttggcatctactctcaggccctaggctccatgtccccaatattcaatgaggaggaggttaacttctatgggtcacaatgcctgtcctctttcat

SEQ ID NO: 43187 - DNA, 1108 bp, Homo sapiens
aaacccataaaacaatggagcgtatttacattaacacctagatcgcgttgcttaaaagcgtccattacttgcacggatgaggtcctaaggaaaggtaaagtgcggtttccttcacctcgaaggaaatccaggctgaccgacagctgttaggcattagaaacacaggacaaagagcaaactggatatccagcactggaagaaaaaggtgagaagcccagtgcatctccgcctgttttaacaggttatgctgctctaaggaattgcgttccggagagcgtaagcggtgaagttttagctatttctatccttccaactgagaagccctcctggaagtttcagcccattggctgctttctgttctccctgtttcttctgggaagcttctccgtctccctggcaacgcgacctgccaccaattgcagctaaggattggtggtcacatggcctctgccccttcccaagcagaggcaacatggcggccttagcaagctatagctgcgagatttgaattactccactcgtagctattgcattcctgacgatggcctctgtggcttcgtgcgattcgcgtccgagctcagacgagctccctggagacccctcttcacaagaagaagatgaggactatgattttgaagatcgggtcagcgactcgggttcatattcctcagcgagtagcgattatgagtaaggttttcaaagagggacaattaatcccatcccatcaatccagagaatatacacgtgggctgggggaactgcaagggtgttggcgtggttggaatcgagtatttggggttctataataagtgggatttaattgcaccacgttccattgtatggtggtgtgagcagaaatgacgatgccattctttgctactgtaggttgttttttgtttgttttgttttgttttttcaatgattcttagatgaggagaatctcctctttttggtcatgggctctgtctaggccataggaggatatatctgtaacagcgttcaaaaaactctgtttcgatcgcagtgtcttgattctttggtgtgacctttgtggcttaatctctttagtatttggagtggagagacaccctacgcgttttataaggca

SEQ ID NO: 43188 - DNA, 525 bp, Homo sapiens
ccacaggtaacctcccttttgtatatttaatataatttttaaattagagtttactattttttagagtgtttggtggatgcagtggtgtgctgtccagttacaccttagctcagggtattcctttccaacacttgagaatggtggctgctaatgcctcacagctcccctagccttgtcactcccctagccgtgtcctacacggaaacttgttgactcagctaaggttacattcctccctgggaggagcccatttctaatgactaataaataagtgagtacaaaggcttggccccttgcctaaattgaagacaactctgaaaggccagccaagcttcagagtacacagtggtatcggctgagacttgttgccgctgcagcacagttcatcttctccctctgctcaatcctgctcagtcactacacccctacagctgtttttcccaagagtacttcctaataagtttcctcccggcatatctcactctcagagtttgggtcccaaggaacttgtcccataacactctc

SEQ ID NO: 43189 - DNA, 2814 bp, Homo sapiens
ttcctgtaaaactggtttccagagacaagggtcagcggcggggccagcatcttttagaaaggtgtgaggaaaggtacgtggagggaaagttgtcagtgtgatcttatttcttgacagaagtttgacttttgatatttcaaatcctgctgatgaaaaaagaaaaaaacctaacatgtgctcatcccgctttcgcacaagagtctgtcccgggctcggcagctcccccggggctggacagggcggagcggcggacgtcggacaatgcgcgccacctcacagagccgggcgcggcgggcctccagccacaaggggagggcgccgggctgcacatgggcccctcggggaggcgaggcctgcgggcgagcccttctgagggcagggggtgagggggcggcgcccgccagccaggacagcatcctgccgccgtgacaagcacgcctccggttgccaaaacaacccaaaaatgtgcctcaaaacacgttcgcaaagccccgggccggccggtcgcctgcctctcacctagcccgaccgcccgacgtcctactgccgagcgagggcgagcaagccaatgtgcctagcctcctttccccgatcctccccgccccgccttcccgcttctcccgcccccggatagctcagcagcctccattttccagatctttctcgaacccgcagcttcttgggcagccgttgcccgagtgctgacggaagcggccgaagtccgggcccggagctggctcgggcgcggagcggaggctcgcgcgcctcccgggcagccgagcgcgcaggcgcaggtcccagtaaccgccggttggaggcggccgaaccgcagtagggaaagacccaggctgcgggacgcggtgcaggctgcggcgctgacggcctctgctccttccgcgggtttccgactccctgccctagattttctgcttagcgacttggggtcccctctcgtttgcttctggtaggagtcgcaatcccagcagcaatagcccagaagaggacacggttcccgtaccgaagggttcagtaccagcagcccgaccatcacgcggcgggatgtctgtggttggcattgacctcggctttctcaactgctacattgctgtcgcgagaagtggcggcatcgagaccatcgccaatgagtacagcgacaggtgtaccccgtaagtgcctctgctgagcatcacctcgaccctaagaaacgtttttctctcccgtccttaacgtttgtcctgtctgctcgcttcctcggattttcccctaacgtgcgccgaaccccgagatgacaggtgcaacccgtcaaccgcagtccctagagaccgccgggtggcagtcggacttcctcgccccgcaaagcttcttttccttcaaggacgagggaccgcactagtttgcgcagctctcttttctgtacctacgcacgtcccctgcctcgtgccgctgtcccccaacgcctcttttgcttgcgaggaagaggttgctgtgggacagcccctggcgtccggaatattgagaaagatctccggttgcctctaacgaggtttacgtgggattatcggccccgcgccagctgccctccttcctttccccgtccctctgggtgacagctttttctcagaaaagtaaaaagtcagcttcggctgcacacgtcagagatgaattgcaggttcatctggccccgaaagccttttttttttttttaagggcggggagtgaggcatgtggggttttacaaaacccagtgcccttgagaactgcaggtaatggagccggtttacagggccaggtcaatggtgcattgatagggagagcctcgggatgggagtcactggccttgtgcattggtaactacgtcagttgctggaatgcggcggggttgggtcggaccaaaagcgtgtttctgcagagtgaattgccggagtcgggggcagctgtcccgtataaacatgactgtggagtgattctattatgaacgcttaatgaaaggcttaggaggagcggcgttatgtcatggaaacatgtttccacatgttccgttgtttctctggcctgggaagtttgttggcaaggaatataatgaagtaattctgaaatatgaaaaactagttgctgcttataggctgctgttactggtaattttatgaggaaaccaactgtatgaaacctatattactttttatggaaaggtaatttggcatcttaatttgaccgttctgaatggtccaaaatataataccttaactatactaaaacaaggtcagtgtccaatggtctttaaatgcctcatttactattctatggaaagctttaaaatatggcaaaaagatgttgaagagtagctcacttgaagcagtctgtgctttgatttctttccaagaagattctagaaggttttataccttttttcgtagatgtacacgtttcttctattgaaattttaaacgttttggacgtttatattttcaatacatgggcatagataaggtaatcctcaataatgtttgaactcttctactttttacatctttttctggcttttatgcacagtgagaggccgaaacagtaactgtgaagtcgatgaattcgtctctacaaggttttatattaagccacaacaaatactggctttcgccagaaacagaccggaaattccactctccaccttcagcagagtaggggttaaaaatgggagcaatctttggcttcattgactctcaacctatagagaaaaaactgagaggtagggtggacattcttttagtccttaaagccatatcctaaaagatcagaaaccagaacagtaagaaagat

SEQ ID NO: 43190 - DNA, 1354 bp, Homo sapiens
tggagttcgttttcttaaggtaccgtacacattaactacagttataacaaactacggaataagcggtagtggtgtaaacggtgttccttaaaggaaggtaatgttttttgccctgttccgtcaagtcttaaacgcttgacattttaaaatagttttaaaccctttccggaattagaagtggtatttcggaccgtgaagtaaccgatcagccataagtgtcccatctttaaggcctgctcttttacccgtcttgcagaagttcttccgagagtgggcccgagacagcctcccgcccgaactaaactctccgcagcgcttccggcccttggccccgaagtctagaaccctgggccggccgcaaaggaaggtctgccgcgcatgcgcgccccggcgcagcctatccggagcgatccatctcgttacgtcaccaccagcctagctcggacggcaagcggcgggagattttcaaaatgggagcccagaggcaccgcccaggcctcggaaggtgtcagggagaactttccgtggtttcagcgtcgtcgcctggagcggcggtttagagagccgagcctgatgggcgccaaggccggctggctgcttggagcgctgcctcgaagggactgcgtgaaggaagctaatccggagaacccaggccagagcctggaaatatggcgacctgcatcggggagaagatcgaggtgaaaagactcggcagtctgcagcggggcgggtgggagtaattgtgggaggacacgagaccgctgtgggaaggggagcgaacgaagctaacggctgcggggcgggcaccgaggtgcttagggagggtcccaacggcccagacccctgctgtttaggggcggagcggcccgcccctcaagagacaagagtagggaaggcgggacaggtgagtccctccccgcccggcagtgtcccgaggcactgcggctttctttcagcaatcccgcccgagctaccgcgttagagcagggcagggctacctcccacttctccaaggggatggcggttatctccggcgggagctgcggcgggattctgaccgagccctccgctcccggggattggctggagatgggaggagggcgcttaggctgcactgaggttgaggaaccagatcactagggtgcaccatcaccctgagcttccagtccagcctggaagcgcaggtatccccgcacggagtcaacatgccttccaccctagacacctgctgcatcgaggtgtaatacccgcttgaattttgtcaaattccccactcgatccattttatcttctttttccagccccttcccatcttcctttctactgtgagtcatcacacataatctttaatttt

SEQ ID NO: 43191 - DNA, 1766 bp, Homo sapiens
gcagggccggcctgctgctcccagtgcggggcccgccaagcccacgcccactcggaactccagctggcccgcaagcgcggcgcgcagccccggttcccgctcacgcctctcccaccacacctccctgcaagctgagggagccggctcccaccttggccagcccagaaaggggctcccacagtgcagcggtgggctgaagggctcctcaagtgccgccaaagtgggagcccaggcagaggaggcctggagagcgagcaagggctgtgaggactgccagcacgctgtcacctctcagcttgggtgctgcaacaggcaaagcagcagcctgggtttctccagccccgtcactcgaacccacgggctcatcaccgcacggtgcggccagacgccctttctcctacgttgggagcgaatctcctcggctcacacaacccagccaccggctcccaccgcgctggaacccctctggcagcgagggtttgtcccagtgcgggtgacgcccggaaaggaaccagtcccaacagcgcaggagactgaggggtccctccaccaggatccgctcacctgcttccaggtgtgtcgcctaagagcggctcctgttcactttcgttccgcaggccggccatagttacactccctacaaggcgtcttgcgcccaactctcgcgacacctgctttctcccatcccgggtggcgtgaagctggcaaaacaagcctgtaagtgcgcgtgcgcacctgacggtcagacgtaggcggaacgccccgaggtcataggcggggtcacgcggaaggccgggcagcgcagggcgaaaggaggctgtgtcctcagcctcctccctcggcacgcgcctcccatcctgacggggactgagagcccaggagagctcggggcgtgtccaaactgccgcgccgccctgctccgggtttgtcttcctccctccgtttctccttccgctgtatctagcatttcggttcctggaaaggttaccggagctgcgattggggctgggaccaaagttgagtcctggaaagggagcctggagagcggcggtgctgggaggcccggccagctcgatcgcaggcttccacctggcggccagtaagtagccggtccggttaagtagtaggtgcgctaagagctccccgcgcctcttagcgcgccgtgtacgcgcctggaggcagggaccggggacgcggagctgggcgggagactcgcgggtcagggacgcggggtgaggctgggggtgagagacaaggctggagtccgtggcgcgcttcggagggctgagataatgggggcgagcgcgcgggcagtcccttccccccgtgaaaggtagaggtggcttccagctctcttctctagctcggctaaatgcaaaggcgccttacctggagggcttgtcagagccaggactgaaggtgggatctgctgcttgtaacctgcaggtccccggatgcgcaccccaacggcgcctgcgcctacgggggcctcagccttgcaaaatgtcactcagcagagcctgctgctgaaacgtgggagttgaaaaaggtacagcacctgcctagcaatgaccagctcctttcgtcacaaggaagatgacatttttagaaaacatgtcatgggttttcactagatctccatgtttatttcttggtggttatgtattaacatcttatctctactattaggcttgtaggctagctggcgtcagtagtcattctgtgtctcataaattaccgttttattagcgccagatacattgtca

SEQ ID NO: 43192 - DNA, 850 bp, Homo sapiens
aagttgtcaaaaggaaaagaaagcatcaatttacttcccctcaaaattttatttggagactcaaccccaaattctattttgttttctcagttttttttcttgtggtaaaatacagtaacaaaatttaccatcttaataattttaactctatagttcaaaggtaagtatatttatattgttgcgcaactgtatcaccaccatccatctccagttttcttcttgcaaaactgaaactctatacccattaaacagtagcctcccccttttcccatccccccagtactgggcaaccatccttctactttctgcttctatgaatctgactactctaggtatcttgtttaaattgaatcatacaatatttgtctttttgtggctgactaatttcacttagcgtaatgtcctctgagttcatccatgttgtatcatgtgccagaagttccttcctttgtatgactgaatatattcctattgtgtgtgtgtttgtggttgtttgtatgtacatactttgcttatccattcatctgccaatggacactaaaagctcccaccttttatgtatttatttataacctaggaagtgaagaagcttctgccaaattctaaattttatggaggaaaacaaatcatggctgattagataactagtgtttactttagatagaatattaattttaggtctactttatggcatatagaatttttttaaatcaatatttgcattatatttatgcccattttatagggttgggataatttacttatttattttactttattttattttatttattttattttgagatggaatcttgctctgtcacccaggctagagtgcagtggtacagtc

SEQ ID NO: 43193 - DNA, 3087 bp, Homo sapiens
aaatacaaagcgccactaataacagagctagtaaagatggatgggaatataggtggaagtacaatccccttttaattgcaacaaggttcgccaggttgcttagggttgggcaaactggagatcactgacacggaaaacaagaaaacccttattgtttatagctgttatgtatgaataggttattagccttaggaaaattatttgtgccgaatacggcttttgagtaagcaaaaaatattaacgtcaagttgaatgtaattgaagcgacttattgggcgtggggtggggggtgggggttgaaagcccaaacataaggcgagcacagataatttatttaacaaggctatggggttggtggggggctcggaaaaaaatcagcggcggaacctgctctcagccaccttgcaccaggacacaaacactgactcaaaaatgaaacgagtatcatctctaagtgaatgtgagtgccaagtagaaagctcgtatccgatttattatcaaaacgtctttgtaccattttaacatccattccaggaagaaaaaacctattgggaatatggttaatttgtaattaagtgctatttacccaaattaaagaaacaggtaacaaaaaattttaaaagccggcgaaatactatttaatttactcaggaacgctttagaactcttttagttggtgggtgggaatgcgggcggggaagcgcactaagccgaacgctggggcaaaggtttcctaaacagttaccgagaggtaactcccccttcatctgggacgtggctcaagattacaggtgatcgcggtgccccgaggcgccaggaggcaactttcacctgggggaggcgccgggcgccagcgggccaagcggccgggccgcggagcccacttcacttgggagctgccccaggccgggggtcgacaccgcgtcccctcccttagcctagctgcgacccagctttagggcctaagggcaaatcgagcgctcggtcctcccagcgccatgtgcgcggcccgcccaggcccttggccgccgtcgccgcgggggcaggccgcgagccagccgcgagccacagaggcctggtgcgcgctccgcccctgagcctgcagtcggggcggcctcagccagtgagccgggagtcgtccccttcgtcctccctcgcactcggagggcagctggggcggggcagaccctcgggccgggcggcacccgggcgggcgaatccgtcagctcccgcgggaggcccggcgagagaaggacccggtgagtagccacgtcacgctcctcagggaggccccgccccgtgctctcgggccgcccctcttcgccgtctccacgcctccgcgggcagttaccagctttggctgctcgcgcctccccaactcgggtaaagctcctcggcctcggcgtgctgcgcctccgcggctgccctgcgccaggtgagggctcgcggctcccggctgcggctcccggcgcgtggtggcgggctcggggcgtgcgtcgcggagaggacggggccggcgggcggttggcgctccgttcggtgcggggaggggcgtcacgccgggcgctgcgcggcctcggcgggcggcggcagcggcggccacggccgccgggctctcgggttgtctgtccccagttggagccggccggtgtcccggcggagagacgggcagtcgggttccctggcctcggggccaccccggctggggcggctggggcagagggacgatgtctactcgcgccccgatgcccgccgcccattctcgggaggatccgcccgcggtgactgctgagagggagtcgctgttggccgcggcgaaccggccggccgagcagccgcccccgcccgaatgtgagggcaaagaggcggcgagggaggagagggccgcggccgccactagcgctggggcgcggggagagccgtcgccggcgctggtgctgggacgcagcgtgccccaggcggctgtccccgtgaggcccctggcgctgcacctggcgcacaaggcgcgtgggcccgggggccctttcggcggggagccgccaccgccaccgccgccgccgtcgccgttgccgccgttgctgcgggatccgccggccgaggacgcccgggaagaggtggcagctggccctgcggaaaagcggcagccgccgctgctgccgcctaagggaaatccctggaccaaaaagcctccccagcacctgtccccagacacgacaggtccgccaccgcccccgctggaaaccctggaggcaggtctgtggttgctctgcgttgggcactggcagggtgcgggcaggggcgacttgcgggacttgccggcgcgtggcggcggtagcgggcaccaggcccgggtaacggcaggcctcccctccctgtcagtcggaggtaatttgttccaaggtgtcattcactctgcctatttacagacatgggcatctgggaagggagcggcaggaagaggtgggacctcaggttctccttgcctgatgggggcacggaggtggtagcttggcggcgcatccctgctggcgcggttgcgattgtgttttgtccccagtgttagtgacttgggaaagtagctaactttagatactgcagtgcttcgtatgggaaagttttggtagacttttttttttttttttttacataaaaggattgaagcaagtcagagcaaggggatttattcgtaagtggaagcgcgattgtagtcttttgtgaaataagatgaaaaaaggttttcaaaacactgctgagcagtcatattaaaaatgagactttaaatgtggtttttaaagtgctttatggggggaggggggagggatagcattaggagatatacctaatgttaaatgacgagttgatgggtgcagcacaccaacatggctgcacatgtatacatgtgtaacctgcacgttgtgcacatgtaccctaaaactttaagtataattaaaaaaaataaagtgctttaagttataagtgtgctggaaaataattgaaataggatagttgacatgcgagcgtggattgcacgttaggtaaatggttttctaacattgtcagctctccttccctttagaggagataaga

SEQ ID NO: 43194 - DNA, 611 bp, Homo sapiens
ggaccacagtctatttgcagttaaataacttaggtaacttagataaaagagattgtggtgtagaaacatactgttttgagagacttgggttctagtgcaggtattgttactaactggctagttgacttctggcaagatttctgggcattataaatgaataacatggatagactcatttcctctggttcataataccagagtgccacttataacctggctgccttggcttccatttatatatttatttaatattatttaattcatttaaataaatacattttacattagtttatttaaataggtagatagattgtcagtcttgctctattgcagtggtgagatcatagctcactgcagccttgacctcctggactcaagcaattcccctgccttggcatcccaagtagttgggatgacaggcacgcatgtcattccatggaattagccatgcccggctagttatttttaatttttttttgtagagacaggggccccctttgttgtccaggctggtcttgagctcttggggtcaagctatcctgcctcagcccccacaaagtgctgggactacaggtgtaagccaccctgcctggcggctttctattgtctat

SEQ ID NO: 43195 - DNA, 2889 bp, Homo sapiens
ggtgttatatgcctcttagattctgaatgttgttattaagtataatgctagactctttattagaacgtctttttcactccattgtaattaatccctgttttagaagttcatttttttgaggttggtatcaattattgtctgttggttactctgttagccagtttagtaattagattcctccattctacttcagcaagaagttgagaactttaagaagctaaatctcattagtaaagagcagtttgaaaacctaacacctgaacttccttttgagccaaaccaagaagttcctgtagcaccttcacagtccaggcaaggtatgtaaatctgcttttgtgtaagtgtctgaatagtattaaagcagttctgaattgtttttaaaaattgctccttttttttctttatttgtggaaaatcattaggtaaatggtaaaatgctagaattttaaaactcaacttttatccttttgtgaacttctattatcacaccagattatgctcaaagccagaggcttacttagaagtaggcagaatttgttggttctttatgtatctgatgtgattttaagattgctgggaatgtttctcttcccaaaataaaatttttcactgactcactgatccttagaatgcgctagagtcattcttttgttttaagggcttagctctgtgtgagagtgtaaataaatacattgggagatccataaattgaatctgacatttcagacaagtataactgattttattatagccttttcctgaaggtggttaaaaaaatgatttataaaaagtcacacatatacaaagatagagtgaattttataataaaactcccatgtacctgctatacttaatcatctcatacccaattttgtctcgactccagtaactcctatacctccctgtggattatttttaaacaaattctcaatcacatgattcatatttttttgtccttaaagatttctgtatgtgtctttaaaaagataagggctatatcttttaacacataaatagcaggacattatcatatctaaaattaacagtaattccttaacgttagatatctagtgttcaaatttcctcattcatcactttttttttccagtttcttcaaatagattgcaatagattgatatgtcttttttagtctacaggtttctactattttttgccttataatttattggtccttgcaatttggtattgaagaaactgggttgtttgtcttgtagaatttttcacattctgaattttgctgattgcatccccatggtttcatttaacctgttttctagtcctgaattatctataactgttagttcagcatagagacttgattagattaagactcaaatctctgtaagaatatgtcatatgtagtattgaatactattaggagatacataatgctctattgtctctttttgtaatgttagcagtcattgatgatcagtgagtgaagcttttattttactaggggttgcaaaatagtgatgattctatttttaatcattacgtcttaccttaataggtagaatacttttataaagagaactttccccagaatatttatttattctgagatagagttcttacaggaaagtgagtcagtgctgaattatttccctttgtttactagtttcaaagtactagctggttccttaacattcttcgctggtgactaatgaagtttttgtttgtttgtttttaaatgatcattgtgaactcataaatacatgagatgggtttcattctattacagttattattattattattgatacctatgccagttatcagtttattgacttttagctctaaagccacctttcattttcttgctcagtaataatggagttggactgttaactttaatgtttcccaccccacagaaggttgagcccccaccaaggttgagctttgtcagtaccggatctgctactcagttggtccttgtttctaggccttttgaatagaaagagctaggaaattttttaaggagaaaaatatattacgtattcatgttgatattttctgtctaaatttaagattataggttttaattttaatttctttgattttgtagttgtattgctttttacttatatataaaaaatctttcttcctaaccacagtaacataattatttatttgctaatcctatgatataatagttccagaataacaataacattaaataataatattataaatactgaaaggtaacttcttttagagttctttaaactgtaaacttttaaaaacttcatactttaaagctttctttaaagttcttagtgtgtcccactagggctgttcagttaaattgctggattttttgccttgttaaatttgaatactttaaaattgagaatgtatattcctttgcacatcatagaaagcatacaagtcacaaataaggagataaatttggcattgcatgacattaacaaagaattaatatcatagaaatctaaaaccttaaaaattaatatgaaaaatggcaaacatgaatagaaaaagtagtaaatgaaacatgaacatcagtttcatatttgggaagaccaaatggccaataaatatgaaaagaggctatttttactgaggttttccaattaaaaccatagcaatacgccatattataacccagcagtttcatttcaagagatactgttgcaggccattgtggctcatgcctataatcccaacacttcgggaggccaaggcaggaggatcacttgagcccaggagtttgagaccagcctgggcatactgttgcaaatgtttaccaagagaacatttgtagtatcattgttcataatagaaaaaagcaaatgaaaactaaaaaatgcccagttatagtagaatgtattataagatgtggtg

SEQ ID NO: 43196 - DNA, 2016 bp, Homo sapiens
agctgggagagtccacttgcttgtgagaagtagcaaggcccacagggcattcctgaggccactgtggcagggaagatcaggtggggctctggcagtctgagggatgtcctgtatgctcagcatgcttggaagagtggctggcaaaagcctgagaacaggagatctggaggggcctcacagctaggaagcggggagactattatatcagtggctgcagcataggctgcgtggttggagataccattgaggagacagcaacagtggacaaccaaaagggaatttattttggtggatgctaacatgaaggggttgatgacagagcaatggcactgatgccgtgagcccacagaagccttgtggaactaacttgccacttcagggacaaggctgtgggtggggaatgaaggcagggaaaaaattcatttgaaaaatgctcttttggcctctcttggagtagcctggcttttgtctctgctaacacatcagaccagccctgtcctccccaggattctctggggactctgagatgtggtgtaggggacagattggatccctaatttgctgccgacctcctttctgcaaactctttgggctagatcaatgtgagcgctgcaaggtgtaagcaagggaagccatcatcgatagcacaccatttccactttcattctgaactcttaactgacacatttacagaacctcttacaaaaatgaaaagttcaaatatccctctgttgtaaagaaacaagatgggcccagtggaatagtccatcttgtttctttactctttacatttggatgaagaaccacaccatttggtcttgggatccacttgaaaactctccaggactcagatttctgttcttatttctcataaggcacagtgtacgtgtgtcatcctctgagctgtctgtgatgttttccacctgaccacagctcatgctgtgtctcccaccatggtctggtcaggcaagctgtgtgtacacttcttgagaaggctgattgttgtgaaaacctttgccacagaaacaaaaacgaggggctgcctctttcagatacattcgccagcagcttttctcttatgacctctggaacacaattgcatcaactcagacatgtgactgggcagaaataccagctcaaagaccatctggttaagaatgaggcatacttcccagcttggtggatggcaaaatgtcaaaatgccccagggggatctgcctcatctctcattcctaaaatattcacaggctgactgtttctgacccagcctcaaaaaggggggttttccctggcagaagctgaagtgatcctggcctcaggttctatgtcttttggagcactgtcaggggcttctgtgtttctggagctaatctaaggaataagtgttgttttaggacagtcgtaattcagtgaaatttattgatgcactcactaagtgagcagatactgtcctgggggtagggatactgttttagtcttcctgtgctgctataaccaaatacatgagactgaataatttatgaaaaacagaaatttatattctcacagttctggaggctgggaagtccaagatcaaggcaggttcagtgtctggtgaaggccacttgttcatagacagtaccgtccagatgtcctcacttggcagaagggacagaagagcgaaaaggggacaaacactgtgtcctcatgggcagaagagtggaagggcaaacttgcccctgcaagccctttataaggcactaatccattcatgagggctccagccccatggcctaatcacctccttatagccccacattttaatgctgctgcattgtggattaagtttcaacatgaaatctggaggggcacaaacattcaaaccacagcaggcacaaagatagtcaatttctgctcttaacagatcaggcaacgcggggagggtctaagagagggaggaaagagacaatagattagatgctgatgacacagggtggccatgctatgacagaggtaggtgagcatagcaggggagaa

SEQ ID NO: 43197 - DNA, 5202 bp, Homo sapiens
atttacctaaaatacctagacctcagactccccacctgtagagcaggaatacttaccaacttcactgaggaattatggagataaaaaaattaatggatctgatattgtgggtgcttaacgaatctggttttctttctcctcctgtattcagttttttacatgaccaaactttcctcacctgctggccaagtgcctgatctgttactaaatttaatattggcaaatacagttaatgccaactgtttgccaaaatgtgtatactccaccaaattacactgtcaatatttaattaagagcctgaactttaaaaatgtatgactaaaaataaacacatgtttagcattatggaaaaatctcacaaaatttaatcctaaaaccattattgtgaaattagggtagatattggctaggcatagaaactaacaattactgcttctgaattattctgctacaaaactgcttaatttatgaggatgaaaataaaaattaaaagcaaaactgaacttgtatctgttttatagccagaaatttggctttaagattttttgaaaagtactacttattacattttctattaatatgcaatatcaacatattctaagcccataaaatgatctggctttctttaaggttcctttcaataataaaatattcaaatatctgttatgttgttgatcaactgtagaatactaactgtatatcactcttaggctgttcaacagaacctaggaactggcagaaactaatctaaaactgacttctccattgtaatctcaagagcctccctcagtgcacataccataaaaaagcaatctaccacctatgactcttaatttttaatttttttttataccgagtctctctctgtcgcccaggctggagtgcaatggcgcaatctcggctcactgcaacccccacctcccgggttccagcaactctccctgcctccgcctcccgagtagctgggattacaggcacccgccaccacgtctagctgattttcttgtatttttagtagagacgaggttttgttatattggccaggctggtttcgaactcctgacctctggtgatccacccgcctcggcctcccaaagcactgggattacaggcatgaaccaccacgcctggctttaatttttaatttctatcacagaacaaacgtttgccactggaggctgccaaactgtttctatgactgtctctcttagctattttcagatactgccaaggcataatgtgtgaggactaatacgattctttgtactaatactttgttttcttcagtggcagttcagacagggtacaaaagctgatcttttagctgggtaaggtctatattaaaaatttaaacctgtacaggatttctaatcacttaacacattttaataccaatgggggaaaagcttgaactaggtataaaatgctgtctaaatccttgatttaaaaaaaatttacttcgcttggcctgtttaaatactgtactttggccctgttctcttgtcccacgtgtgcttaagtaaacaaaaatgtattaaccatttcagttgatataagtaggcagacaccttgtgttcacatttatgtaaccagaagcaaaaactctgtaagctatgtatttacttggttggattaaatgtgtatatatacacagaagtacaaacaactaagaaataaattacataattcaacaccaaaaatctcctatttcttatccctattccaatgaacaaactacaaaccaaagcacttctaaaatatcttccagctatcaagcactgaaatcagaagtatatatttttaagtgtcaataaatcttatacacctacagattaaattaaggagaaaaccagcttacttccagactgccaaccctatgactttaaggcttggaggtactctctccaataacaggtcactttaggtctctaatttaattatttattcttattgtagtcaccacttttttttaaagcttagtattaatcagtgcacaaccaggatgcacaatgttgctcaactgtatgatataccaacaggttccatgagtctggggtttattaacataatccaaaatgtatgctacaaccacactgtaaaaaaagggcgtctaaatcaactaccctacacaaagttccctgaaaacaaagttctctcaaaacaaagttctaaaaatctttaacttgcataactggcacatgggggtataaatctacaactcttctaagttttttctccttagttctgctaagtgaaaacacaagtcattatcaacgtgtacttgaaaagagaaaaaaaaagaaaaaagaaaccagagacacgcctgctgggtataggagctccacccccaaaactcaaggtgaatatccttaccagtctttaataagctctgcattctggtctgttctcatcccacataccttgttaatcatggaaagcaactccgaactaaaactggtttaaagagagtccgaggtgttgcttatacgtctggacttcagagactggagggttgggactttacatgcccctaaacgtggccttacggagtaatacagcgagggaaaaaaggagatcagtggcaaaaaaaaaaaaaaagggggcaaggaaaagaaaacggtgaattacagagcccaaaactttagtttaggtcccaacttcagaaatctcccttccctggtgccccatccatcccaggaatcaggagactcaaaaaaggttaagggccagcgttgacctgtgacaactaaaacgattttgaaaaatccagccaaagaaacaaaaaaaaaaggctgcgaggagaaatgggatggaagaaagatgaatgctgagagctggtctctggggcgccaccggggaccctggtttcgggggaagaactggaggtgcccgtagctgcggggggacggtgtgtgtgtaggggcgggatgggccgtcccaggtgcggcggccgaggcgcgggggtcccggagacgagaaggctgggcaaactaacccggtgcccagaggcctccctgtccgaagggggttgtgcttcagctgcagggggtccttcccctccccttccaactcctcacccgggccgtagaacttgctgcctttggtcacgtcgaagactttcccattgaccgcgagcaggatgcgcgggttgcgggagccgtcgtactggcgcagctgctccaagctgaagtcccgcttcttcatgcgaggcagagaggtggcggggctctcctcgcccgccccggccccggcccccagaccccgccgcccccagcgcacccacagccggtaggcccccagcagcaccagagccaccagcgccacgttcagcagcatttccccgccccccgtcagaagcgccaacgccgccgccgcccagcctcccccttccgctgccgctcccgcgtcgcctggactctcgctgccgccgtcgttgctgctctcgctgccactccccagggtgcctagcttcacgtccccatcaccagccgccatcactgcccgccagcgccttcctcctcctccccgccccctgccctccccaaccccacggccggccccgcccatctgggggcctctcagccaataacgtgagaagagggggcggggtcaggccggctcctgattgggtgttgacggggtaacgttgtctcggatctcccgccccctcccttctttcgctggccgcgcacgcgtgcaacgccccgcccacctcgccccacacttccctgctctcactccaagcctccgctaggttaagtagacgagccgggcgggtctgaagaaaagatgctacgacggccgcgcggacgctcatgggcggggcgagaccacagcgcgtgcgcgggctcctgagcgccacgcgctcgcctttcgttcgtaacccctgcgggaggcacgccccgcccagtctccaggctctgcgcgtgcgccctggaatcgcttcccttcctaggcctgcgttcgcgtccgcaaactcccgcctccttgcgctccccccgcccgggagcttcacgtgcgccttggcggccgcgggggcaggtccgggctggacgcctggcggaggacgcgggcaggtggcttgtgggaggctggggcatagttgagctgcaaggcgcaaaccgatgaggggcgtctgcttttcaccagggcgccgtcgcttttgtcgggaaaccggcagcgtaggcgcgcagaccgggaagcggcaagaagatttggccacgagctggggtcttcctggaacggagagaaagcacggaacccgcaccgggcttctctggcatcggcagtctacgtgctcctcgcgctggcaccgagcagccactccccgctgggtttggcaaaggctgctcttgtagaattttaaaggatttagagtctcattattccttgaatcataacttctgcggccgtagggaagtggacaggttgaggtggtctttctattcgtcattcactcttatttgcaggttctgtttcatgtacttggacgtcttttagcctctcacaccttgaaattctagtgtgaaaaagtgacctctgaagtctcacgcactcaactcgtttgacgaactcgtttgacgtgttctctcttgccctttgttgtctgttgtcttgagtctcatagaataggtttgaacctttcactgtcggttttgtaggagtcactgaggatattgacgaggcaagtgacagggtcgacactcttgtagagaggctgtatagcaaccaggtgtctgaaggattagaggctggggaaagagtgggaaagcagttagtaggctagggtatttgtgcgtgaggtgaggagactcagagctaggggagacattagagcaggggttggcaaacattttttgtaaagggcccgatcatattttaagtctctgccttaactactcagctctaccttgtaacgagaaagcagccatagacaatacttgaatgagtgtagctgtcttcagtaaaactatggacattgaatttttaatataatttcaggtatgaaatattcttttgatttttaagaaaatcattgaaatatgtaaatttttttttttttagttctggagaggtgcaaaaacaacttataagccatattgctgagccctgcattagaggtacctgagggagagcgacacaattggtagtaaatgaccatatactctatccttcaatatggaacacttttggaagtaaagt

SEQ ID NO: 43198 - DNA, 668 bp, Homo sapiens
caccaccaccatacccatacacacagagtccactgtataaaacagtttttttttaacttaaatagattcatgctattcattttgtgcagtctctccgtctcccaacagaatctcatggacatcactctagcacctgctgggtgccaggccctgtgcctcacctcatttaccctacaactaccatggcactattgtccccagtgggtagacaaggaactgacatgtgattaatttgcccaaagttgcacagctagtgattgtgggagcagcagctggaacttgggcaatctggcttttgagtccaaagtgctaccactgccttttactgtctcccaaattaatgctatttttgttctttttaataactttacaatattcgtatggatgtctggaatatattcaattatttctcttgttgatgaatgttgaggttattttttgccactgcacttctccaaggagggacttgagatcaaagaacatactatttttattaagcatggccaaattatattccaaggattatatagcccaagcaacatagaggcatatctgtttccttatattcctgccagtcctgggtgatgctgatatttttagttttttagtttgttcgtttgtttttttacccctggctgtgtgatcagtaaaaacaatacatctttatt

SEQ ID NO: 43199 - DNA, 757 bp, Homo sapiens
gatgaaacaaactcatgccgtagcaggaatgactgatggatcttactgcattagcaaatggtcccaaggacatttacatcttaagacatgattgttaaactaaaggaataagtctcaaatacagtgtatcagacagtttaaaaggagagtgaggtgaaatgtggggcagagggatctttaaatcacacaagggccatagttcactgctccccgaggccagctgttgctcttggaaatgtgttgataatggcatttagccaagaaggccagggaaacatttgggtctggttaaagggcaagccccggtctttcgctctacccttcgtctctctcatctccaacagggcactgcatgggtgtgctctctgcacggtgggttgtcatgggagcaaaaggatcatctgccagagcaggggccaccccagcagagggagcatctgtcctggagcagtgcaggaatggtgcaaacccagagtcagggcccttgacttttcattattgaaggctattgacttgtggactaagtggctgtcaggtatagccctttcacgtagacagaatcaagaacctttggcacaggctcttatcactgtgtgtaaaggtaaaaaattgattaggctcaagtggaagaaaacgtgatactttattttttctcagttgaaactttagtctctgtgtctttctgtgtcaagaaaatagtaaaatccaaatctaaccaggcaggcttttcccccgcttgattaaaggattttttttt

SEQ ID NO: 43200 - DNA, 502 bp, Homo sapiens
gaacccgggaggcggagcttgcagtgagccaagattgcgccactgcactccagcctgggtgacagagcgagactccgtctcagaaaaccaaaaccaaaaccaaaacaaaaaacaaacaaacaaaaaaaaacacaaaacaaaaaagaaagtcgtggataaaaggaaccttacagatcacctagtatgttagcctccttattttacagatagagaaattgaggccaaaagcaaggtgtaactttgacaaggtctcatagcctgttagtgggtaagctggaataagtccaaagcccttttgctgcaccatgaagctctgggacttgctaactacaaagactgaaagtccatggtgggtttgacaaagcattctaaagtattgacaaattatttctgccattgctgtttctggattgatatattcttcatctttcataaaccagactcttcaagggggaaatattttcttgtctttttaaccagcaaagaagattaaacagttatt

SEQ ID NO: 43201 - DNA, 680 bp, Homo sapiens
cgaaagacctgtagagaataaaaggtaaagaaatactgtatctaatagtttctagcatataaacactggattttaggtagcattattgtacaatgatgtgcatagtaggctttcaaaaagcgtttgtagaattaatgaaggaaatgaataattcattaatgaataatgaagaaagaaaaaaattgtataaactgaactgaactgaaatatttaacttaaaggaccaaataatctaaagaggaatctttatttgtttctgctcccaaagagctcatgttttgtatttagttatagttcaacaatgtttatttaatgccttctacatgcgaggcactgagatgacgtaaggaggttagataggggatgagcggaatgtaaacaaagatgtgtagtaatagaagtacttcaaaggtcagaacagacaggatgatgaaagaggaggaagacattaactctgccaatggtggcatattagaagaaattaacaaaagaattgagctcagttttgaaggtaaatgctggtttatcaggatgacaatgggcatggaaattctgggtagcaggaacaacattgatagtgacaggaggcagtcagatgcctaggcagataggggtgagtccccagcaaaatcccacctccaagtcgaagaccatgtaaagcctgaaagccaagttacaag

SEQ ID NO: 43202 - DNA, 725 bp, Homo sapiens
agaggcaaacattgcacaggttcttcagtttgtctccagccatctgggtattgctaaacacatctgtttcttctcttggagaggatgccccagtgttgtcacatgatttaaattatggcaagagtggaggttccgtttgtccacttccctggtttgcagggatggctcgggggagccttgctttgccgtgactggcattcatccagggcccgggcatttaactctgaattttgatttgggcatttgcctggtgtgatattctgccagggccttcccagtctgttctctgctgttttgctcctgaagatttatggctaatgaagggataaagaaaggtcgtggcgagaggcggcagcatgtggtggtgactcatggtctgggcctggtgtggagccagtttgggtggaacgctccactggctgctgtgcctgttttcacgtggctctttgccacagccctgcaggaggcagtttcttgcctgtctctggtcagagaggcctggtgattctgcctgtctcctgctgttatggactcaggtcagggcactaaagcctggcggccttttgacaaacagtctcacaaatgggagctcaggagacagtgggatgggccggtcctgggaagggctccaaagccactccaacgtgggggacacagtagcagcatgggccgaaggaagtcaagtgaagctactagcaggacagggtttctcagccttggcactg

SEQ ID NO: 43203 - DNA, 742 bp, Homo sapiens
tgaagataattattacaacattgaacttttctggaaccaaactcagcaaagaataggtgatgttctcgtcttgaaggacatatagggtatcaatttattgcctcacagctacaaattcactcttcattgcatgctctgagaaaatggatatgggccctttaaatatttttctttgccagatggcaccatgttaatctttgtcggtagagggtgcatgagagacatgataggaggaacgggctttgcttcctggtctgaccatttttatatgcaagctcctggaatgcctgtggtttctccagcacctgggtcctgctggcaaccagcagcacccagtggccagcagcgtactctttcacctcttcttgggtgactttgtggaatgctccaatgtgacatctccctgtgaacgcctttcctgacaccctaaaaagtgtcaggaatttccagcaagttccagagagcaggtttccagcaagtttggtcagtatgacaccacagcgatatctctgccattcactgaacttggattcttccttcttcagtgaggtatggatttcaaccctggattgggaagtggctggggacccttccctgggcactgtatcccagccctggggacagtggctgcttcatattcccgtatccattagcattctcttctttttttttttttcctttccaacttttattttaggttcaggggtacatgcgcaggtttgttacatgggtaaactatatg

SEQ ID NO: 43204 - DNA, 2179 bp, Homo sapiens
tggtgtagctttgaaaatctagcctaaagcagctaatgttgccgtttaaatcatcctctcactatccttagggaaatgtggagattaaaaaaatgacagcccaactgctcaaatgacctatacctgggagaataagagaaacaacctatttcctctcaggaactgggccgatcaatataaatatttcaaaaggaccatcatgcaataaaggccttggaatttgtatcctacatcagagcaccctagatatttccaacatagacctatcaggttttccacaagggagggagacattgtaacagttgaataactggaactgaactgggttgcacgtgtgtgagcctctgtgtgtgtgtgtgtgtgtgtttgtgtgtttaggaaaggaagggaaaggaggccattattattgtgtatgtttctggtaaacattctttttttcccctactgaaacttgggcgtatcccagaaattaggtgctgttaatcgtgtcagctaaaaaaaaaaaaaaaaaaaaaaaaaaagcatgttctaaaatatgcacacagttctaaattgaagctctaaatagctttaaattgaagtggcaggagtttttcaatgataccattaattgcatttcattaattgggaaaaagagcttttgtgtagctgtggttatgatgggctggatttaatcagtgtaggtaccactaacaggctggcactgctttcggcctgcaatgcctttgaaattctaaaatggaaaaggaggccaacacactgagcaattatttcagaacagattgcccgttaacatttcataatatcaccgaaatacatcctttctgggacagagacttgctttggctatgaacatccaagaggtggcagcaccccatgctccgttggctttctgcatccctccagatgagagctcaccgcagaggtctcatcattgcgtcacctgaaagccagttaggagggcggaggtgggggggaggtgatggagggaagaggtagcgttttgtatttcagttcttctggaagagttcaggaaacagctgcatggattgttttaaatggacttgaaaaggtttttcttttcttttcctccctgaaatctactgccctgtgcagtatctctctatgaagaccacatgagtgcacttacgtgttctctgattcactccctgagggaggaaggaagagtttcaattgcctgggatcccctgagacctcattttcaattctctgcacttgtcttttataaacacaggaaggtgggatgaagacggcattattgacaattattttttgagcatgtatgtgggcagggcactgaccacatcatcaagaatgtgacacagtcggctgctaggataattctcttcttccctaactgttcctccaggtcccccatacacatagaaatctcatgctaaaaatattttacacaacaaatagctgttgagatcgcatcaaaccctgaacaataaggagcaatataaccttacgtgctaggtgtcatgtgcctgatatgagaagcatctggtgacatgggtgaaggagtgtcagggctggtctagcctggccactgtccaactatctgtggaaactggccctcgtcatgctaggaagtgtgagggcaagagctggaatacactgaggcagccttgctgttgggggttattggcagctgttgggggttagagacaggactctcatgggtaagtagtgtgcaaaatgccacaggaggctggagctgggctcagcaacagtctagggtccagcacagctcagctgtgggcctatccccatcctatccagcacagggacttggcctctgtgtacaccactacggctgcttggcctcaccttcaactctgtgtaccttttccttaactcatttcttcagcttagtcttgaccttgacaccctcataccctctgtcccatagctttcctacatggcacctgctctctgggtacatctttttagcttctggtcccactaacaattcagagactattttccctgtatttcctggttaattttgagggaagtgtggagggggaagggaaggaggaagggaagagagactcattggctgagttaattgcattcttcctgtctggacagagctttggaggccaggccatctcccaggggatgagttaggctctgcttggccacctttgag

SEQ ID NO: 43205 - DNA, 2409 bp, Homo sapiens
cttgttttcaaaacaacagccctgagccaacctttttaagtagttccatatgtttttatggagagtttatggattgtggccttcggaattcttttgtttatcactgggaattcaagtcctgaaagctgctaactaaccatgaggtctgctggttatacaagctgttggacctcttaaggacgttgacataaggaccactttctgtgaaataagaattagtggtttaaaaagagtgcacttaacagtatcatgtaagtatcagtttctgtatgtcattactagccaggctttttttaaaaaactggactgtgctgccttgtgtgtacatttaaatgaggcccttaaagggaaatctgagcaatgtcttcaaacaaagacttataatcagaagggtctttttaaaaaaaaaaaaaaaaaagaataactatcttcagcagacctaaaaccaggatggaaaggtggatacttccccacctgggccccaaagcagggcccttcaaaatactgaaggtccagcattccctgggcaattcttcctccttctctgtcctccccacccccatcaatacccagcttgcagtgatattcttttaccctttactaatctaatgccaaacacatgtaggttctatcctgtttccaggaaagaggtttccatgaattgcctcatcagccttactaatagctacaatatatggagcactttgtgcccagcactcgattccttttatacttgatctcttttcatcctttcttcacaatagccccatgaggtgggtgctataattatttctaattttacagataaggaaaccaaagctcagagagtctgagcaatttgcttaaagttgcttaacagctgtattagcctactacttataattcgactacctgtgtccaaggctacataaattcaggtcgcctgactcaaagctcttattcaacgtgctagcctccttcccactagatctcataagatctagcttgatctctaaggctccattccagcttggaagaactatggttcttctccagtgtcagttgtgttgctgttcatgttgttttcatgtaaaacaatgtaagaaagaggctgataatctccctccatgaaacagttcttcacacatttaaaatcatccatggctgatcataaatgcttctccagagagtgaatggtcatggctggtgcagaagggtaacactctggaaaggcggatgtgagacctggcagctctgcctgggtacacatagcttagggctgacaagtgagtcagcagaagtgagcagacaatactgcattgggttttaacgtgatgagtcagccttgctatctggccagcttcagtgcagccccctgaagttttaacagaatattaattgccctttcacttcccattccacacagctgggtgggattgctaccagccacactgttgagaagttacacattttagcccagcctagaaaggtttcctgtggtgggtgaaatgacaacatgcacaaaggtcaaactccagatgtgggaatctgaccttttctcctcttggggaaaacattgcctcattataatctcaaaagatttttggtacaggtttaaggctagagtctactgaaagatccaaactcctctaacatagaggatgccagcctgtttcatgtaaatttatccaaggctttgagaccacctacaaaattcctgagccaagggaccagggaatgtaggcgaatgtttaggcatttctgaaggagggagctagacctagaagttgctgcttgctcctagaagttggaaggcatttcaagatgaggaatgagttgtttctggattgatgccttcactggctagaaatgccagcgggtggtgggaagagtacatggcaggatgatgaggagtttcgcattcattcattcatttattcatctgtgtattcattttacaaaaattcatatcagatttgcaaaattcactcacaatacactcagagataataaaaaatgtaacaactttttttattaactggtggaatatttctctcaaatttccaccactggaccccagagtgggaattcaattttagcccaatcttgtaaacttagttccaatgtaattatctaggttgagctaaaagtttcttttcatctttcaggtttcctcttcatgcctctactcctatgcagtttgacctctcagtgtgcagctggtgatagatggaaacccttgttcataagctttgtggcactgtcggcaggatgaggggacttctggatcctcactggtcactgtggcagagtggttggtgttgtctgctccctagacaggaacccactgaagaatctgacattttttgatatgctggcattcattgttacagcccatcatcccagccatcaatccaggacatggggtct

SEQ ID NO: 43206 - DNA, 1618 bp, Homo sapiens
gagaggggacaatgtgtgtgcaaaggcacagaggcaagaaagagcttctttttggtgagacagtgctaggtggagtgagtataatggttggagaggagagtagggaagagcgggcagacttcagagtggatctgataaaactcagtagtattttggttgcaacgggctgggtcatgtctgaagaagcagccatttgagaatgagcaaaaatgaggatcctggtttttaaacaccttagcagtagtgtggtcctgtggtagggatgtgcaaagcactggactgcccgcctcctttttctgttcggtgaagggtggggtgaggaagagcgctcagagtgcacagatggattctcaattcagggtgaaacaggattttagatccagtttccttttatagtggttttagagcaaagaatcagggactctgctgttttctggtataaaatgagagcagccatacacttcctatgcccttgaatcaagatcagacaattccagggaagagctaagttttaacctttgatctctaggggtaaagtttttctttactttctccctccctctcttcctccttcctctcttcctctccaccccttcttttttgtttacgttttgagctgaataacaggggaaaatggggcctgatatactacaaactccaactagagtccttggcatcatggaaaattccttgacttgttttgcaaaggttggctgcaccatgagattccattgtttcaaagtggagtcatgtatatgacataggttttgcattaggactctgggggattttccttatgaaacaaaatgtgcaatctgcttagtttcccagtggcaaagcagaaaactagatctatttgttatagaactttacgcttcagttttcccctcataattacagatgtgactttgaagctcactgcagcaaattcaatgagaccttacaatttaaaatgaaaataaaatatatttagaatgaagcatcataggtttaagaatagaatactttaaaaacgcaaaaaacaagaagttaaatgtgtatgttacctaaatgttaatgggtttcccttttccttatctcctaagtcctgctgtccaagatcccttgattctttgcctagaatcaatgatgtcattcaaagggaatgtttggaggcactgtcctagttcacccgcagcatttcagatggcattagcgtcactaggaaaacagacttgaaaccaggttcaagaagaataataatttgcattttgcttttatagtttgctgtcttcccctctagattatctagtttaaaaaggaactttcatcatccttgaagttctatgttgatcagacattttgtccctattatttcctctttcttcacattacgtcaatgagagagttgagaataggtctgaaagaagtcaggttatgagctaacaggatactggggagtgatacattagaggcggtcagttctgtgaaagatgctattgatgctgagtgcgtctgcctaggtggtctcatccagagtttccatgccacaaatacgctgctgactcctcagtcgctatttcttcttatgccttagatctccgtattcgaaccattgtctgacatcatgagactgtgc

SEQ ID NO: 43207 - DNA, 2492 bp, Homo sapiens
aaagaatgcagactgcatgagtccatttatagacagtaccaaaaaacccaggtgaaagtaatctatggcattagcaattaagatacgggttggccttgaggagagtgagtagactgtgcgtggagagagcagaggggcttctgggatatcagtgatattattcttgatctgagtgctggctttgcagatgggtttagttgtgaaactccagcaagctgtccactttatgctgtgtgcacttttcagtatgtatattattctttatttaaatttttttttagagtacagatttctaggcctttactgtgagatgtggtcctttgatgggacctgggagtttacatgtttgacaagcactcaggtgattgggatgcaggtggcctcaaagtgcactttgagaaacattggtaattgcattcagtgcagagatttttaaagcattcatcagctcttcaaaataatttaatcagctgctttatatactgcagctatttttggtcatttcagagatggtttcactcatcccacccccatcccactttcaccttctgagagcgaatcaatcctggaaaaatgaaaaccccaagtgagccccacgttggaaagagttgcagcttatactcagtgaggaaaggacaatcaagtgagaaagaaatccattggtggggaaaaaccccatcaagtgcaggaatcatagaaaccctctctgggaggagaactgaccttttctgatgaaaactcatttcatttatttagccacgggtgacagagtgtatctgagtctgaggcatttggtggaggctctgtaaaaactaggttaaggactgaatcaaaatctcttccaattacacgaaggaggaagctaagaatgcaaataactgtaaagctattgcttgttgtgactaaaagtcctccacatagtaaggcctaaatcagctttcattttattgctatggggaaggacagagctacccaacacaattatacagacaagtttttaagggaacaaaaacagtgaaaaaaaaaatcactcaatgcttgtttagagcttgctctatccgcccaagtgctgagaaagtgttctcaaaagtcaagagggaaagagttcttacttgataaaaaactgttggcttttaaagggtcagttattctccttgaagacacaggggtatgtacctgatttacctataggcaggctggtattaagttgatttcactggtatgtctaccccaatgattaaaaaatctgaaataattttgtacttgttggaaaatagccccagcccagggctccttgagaaccccccattcactgtccacattgcttggccctcctctgggattcctcagaactcccgacagtacagcaactaaagggttaatgtccagcaattgagagacctccaaccctgtccagccacaagctaccttagaggtcattgctttgtggtgatacctgtgaaggggagaaatggcctttttgggtcaactgcggaaccctatccatgttcttctcttactcaacagcttttcactaccctccccccagagtgccccaattctatttctcttgtaatttttcattctttggtaacttctcattcaaggcaatgaaagatcactaattaaatgtagatgttttgtcattagattaaccttctagtctgtcactcctaaacatccaagggcttccagaggctctctgattcatcggctccttcactctctcattcagcaaacatctctggaatgcctgctacatgccatcactgtgcttactggtaagactccatccccctcagcttaaatgagagctcacagtctggtgggaataatcaacctgtaaatagacaattctggtgcaatcatggagctattcgagtatgatgggaacataaaggctggcaaaggtagatcatggtgagtcagggaagacttcctggaagaagtggtttgagcttagtcttttttctttcttttttccttttatagatttagagagtacaagtgcagttttgttacagggatatattgtgtagtggtgaagtgtgggcttttagtgtccccatcgcccaaagagtgaacaatgtacccaataggtaaattttcagctctcaccacccccccttttttctccccttttttggagcgcccattgtctgttatttccctctctgtgttcatgtgtacccattgtttagctctcataagtgagaacatgtggtatttgattttctgagttattacacttaggataagggcctctagctctatccatgttgctgcaaaagacatgatctcattctttttttgttgtttttcttttctttttttattttattttttattatattttaagttctggggtacatgtgcagaacgtgcagttttgttacataggtatacatgtgccatggtggtttgctgcactcatcaacctgtcacctacattaggtatttctcctaatgtgatccctcccctagccccccac

SEQ ID NO: 43208 - DNA, 4447 bp, Homo sapiens
agaagcatctgaattctgttgtttttgcttttataaagactctaaccagcactgaggtaatggactactttgagtagatcaaaatgaggtggggaaatgtgatccccagctagaacactgtagtgatttcctcttggtactgtaataaatcatcacaaacttagtggcttaaaacaacgcaatgtattctcttacagttctagagatcagaagtctgaaagggtctcatgaggctgaaatcaaggcattggcaggatggcatttttatggaggctgtaagaccgatttccttaccttttcctgcatttagaggctgcctgcattccttggcttgtgtccccctccttcatcttcaaagccagtggtatagcatcttccagtctctctctgactctgaccctcactcttctgctccctctcatacttatcaggccccttgtgattccgttgggccacctggtaatctccctatctcaaaacccttaactcaatcgtatctgcaaagtcacttttgccatgtaaggtgctgtatgtacaggttctggggagtaagaagtagacatctttgggatgcattttttctacctacaataagtgtgttagagtggaaattagagataaggagactgagttccaatctccacgctgccattgaggaggaacgtgccttgaggcaaatctcaactcccgggccattgtttcctcctggtccctatgtagaccccgttaggatattctctttgagaagtaatgccttttcctaaacacagggagatatggctcctgctaattaaaagccagacctgttttacacacttacaaacgacaccctagcatttgtttaaggccacttctgaaccatgccattagtccttctaatggcgtttctgcaggttctcagctgatttctgcttaccatcctacatttacttacaccttgcctacagagcgtgtaagttttcaatttctcattttaaatagaggactccaattctatagcgtggctgatgcattaaatatccacagccaaattgcttaacgcccaggttttttatccccttcaaattaaagcttttaaaacacccagactccatgctggctgaatgacatacacagactttctgccggctctggggggcaggcgatactggttcctgtcaagttctaaatctggatgcttttttatagtggaacaactaaaaggaattgctgccttatgatatataactactacttattatagattgatccattttgcagcagggaggtggaaggcagggagctgtaggaagaacaagaaccaatcttagacctgagagaaagtaaccttctaattgccttttccatgacagcatcgtaagcttctttctggcagctttatttcacagtgacctgccacactgctgtaattttcctggtgtcactcatacaggtttaaaaaatgattggttttatggcttttatttgggaatttgtcaaggtttcacatttgtagaagccttgaagcagtggcctaatagtccataatttggtgtttaaagggatattggtgggtaacctgcttgggcccacaggtgcctacagtgatcgcatccttatgcctagcggggaaatctccataatttctgttacgctcctgtaatcctttgctgtcagaaaactccattccaggttccagcggactccagtcatcctgagatgggagaaaacctttcaagctttgtgatcaggttgatatttaaagctaattctcatgaaatgtacttcaggtgttcataaacccagacttgggtcagcgtattctggcgatagggatttacgtactccttttatgactcacagtctggaaatgaaagtgctggactctgagctctctctctctctctctctctctctctctctctctctctctctccgtctctctctctcttctaggatctcaacgctgccaacagatgtttttaaaagcctcagtttcgaggactgttttggcctcctgcccctgtgtgtactcctaggtttaatgaaaattggtgcctccggagctctcctcccgggggggagagcagctcctctcgtggtgcggttgcttgttctcgcagccagaacacactgggccagggctgttgtgtgtaaacacacacacgcacacacacctgcttcatcccggctcccttctctccgagttgcctgggttggcctccatttggagcctacctgctggtgtttatcacagtcggtgttttcccccttccatgttcctcagcaaagctggtgcttatctgagcagcgggcgatttttctgaagtgacctccgccgagcgggagatttatggtggcgtttgctttcattatgtgtggaggctgcctcgtgagctcgctgcgtggctgtcggaggaagagcagaacgcttcccagaataagcctccggtattatctttgaacatatgttcttgattaaatgagaagaggaaagtctcttcgttttttcctatttggaggttaaagtggagggtttctctaaaaacagattgcagtaaattgtgggtttatttgaacagtatgtcaacattatttactcacggtaaaaaaaaatctcaaattgataggtttcttttaattacctcatcctgaaagctgctctcaacaaacagcaaatatttcagaagccatttggataagtctggaaatgttgaattattggaaacctgccgagaataatacctttgaaaatgtttccatagttctgagtataagaaaacttgattagcaaacagcttgtctctgagcaaactgggtattgccttctgtgatcttgctggcctcgtaaaagatggcttgcaagatttttgtgtaatactgatcacaccaccctggaaaacaggtacctttctggggctcgttattattgtctgtcactcagactagagtgaccttgtttaaccccactacaataatatcttcctcttgagttctgtccaggaaacacaaaagctaaatgaaagaagattcagtaattgagttctcagcaagtccaaagagctcttctagcaaatccaggccaaaacatatttgaccaaagaatgttctttgacttcattgctcggtctcaactagatggaaagatgggctgctgggcagaatcattcctagagcccaaacctgtttgaggatggggtaattttcctggtgtcactcatgcaggtttaaagaatctcaaagctcctaacagatgtttaggtgaatgaggtagctgagagaaagacagagactcatatgtaagccaaggacccttatacacatacacccttaggctcatgttcttctgtaattttcttttgagaattgcttgtgatgtttgccttgtgtatgcatgcgtgtgtgtgtgtgtgtgtgtgtgtgtgtgtgtgtgtgtgtgttgaagggatggatgagttggcaggggtagggggtatggggcctataaatgagagattggggtgggtggattggggacctacacactatgattcagtgtgggccccaggttcccagggcacatcccatactttgggtaacatttcctgcaccagcatataaaactgagtttactccttgggatacttctaaactgagtatctcattaagagtatttcatctgaaatgggcatatgcaggcttgattttaggactgctgtataagctagtaaaatgtactagttgttaattattgaaatatccattagttggtaaatcactgcatgagacccactgaatactctacaccaccccaagtgtaccctggccttcacttctaggacctcctccctggcctcctctaaatccaggaactaaagacttaatggccagcactttgggggacctccagggcctgatttggcactacaactggcccttgaacctcatcggcagacaagaattctgaatgtaggccccgggtatatgtacaattgtcaggagcctgagcctcagagcaattctcctggtgcctgcccagatgtggaccctcaaggcagccagagctcctagctcccttgaccatggcttgggtttatatagaggaggtcaggcaacagagacttgccagggcagtgttcccggtcatgccaacaaaaatcactttttaaaagaagttctgagccattgggagatcaaagcttctttctttctacccttgcaagtcatttcctccacataccagtgtggaatccagcagccttcactgtggagaccagtgcagaaacagaagatgtaattctagtcccagctccagcacttaatacctccatgaccttgggcaagggacttaacctcctcacactgcagttttctcatctgtagagtattgatgtttgactcaattccttccagctgtaataacaaataattttgagtccttaaatttatgtttactagcccattcacccaccctgtcaatggatatgcc

SEQ ID NO: 43209 - DNA, 5519 bp, Homo sapiens
gtggtactcagtcttcattgttgagagggaggcgattttctaaataatgttacagagaaaagaatttaacccaagagcatgatagcccaccaaaagaattcttctctgactgaagtatgaagggtccttcttttctcttgaatcattatctcaacacaaatcttctgtgcctccttagacactgtggccactgtccacttctaggaccttcaactactcaaccaccatacctgcccaacacagttcaactggctgggactaatcagggacttaccttagaagtccccttaactctccacccctcaaccacacacacacacacacacacacacacacacacacacactgccaagccacctagtactcacctagaggttctggctcttcccctcatttccaggcttggatgaaacaggaacactatacatacatcaggtttggggtttggggtcccatgtagttggagcagtcatatgatataaacttggaaatgtgaaggagttaattcctagtgggacaagttttgaccaatgaaaaacaggcaatgggaggtaggtgggaagataaacttctcctttattcttcccagagaatgctagaggcatggtccctccctgcatccactgcaagatgtcccacatgccaagggaacagacctgctgagcctcccatgcctcatcagccaatggctcatcccgaagcagaagccagttgtgcaaggcatgactgtgcattgtttcctatactcacttcccttttttcctttttctgcagcttccctggcctgggcttgtgcttcccaaataaaatgtcagtactttaatccttgcttcaggcttttttttttttttccgctagaaaactaaatgagagcacgcctgatgggttggtgtcctcacttccagtcaccgccccctttccaatggaatccgacactgaagcataagttgaatgtggcatttcccttcagcgggctcccactgtctgtaaaatagagtccatactctatcatctggtgttaatagccctctagatttggtctcaaagtaattttctgattttagttcagtgattttttaaattcatataccatgttctctaactaaactgaactacttgaacctttttttattaccccatgttttctgacctccatgcccttaattatgctctttcctcaatctgaaatgtctgcacttacatctcctctctacattttaaattctgtccatcaagagcaagctcaaatgtcatcttctcagattaattaccaattccttcctctctgctgccagcccacaaaatttaataatctatttttttggaacccccaaatcatcttgtctgtgcttctcttgtggtacttcttactttttaccctatgttatagtattttgctgtatttcttctccccagttagaccataagctccttgcaggtacatctgactgattcatctttgtttcccagaggcctggcatggtaacttgcacataattggtgtttaagaaaattttatgaaacaaataaacagtggtcaggcacggtacctcatgtctgtaatctcagcactttgggaggctaaggcaggcagatcatttgagtccatgagttcgagaccagcctgggcaacatggagaaactctgtctttacacaaaatacaacaattagccaggcatggtggcgcatgcctgtagtccctggtgcttgggaagttgaggcaggaggatcatttgagcccaggctgcagaggttgcagtgagcccagatcgcaccattgtacaccagcctgagcgacagagtgagaccctatctcaaaaggaaaaaagaaataaacagtgtgcttttatataaaagcccaggattgtggttaaaaactaattaaattaaattaaattaagtatttcttatcttaaaccctagatccttagtttttcagggatatacaggaaaaaaaaatgaccacaaggatgcttctatttgtaagttgaaaggtcaggagatattaatagtttgaatgctgtggctttctgcctggggccatcaaacagaacatgctgtgcattttgctgaccttggacagttggctaagatgcagtactgaatgatctaacttcttaagaagtgactaatctacaagacttctgaatcattgttccttcctgaaaatggaggaaaagtttgataaagaaaaattccagtctgagaggattgttacagtttttttacaacattgtaaagcctaacaaacaacatagcaaaaaaaaaagtatattctatttaaatttatattatttatagtcattctatattaatcacttctaagataaatgaaatcttcatggaaacagcaggcaaaaacattggctgattatttctctcgtatgaaatgctaaactatgaaattcaaatatatttggaaaattcaatcatatatttatttcttaataacaactaatgaacttatagagaaactcatgtaaaaattcaatagcatttgaaaggtaaataaacagcactaatgagctttattataatactttcccacttatgatgtatgtttgtgactaacatctgttggatagtatttgagattaggaaaacttattttattaaaaaacaggaaaattttacttaataagttaacatggatgggaaatctatttgtaagaagttccatttgtgaaaaggtataaatatgtggtcacacatagttatattttgttgatagaaatagattttattagatcaatagaatcaggcaacaatgacgtggtcagcaagacattctgagaagtagccatgatgaagagaaagaagtcatcaagtttttcatccttacaaccacaaaagagagaagaatggggttcagttgggacaacaacagaggtcatatagaaatggctgggttggggatcaaaggacacggtcagcctatgaactcaggaattccttgggtagatctctatctgtggtttgtcctgagggcaccatcatggccaatataagtaaaccaggtgtttgtggatccatgttgtctcacccgtcctgtgtgtaagtatcactcactggcatggaatacaggagggctattctttacagggctttcgtgggttggtttccaatgggaatcactgtgatagtcactacccagtggttctccttgctccttatttctgctaaaaggggatgtgttctctcagagaagtcagcaactgactaaaccaagtgaccacagtctggggtaggctcacaaaggcccagttctgatgaatgcccccataaataaaagggttacactttttgctggcataattccaagaacttgtgctttatggcttcctcttaaactagtcaaaagaagctgttccatgctttaatacctatgtactaagctggtttcccagccactgttttgcttttgttttttcccagaaaactcggaggccccagagtatatgtaacagattcagtgcatccttggaagaccttttctaccttcccgattgtgactttttttcatagcttctctgcagtgcttaccatacaaccaaattagttcactgaattgagtatgctctgtgtgagatgtgagcaaaacaaaagctgctgggaacacagtaagtacaaaataagatgtgaaatccttccacccttacaaacaaacaagacccaaaactaggatcttgggtttgatattttgtggctcttttaaaattccaaaatattccttttgcgttaaatagggacagtgtaatgctcaaaattgggttaaagatcaaggattccaagtaaatccaaaataaagatgattgaaaagagctaaagaattgttgggctgcagcagccaggcaattttggtgaatttccaggaattccaactttttggttgggtttgttttgttaataatataccccttatagcagaaaaacttaggtccaaaagcacaactcacaaacaagaccttcagtgtaatgtttttattcttcccagaggagcaagattgctgagagcctatccacttggccacttaaaaactagtcaccatgcagaaagtgcattcttagaatgcctcatggagtgactcttctgtctatgaggtgtttttatcttgtatggactttagtttgggatgcaagtagtcaggaatgtctaagtctacattctccacagagtccatctggtcccctagagaacagtgagaattaaatattaaaccatggtaataacgctaatctcaatgacgaatatctgcagtttaatgtttaatccttactgtgctctagggcgtttgactccaaatacctgtctgataatggttaagtgggcaaccccacagttacctgctcctttagttgtaataccttccaattttatagctcttagagtaacactttcattgtaataatctcatgtaatccccataacaaccctgtgtgttatgtattattatcatatttcacaaatgaggtctatgagattaggtgactttcctaaatcttacagctaagtaagtgtcagaactgatactggaacgataacatacaactccaagtcccagcacttgctacagccacagttaccttccaggtaattattaatactttcaagatacattctcaaaggaacactttaagaaaagttttatctatcatcacaaattaaagggactttggtacctaagacaggtcaaccattgtttggtgctgaacgccctagaatttaatgtcgtatgatctaccagattgtaaaggaaactgaaaagatggaggaggagcggtataattaaggaaaaaccaagcagtagatttttactgctcagttttatttttaaaaagctaaatatttaaggttatttaaagtcattttgaagctgataccatggtttcaatacaatgtttaaatgaggccttttagggctatgcaagttgttggaactatggacccttttccaccagcagggggcagtaggcatttccccatcggtgtcctcctgttgtattaagagccccatgcctggctccccaccaccaccctgggtgaggagtctgaggatagcagaatagagtgtgctgacttggtttaattcctgaaagtctcgagctctaacactctctagtagaatgcatcaaggtattgggtttctctacaaattttatataaattccaggaattgggaagaaaaaattcaagggtgtgcaatgaactttcgttattcaagatcagaataagctgctaaaatatttttgttaattgttggaagtccaatttgtacttatctttaatggacaaggaatgccagagcctgccagggacattgatggtaatagtcagctcactttctatctttcatttttttttgagactgagtgtcactcttgttgcccaggctggagtgcaatggtgcgatctcggctcaccacaacctctgcctcctgggttcaagcgattctcctgcctcagcctcctgagtagctgggattacaggcatgcgccaccacccctgactaattttgt

SEQ ID NO: 43210 - DNA, 1058 bp, Homo sapiens
actaggggaagagggatataaaggctgagcagtgagcaagggagagctgtcctgtatgttctcaaacagctgttgggtgtgacgaaaagatctctggattagcaattaggtcatttgggtttttgtcctggttttgccatgaaatagttgtgtaattttcaacaagtttcttaatctctgggctcctgattctttcctaaaactagacaatctccaaagtctctttcgactctagaattttatgacaaatatgatttagagactgctagttgttagctatgactctggttgcaagtatcatagtgtctctagccataaaacatccaactttcttccttgaaagggtgggtgtatcttccttggaaggctggatgtatctacctgccattttctcagcccttcctaatatgcaaataaccactgaaccaaatgcatacaagaccttttgcctggaaaatgcctcactaacaggagagctgggatgttgttcccagtatggtcaggttaaatagactgccaccagatctaacagctgggctggctacttccaggcagcctgccagcatgtgaggacaggggcacattggctggcactacgatctctacagaacatgatctcacctctgctcactttgtctccttaggccctcgaggcccgagcagctgtgagactgtgtcctggtcaccgagagaagtggcctcctctccatggagatggctctgagatattgccccctaaagctaattgaggttccgtgatagatttgttttctgtttctacctttaacagcctcactgagctcagccctggacagcacaaatggtttttgtctcctattctaccgaattgagtagttctcaacaaggaaagatctatttctacctttccaacaccaaatctaacccactgtgctgtttgccttttagctggggcttcttaaaaatagcattttggagaattagactgaggatggtgaaagagaatgctgcttctccactagagaatcaatagtcttttatccctaaagatgaaactactgttatgctaggtagtttga

SEQ ID NO: 43211 - DNA, 2054 bp, Homo sapiens
cgtgcttgttcttgttttcctggcacaagtgcctttgctcctagaatggccgcttatctcggctgactgctatttgctaacaatgggctcactgggttgttttgaaaagtcacatgaagtttataattctgtctgatgctaccttggacttatgtgtgctaaataagcctcaaacaccaaaactgccttaaaacctaaactaagctcaacgaatgacttcttctcaggtatgcaggcaccggaaggaacccatacaccctgcccagctaattctacacctcttgtctgtgttgctcttccacagtactgctagttagaccttgcactcttctccatcttgaggcatttggttccctctacttgcccagtggcgctcagaatttcttgtggagcagctcaggtggtgagggagggaggcacggacactgccccccatgtctctgcaggacggtggggaactgaggggtccctgaccagctgcctctcacggcttgatgtgtcacctgatggcttctcccctggctcgcactgtgggcccacactgtttgccaatctgcctttcttcctgccggtgcttttgctgggggagaaccacaaccatctccagtgctgttttacagcctcccaccactccacagagcctctgaagagcatacctgaagccttgattctgtccacctgattcccctgaagctcaccaaaaagggagctgcttgtttatcctgctgtcagccatttcccatcaacgtctggcccagcgagctgtgttggggccagcactgctttagtaccaatagtctggccctcttccaggtactcattgctagcgaattcatcttgctcttgaatgcgaagtatgagtcagaggtaatgctgatgaaacctccggcaggtcaggacaacaagggcagacccaagccacggggggtgaggtggggggagagtgggccagaactctgctctgcagagctgtggtttgtcctgaagtctggtgctgtgttagtgcaaacaacatcaaatgcaattcaattacaactgtgtactcatcactgggccgggctgtcagaggcacagaagtatacgttagtttctgtaggagttatggccagcagcccagcttcttaactggatttagtttgaaaataaatgcctcactggacagtgacacttctcaactctttcagggaagaaaatttttgcttctggtaggctgatgtgtgactttaataatcttatcattagtcctgagtcgggggcttgtcattcaaagttgtctttcatcttttgtgtatgttgttttcagacagtggcagctgaagaatgactgtatcagggacattcaatgatgcccatattttgagaggttaaatttcctagaaaccagcttctagtctttgtgtgtcctggcttgtgctctttaaagagactgaaaaaagcatgttctacaaaatcctgtcttgctccatggtaatgaggtcagacagacctccccaggagcctgactggagctactatacaactgtggggtggccttggaaacttggagacatttggggcgtgctgagtcactgctgcagctcaggcccagggctcctgtcaccactttggggagctggtggtacaatagagatatcactgtggtggggcctggaatgagggcctgtcatgggacagggcactgtaaagagaacagtaagtagtttttagttatttcttattagaaggaatttcctaatggaaaatgctcctccattaataggattttctctgtacagaaatttattgcttatgactattggggtcaattcccattggcatctgagagctggaaaatgacagctgtcatcacaagttttctgagaaaaaagtatgtttttttcctatgttggtcagaagccaaccaattcattgccaaccaataaaggtacagccaaagggaaaaagaattattaagagttttaattgcccctgaaattccagatagaaaattttacattcagttacacctgatgtagcagaaaactccaagggactatctaagttctttggccaaa

SEQ ID NO: 43212 - DNA, 1002 bp, Homo sapiens
tccattctcagcttttcacaagctgtagaaatagagccaaacttagttccttcaggtttcttgttggctgcaaaatgatatgaggcctttcatctcctccctgatgttgcaatcctttctctttgcgactgcctcatccaccacctgcctcacgccaacactttgcctactattttctcctctgtccctccttcccgtgtggccatttggcccgctggccgggcagcaggcgggctgtcacgtgaccgaatcccagcggctttgcagcacccacgtccgagttttccatgacgcacctgctgccgtcacgttggctcccatgtaaataaatggtcaaatcttttccaaaagtggttttgacaaagaacggcttaaaccgccaaagatgttgacaaatgggctgttatctaggagagtgagtaaagcaacccatttgaacgacaagaacagataaggcccaactctttgtctcctttcctcttttacattgatattcccggggagacaaaggggaagaagaaaaggaaagaaaggcagatctttagcactggctgtcccagagttgattaggatgctgatctgtgtggcaggcttctaggttctcacccaacttcttggctgctattcaaaggatttaacagtgctctttgtaaatagtggtgtacaaagcccaactaaaaatagtacatttccagggtctgaatcgggtgagtggaatgagtggcaatggctgtattgtacaagacagattacaagcaagttacttgatggtactttatatgcagggttattcacatgcttcatctggtttggttaaataatgcaaacacatttaccaacgtacatgatcgttttgtttatttatgctctggagagcttgtgtgtgtttatgacagacaaatgtacatgttctattttctgacaatcaaacaaagctctccctgatgaggtaaatagctgagttaaatagtggagtgagggctcctgagaatcgctgatgtg

SEQ ID NO: 43213 - DNA, 1850 bp, Homo sapiens
cccttatgtgacggtttacagctgttttattcacaacagttgatttttgaaaaccagagaaaagcatcagggattacagttgggagactatggcagtagtcctggtgaaagacagtaactaggtctaggctgctaggaatgaagatgaagagaagttaacaaatccaggatgtatctggagagagagtctaaaggcattgccaatggtgtgagaagaagaaaggaatccagaatgactctaaggtatttggtatgagcaactggatggatgatgatgccatttatggggctgtgaaagaatggggaaagtaggcgaggatagacaaaaatccagggttctcttttagccatgttaagatggcttattagacttcacaaacagtggagcagtagatttgggaaaaagatgcctccatcttttattgttagaacataaactgtcaatctggtgactaggaggaggctgtgatgataggtggcagcagaacgccacgctttggagttgtgatagtgtgtcaggaataggctgacaagccacagaattaggtatgatctagaatctctgtagaattgtggacctaacagatagaaggaatagaaaaagaattcaggatgagatgaaacaatcaatagcttaatccaaacaaatggtgtaatcactgaatggaggtttataggagctaatcaggcttggaaattagataatgatatgatttaggttcaaagatgtgggctaatgtgagcatttcttattagttatgtattgctatgaaacaaattactccaaactttagaggcttaaaacaataataaatgtttataattttacagggattctgtggattaggaatttaggagctggccgggagcggtggctcaagcctgtagtcccagcactttgggaggccgaggtgggtggatcacgaggtcaggagtcaagaccagcctggccaacttggtgaaaccccgtctctactaaaaatacaaaaacaaaaattagacaggcgtagcggcaggcgcctgtaatcccagctactcaggaggctgaggcagagaattgcttgaacctggcaggcagaggttgcagtgagccaagattgcaccactgcactccggcctgggtgaaagagcgagacaacgtctcaaaaaaaaaaaaaaaaaaaaaaaaagaaggaatttaggagctgcttgatgtttctggtgtttccttgttgttgttgctttgggggaggaagagggcagaatggagtggctcatttttaattcaggatccctcatgaggttgcagtcaaaatgttggtgtgagctgcagttatctgaaagcttggctggggctagaggatctacttcccagatgggtgattcatactcatggcaagctaatgctggccattggtaggaggactcagttcctcactacatgactgctccacaggagtgcatgagtagctggcttcgtccagagcaaatgatccaagagcatgcaaggtagaagtagaaatgtttttgatgacctagcttcagaagtcactctacatcatttccacactgtcttattgattttccaggtcagccctgttcagagtggaagtatccacccaagggagtgactatgaggtgtgagagaatctctgggggttattttggaggctggctacaactcctttttaagttctaaagttcatgtcatattaagagtaaaaggaactcatctcctggtagtggtgttatgaacagaattccctaggtatttgtttatgtttgtttgttttgagacgaggtcttcctctatggtccaagctaaggtgctgtgctcactgcaggtttaacctcctgggctcaagtgatcc

SEQ ID NO: 43214 - DNA, 1193 bp, Homo sapiens
catgttggtcaggctggtcttgaactcccaacctcaggtagtccacctgccttggcctctgaagggttgggattacaggcatgagccaccacgcctagcctgactcttttccttagacatagaaattctgaaaagcatcaacctttttttaccacagtgaaaaaaaaagatgagatttatatctcaataccatgaatggtttatataataatatatgagtggataaataaacatccttttctacagtcttctcctttaaactttggctattagagtcagaatgcttcaattgcagaattctcacttgagcaaagtttttgtataacattattcatattcttggccttggatagcaattaagtctctcaagtctaaaattgctttgtttgctttttaaagaaatctgcccaccttacagacctacaagttaactaaccagcctgtttttcccccaagaggacttcgctctgttggtttcttgccagctcttactttcaaattgaaatagttcagtttcactgtttctagaacatagaattcattacccatggatttttgccaacaatgtccctctcatgttttttaaaactaagatgaatgttacagagtgacctagtggactggatccacgactagaaatcaggcagtgatatattagatgtgtgcgtggatgctccattctgggtagtgaggtggctagggggatgggattctgggagggtgaggagggcattcagggtgaagccttcaggactagagtggagaaatatgtgtgagagattaggtaagatttgacatatgtgaggcaagacttagattcttcccttgccctcaggtccctggcgggtcgctaccacagatagggcacagtcatttattccttttggtcatttgggtagaaaacagatagccaggtgacagagaatatttataaagggctctaagaagaaccattcctctgttgtttccattttctcttgctacgtctgcagctctgcttatccctctgtttctactagtcctgaaagggcatgccttcctgcaacagaacagaaatctcaggaatgtatacatcagcataacctatggccaacatgaatttttcattcatgtggctctgttgaatgaaataacgaaattcctttatcttttaggttactttctaagtatttttaggttactttctaggaata

SEQ ID NO: 43215 - DNA, 1382 bp, Homo sapiens
taatttttgagttttgactgttctttatatattccagatagtagttttttgttggatttgtggtttgtgaatattttctgtagcttgtcttttcatcttcttaataggatcttttggagagcaaagttttaattttgagagatccaatatatcaatatttccttttatgggttgtgctatcgcaatcaagtaaaagaactctttgcctagctctagatcttaacatttttcccttatttttttctaagagttttatagcttacgttttacacttaagtccatggtcacatatttttaagtaggtgtttagatcctgcttgacatgtctcatgtctgaaataagccttagcatgtggaattctttctgtcctcattttttccctcaagcatctactgagtgccaactatggctcaagtcactgataccaaatcatgtgtacaattcctcattagataaatatttcagactttgcaatgagtcaattgagtgatgtacttcagggcgtggcctttggaacccaactagcttggtcaaacctggtgccacctctcagcagctttgtgatctttagcaagttacttaatacctctgaaactcaatgtttcacatcattcacatctcgatgaaaataataatacctacatcacaggattgttgtgagaagtaaatgaaacattatgtgtaaaatgcttagcacactgcctagcacatacatagaaaacattcaataatttttagtcctcctccttcccatccccccatgcaaagatttttctggataccttccccaactcatcatctgcttccccagagtctccaattctttctctctacttctggtcttaattattctacttcttttattaaacaacattctcaacagactttggcatttgataggatttcctatctccaatttgtttgtggtattcttatatgtgtcaaactatctttgtttcctgtatgtgttatgtatctcaccaacgacatatctcctcaagggcatgccatggccctagtcttccatagagtccagctctatgttgggcaagtggcccctaatacactgacagtggagaatctaaattaaaacattttgtagaaatgtttttgtagaaagcaatttttcaacttctgtggaaagcaattcagcaaaatgaatccaaaacattgaatactttgacctagtaatttacctttttcagaatccatcctaagaatggtcagatacttgaataaaaaaatttatatatggctgggtgcggtggctcacgcctgtaatctcagcactttgggaggccgaggcagtcggatcacctgaggtcagtagtttgagaccagcctgaccaatatggtgaaaccctgtctctactaaaaatac

SEQ ID NO: 43216 - DNA, 4233 bp, Homo sapiens
cccaaatgaatctccgatgactgatctgatactagtctgcaattctagttttagcattaggctcactcctcatatttgggagaagatgtccaattctgtagtaatgtgtaacataaagtggtgtcaatttataaataatatcttctaatgaattaatgctcatttgcaatgatcacttccatacaaatttaggtaaagatgttattcagaattggattctctctatttaaaaatgtcatcctaatgtgcaactccctaaaactgttactacaaacaactattttgccactcagcctaaaaataaaacctttcacccaaatgacacatcttaatagccatattttaatctacgtaattttaaactattctgaaagaatccatttctagatgtcagacaagagttgaaactgggacagcagtttgaaggggctaatttaaaaacccacttgcttggagacacctcaagaatttctaggctcacaaggtgggtgaagtaaggaaagagactaagagctgaacagtgccgttctttgcgagcccccactggcgcaggctgagccggctgcggctagggctgcgaagagttaacgagggaccgagccccagcgccgcgggctccccgcatgctccctccgccctcccgtccccaccctctcgttttggcaagggattaaagtgctcccccctgtggcagcagtgacccagaaatgagtttgattcacatagtccttcctccataacaagccaaacgccagaccgagagtgcctccgtgcgcgagtgcccggtgtgtgcgcgccggcgagagcaggggcccgcccggctccccgcccgccgcggcccgaactcatgcagctccgagcgagcgagcggcgcccagcccagcgcctcggccgaacccctccgcagcaggtacgcgcgcgggccgcggggggcgcgcggggtgggcgcgccgcgcgtgtgtccgcgcgtgtccgcgtgtgggtccgtgtgcgcgtcccggtcccgcggcggcgacggcggcggcggcggcggcggctgcaggacgagccgagaggctcagccatatttgatggttttgttgctttgctcgggagttctcgggagtaatttaatgccgaaggtcgctgcctagtggaaataatataatacgtcattaatatggcgccaaaagattgggttctcgatctgtagcgaggagggagggaggcagccgctgagcgcagcgttactatcccaccagtaacttgggcattgccggggcgggggccggaggaggaggagaggatgatttttggatcctgagaattgatctatgttggatcagtaagttttattatgattttttttttcaaatttggggggctgaagacttagagctatttcttcttttggatttgcgaagaacatgcggttttcaggtgaatcatcaattaaacgcgtttaggagcagaagcccagtttaagttggctttagtttataggttttttttttttttttttttttttagaaagccaaagtgcattaggctgcatgaaagtggaaagcatagtagcaacttggtagacagatggcaatggcagaacgcaggttcgcgtacatatatgaatccagagtgtgtgagaccgtgtgtgtggtgggactgtatttgtccaaacataggtgtgcgtaggtacatctgtgtgtggtggccgcagccctggctcttgtcaccgcgtcaccacatgtccaaaatattcattgcatcaattcaagggcagtgagaggggggtgggggtgggggtggagggacagtttggcaattagattcttccgaactgggcttccagtgatcagatcttttacttacagcgcgactgcttgtaaagtgtaaaaccccttaatcgatgaaatggggtaggagttggcgttggtagagcaaagtaccgattaatcgtgaacttaaaggggattgcaaattgcaacctttggcaccatctgcaaattgtgggggtggggtctcttggtctccttgcttccttaaatgaacgtgtagtgtgtaccccgggactgcaagttgcagagcccttcagtgcacgtgtcttgtgcctgtgagtctgtgtttgcgagttgggggctgttgttcggtagccagcaggctttccgggttgctcggcattggcttgcaaatgcgggagagggatggaatgtggaatgttgaccggggaaccgaatcctgtcggaacggtcccatttgctggagaaattcgatcccttccacctccttcccgctcccccccgcccgccttcgggcaggaggcggggctgaggacgcggctgctgctcaaagtggcggagcgcggcggcgggaggcaggtgcacggcacccgccagtgggggtgcctcaacttccgcgggcgtttaaatagcagcctctctcccctcccaccggtaataggtgacctggcggccgagggcggcgggggagggaaccgggggagactcgggagcgagcctccgcggcacgtgggcaggtgctgggtggccccggggccaacttttgtagcccgcctctggtgtttgaggagaggcggcccagtgtggaaatgggggcgggcggcggccgaggcgctgcttctccgctgcggccggagcgtcacctaacggtcccagctgcgccgcccgggccggggtggggggttgcgggggcggggacgcccggcccgccgcgcccgccccgcacaaagcccgcggcgcgggggtggccgctgcgcccccgccccgggaacggcccgaagcccgacgcggtccccgcgccggttccggcgggcggccgcaggcgtttgtttgttggttccgcgccgccttcctcgccggatggcttcctgtgacagaggtgatacacagtttccagaactgtctgggggcgggagcgggagcgggagccgagcccgctcggagctcctcgccgccgctgccgctcccatcttaaaaccgtttctcgccggcgcgcccgccccagcccgaaggtgccgccccggagggactcggggagggggacggcgcggccgtttccagcggcgcaagtggcttctggacgcgagggagcgtttgatttgcaactggggccgagcggattggtgcagctggcggcggcggggcgggaggagctgccgcggcggggggtggccactttcaaatggagagggcggcggcggcggggacgccgctgcggagggagcggggcttggttgcgccacgagaaggtgtcatcactgcaccggggctaattccggcggaggtgccgggagttactttcccctcctcccgcgctgttgtttctgtcgcctcgggaggaggaggaggaggaggattgggagagagggaggggtcggcgccgcgcggaaccgcggccctgcgcattccccggcgggcggcgggagccgcgcggagcgttcgccgctgcggggcggcggccgagctcccccacaaccccggggtgccccccttgctgggatccttagccttctcacgtcccctctcactccgccaccctcccactagagctccttattctcgagtcctcaaccccggcttggcgcgtcccgggtctcccctcgccccaggattcctcccgcgccaggctccgctggccccaggtttcccaccccaagcgggtgggggcggccgcagtcccggcgccggtgaatgctgagagcaaacaaaaaagcgggcgatttaaacatgccttcgaaacccgttaggaatgcgtcgtcatccggagaccgtttaaaaggagctttagcttgccttctagtaacgagagggctggcgccctgccttacttcggcaggggcgaggggctgtcgccctctatttgccccggccaagagggaatttaaattttcttttgtaaaatgacagctgcagtgaatgacctgagacagctacgtttttaggaaagtaggagaggatctgaggtttccattaatgggaatgcttagggggttctttcccaaaggttttttattaggtgaactatttttcctttttataatacccgccatgaaggctagctctcttgctacttgtagctcaaggctaatacctttcaaagctaatgaactagttttaagatagagggaaattatttccctgaaagctgatttaggtagtgactccccagtggttacagattttatagtaagttgcattttgatcatatcacaactgatcaagatttaatcacaggtgg

SEQ ID NO: 43217 - DNA, 835 bp, Homo sapiens
tgggttttttccctgcagttagcctgtttttctcccctaatatgtcttgggcatctttccacatctgagcatttagatctaacagaaaagaattctgagtagatggaaataaggataaaagctcaagattggagaccatggtgactgactgccttttttgtttggttgtgaattcatttactcccatgtcaagggaagttaaaaaaatacattccaagtacaaatgattggaatgttttgtcatagctgctcttattcagttgctgactcttaattgagtcagcaattacagagtcctggaaggggtttaatagattgccttagagctcataagcagtgattggattatttatacattggcaaatgagagctgcttgtgattcattcagaaccactcaaatttaaaattccttaaagtcttgagaaatgctttcttggtttttaaatctgagttcaaaaataacttataaagaatttaaagtgaactaatgtattatagtacatgggctttatgagtaatgctcctaagagtaaatattatagttatttattatgtggtcagttatcataattttttttcttttggaggaggtggctattgctaatgtaaacttgtcagctgaatatttgtaagttttacctccttccagaggttctgtattagcttgggccagcattttccttaaataagttttgatgtatgacgttataaagagcacatttttttgcttgagatatttagacaagattaaaacattaacgcttaagagttaagctatttgtcagttaaatgtatgactttatttttgactagatataaccctttagttaaatt

SEQ ID NO: 43218 - DNA, 1177 bp, Homo sapiens
ggccagagagctgtgcccctagattttaaatgcacacttggaaactcctgctggccattagccttctaatcttcagagcacgagaggagcataacaaacatgtttagcgtctagtagaattctgtgtaagctacaagtactaccacacggttctgcttaaatatacacacatcctcacgtataacatcaaggttttttttttcctgcaactaacttctttaactctttaccaatttaaatgtacccaaccagcattcaaaaaagatttgtcggtcaacgacgacgatattaaacattgtatatgaagtctcaaaaaaacatggagcttactttgctctctcagaaagtcgatttctgcagccatttcgatacaattttagtttagagctttcaccacctttaccttcctctgaaagacagagagcttgctgtgcgggaaaacaaaactaagccaacgctcggttggttgtcaagcgctccagcggtgcaatctgcatcctactcacgcggcatctacagccccgccacgcttctttcccccgcgccccagacgagtccctggccctggtgagagactgaagattgctggggactccacgttcaaccgaatcccacgctggtgggaagaggacgcggtcgatacaggcgtcccgcgggtcactctgggtctcgtcgggccacctaggagagtgccgcgggagcttgacggcagcctgagagcggcgttctacgcggagcggcgggggttggagaggacaacgccaagacggctgggaagccccaggccagcagcggaagtccactcggcccgccctgcgactttgaaaccggtgccccggaccactccttggagacggtggcgcctcttgcgtcatcacgcgggcgttggagcttacgccatcgcgcgtcctagagtcctagcacgctattggctggctgtcaagcaatgggaggagtcgtgagaacctggatgacagcgggctgagccaccggcttggcgcggcggccaaactggtgggacagtgtctccaggtagtgaggcccaacctctttaaaacaaacaaacaaacaaacaaaaaaccaaaatgcaaacgtgagtagagaatgaaatacacagtttaaatgccctcactatctttgggttactaatatactaagcctttctggactaagtaaa

SEQ ID NO: 43219 - DNA, 878 bp, Homo sapiens
atagtttttgcttatatggccagttagcctttagttgtattaaatgaaatatttctgtacatgttatattgtaatcttaatgatttacagttgattttcaaattattgcacagtatttatatttctgaatcacccttccttcttctaggaaaccactcatactttagtggaacgattagaagtcttcagttgttcatgtgtggcccttcaacatctttctttcctagaaaaatcaagcgtcttagcttcagtgttctaagcccctcccccagaacgtgtaggcagctgggtggagcctaaagccgagccctctcctgtgacctcggctgaaaagaagaagccagtgtttgagaaaagcttcgtggtctgtgttctctagttgttccctcttctctctgacattcctttcgtcgtcgccaggtcttgtttttcgcttgatctctggaaaatactgaaaagtattttacttttcagctgtctcctgctaagtgagcgtactccccctttcaggctgacttcctcatttctccgtttccctgataaatgggcggggcctcggggaggtatggaaactgaaaagaaatcattattgtagaaaaactaaagaaatttttgttgagcagaggaatttggaaattttccttgcagatcatttggttgagaaaacacctttaccataacttatttcttttaaactttgcggacattttttcttttcctgggttcttaatgctccagtgttcggtctcctttctcttccttcgtttccttttagaggtctttccaggtaaagataaagcaatcagaacaattgaaaatttatttttttaacttgttttaagagcaatttgaagaatagaggttaaaagtagaaacat

SEQ ID NO: 43220 - DNA, 1212 bp, Homo sapiens
ccctaaaactatcttcagcattgaattgaatgttaaatatgacagccaatcttgacatattaaaacaacttagagggcttcattttctggataggggatattagataactcaagcggccttcagtttttaaatacctaaaaacactaaatcaaatgtaacaactatctatttaattgctcccaaaagaattggaaaatctcaagggagataaacaatgaggaaaaaattcctggagcaaaaggtaatgtggcaaccaccttgaaaggtcggggtcggggctggttccatctctcagtaacaagaattggaatttaacactctttagggacagaaaatgatgccgtggatctacatgagccagggagttgaaaaagaaacagaaaataaaatgaaaaacgatcatcaggttgcaacaccagtgaataggtcaagggtgaaccagaaaaatatctatcccatggcacagggagccaacctacctctttcagcctgaactgggagttggtttggcagaatttttcctctgataatttgcaaatataggtctgccttcacattaatttggggctcagtgttacactctgtaggtgatttatacactgggttgaagcagccacaaataactttagaagccaggtttcatggaatttagagctttttaagggtacattggattgttgtttttcttcctgaaggagggtagagatgcagattaacttcagattttgttaaatcagtaggttattcatagggaaacaaaaatgaatctatagagtacaacataaacaaaaaccaattccaggtgtattaaaggttcaaacatgaaaatgaaactaaattcctttcagaagaaagcatagaaaaaatatttttgacatcacactagggatggatttcttaagacttagcatcaaaaagattaatctaaatttaaaagattctatatatcataagacactgtaaacactgttggtgagagtataaattggtacaatgactttggagggcaattgaagccacgtattgcaaacctaaagatgtgcataaccttaaaaccccaaaattccattcccatgtatataatctagggacacttctttatatgtatacaggagatacatataggaatgttgaaacattgtttgaaaaattggaaaaaacttagatatatatatccacaggagaatgaatacataaattttgtcatatta

SEQ ID NO: 43221 - DNA, 1227 bp, Homo sapiens
ttttagtatatagcaaaattactaagggcaattgaaaatggaaaatgcactagggtggcagtctttagtctttcagaactttaattttgtacatctacagagcacagataacaatggctcattaaccatgaaatctgggcaatttgtcaaaaagatatcaatgttgcaaagcaccatttgactcagcattctaataatccccccaactccctacctgaaaactaaatattaatctgccactctagaagtgacttgaagtatgggtctttctctccattggagaggaacattaggaggaaaggtccttaaatgttttgttctcatttcagaagctcagcaaaaccgtttgtctgatggttttctgatccattaccacaagactgataatctcacctcccttaagggaaaagaaagcctacaccagaatttcaggcctgaaaaatgacacgatatataaccattacagtcccactatcagcctttaatctgctccctgcatcgttcaatttttgggaatcctattttaaaatatttttcttttagcaaaaatatctggctccctacatcatggtttttcttaaaataagatttcagaaagcagatttttagggaaatgtttgtaggaacagatttccaaagcctatggttaattttcaactaggatactaacaaaatctgcctaaataaaagctgttctggcatgcaacactggcaaacctcaatttgtgatgtagcattaacaaggtgaatatctctagaggtgagaatgttgatttttgaaaaaatgatccctcaaatgcttacagccccgtgcatgtacaaagatgaaaaatcagtgcaattggagaaaaaaacaatggtttaaaacactttggaagaaaagaaagtatcccaataaatcacttgtcattgtggataatagaatactgcatcatcttctatgagctagaataaaggttaaaacactgtgcttgctctctaaactctatgatcttgctggcatattcagtagtggattctatcattacggcccttttggtaatggaaactcctctctttcctgtaattgtttataattcctgaaaactctcagggaatgtcatctgctttaataagcaataaattctctactgaaggtgttgagagatagcaataataaaaagaagaaaatttcttttcccagcaagcacaaaatactgacagaatgcttcaaaaattatttaaaga

SEQ ID NO: 43222 - DNA, 1003 bp, Homo sapiens
tagacattcatttttgctctaagagtgcttaaaataaatgatcacagaatgaataactgatgtatggcaaaatgagtttaaaattatataagctccaaggtcccaatgtgtataagaattcattcagttttggaaaatatcagtgatcctttaggaagcagcaaaaaacttgttcaaatgaatattttaaatcattggtcatttgagctatgcatctatgtcgcttcctcatttgaggaaggagaaagtggacactaaagtacaatgtttgcattcactaaatcatacattcaattgcagagtaacagaaagcttcagaattcagtgttaaatgggttattttgttagaatcaatattccatttttgctagttttgtgcgtatacaggcacaaatatattataaatctgtacatgtctctaaatctgtttgctcacctattttgccctttcctttcactctctgtgaaactccccatcctgtgctgcttgtccagggctttggccatctgctttcctttgctctgtgatagttatgccttcttggctttggccttcctgcttgatttccgaccctgtgtttgcctgaatctccgggagctgtgaggctctgccttccatgtgtctgcctgattcctaactcactgcttctgcctgccctttgacacactgtgcagtccttttggactcttgcctgcctgcctgccttattgctaactcactgttgagcttcgaacatttcagcttcagtgaattcctggatctcccagtttcagattatcagcatccctacccttggcatttctatcttagtctacaattctagcactaatgtctaggactcaagaccacttcttttgctttcattgattgcagaggagagtatatgagttcaactttaccaaccttactaaggcatgagaactttttaagggagtggggacaaatcacacacaagggagcaagttcacaggagtaccttcgagtcattcctttagttaggca

SEQ ID NO: 43223 - DNA, 2491 bp, Homo sapiens
ctgaacagtcaatctccttctcacccaaacatcacatattcttgttttatccttgtaagaaatatgaaaagttattccttttaatgttgctttcattttgaagttgtcactcctgcttcctagctggtaggactggtgtggcaaattgcttttccagaagaagaaaatggtttactgatctttttggtcatcaagatcaggagtttaaaagatggtggtcagggtgaggagtggaatccatgcaaccaggagaaaaccacgaactgtgactttctcacctgggtcatctgcatgttgtacccagaagtcgggagaaacgacattcaggaagatatgcacacattaaaattggaatgggagaattctccagaatatgaaatttctcttctcattggaagaaaaggaagaatgggcctgaaaactgtccttgtttggatggaaacttaaacagcctgtgttgcaaatagtcctcattaaaatgccccctgtgtgctttagttctcctgaaaaaactaccaacaccaaggtagggtcaaaccggctcaataaattttaaatgatattaattattcccatgcaactccataactcagtttctggcttaaaaccgtgaaacttgctaaggtcttttttgctcctgcagcgtggaccctagtgaaaaggcattataaaaggttattgcagtcaggtctgtgaaagacctgtcgattgagagggaagaaaatgcaagtagacattataaaagattactttctgtgctgctaatgatcacttttggtttcagttttcctgaatgttcaggaaagaaagagctcacaggaaaggaatttattgcaaaagaataattgcccaatacattacatggcacggtagggttataatgagcatgaggaagggcaatatctaaccaacccttggagttacagtaatagtttgattcaacttccttatacagactgctgagcaaccagagagccagagaggttttttcttttctttttttttctccccgaagaattggactgcaactgttttgaaactttcttgggggaaatgcaattattgacaagatttaataaagccaagacaactgaatgtgatgagatgaacccctattcttttgttctttctatgcaatgtaagaaaatagcaagaaaacgattacattataactaaatgaattaaacaaagctccgaaacataaattagaatttaactatgccattaaaaactaatttaatttgcaaggcatcattactaggtaataaagacccattgcaaaatgtacagcaatatcttgtgaacatgtaaaaaaaaagtgataaatctcattgagcagatgagtttctgttgcattagcagatacaaatgctgaatagatgtttcagtatataatgaaagctagcaagtaatggaacgattggtttcgttaatttttttttttttgccgtaaatggttttgtagttaaggaaaggcctcagggagagttggagaagcacaaatttggtgcatggacttggtgccataaaatctgctctcaaaccaagacaaagagaagacatttaaatatttcgtttgacaacatatgaaatatattgtagcctacttcattcaagtgcaaacaatatcttgtttcagctaattgaaaatctgatggaaaatacagtcttttccctaaagtgtatcttattcaattgtgttggaaataacaaggtatatataacaaattcaagagatgtgaataaagaatttcttcagttctggggttaccagtttaaaacttactaaaaaaaaaaagcattaagttttttatccgatcagaataagatgaaataaagtttcagaaaattcatttcatcggaaatgagttttaaatgtatactttctaataaaacagctaacgataagcatttccgcttctgtctgtactattttgcctgagcctgcaggtagaatccagtatcattttactgacagccatcatcgagtactgccaggagatggcagtaaaactccgcttttctaatccagcctacgctagcgtctaaaattattgtaactttttttttaatgggatcacagcattaatataaggtggagatgaaaacttatgtattcccccggttgtgttatttcctctgaggttgtgcattgactttgtgttgcgattggactttggctcatccacgtaattatgctcccaaatagagtttcacaaaaggtcacgtgctacattattgtaggaatgattttattaaattgcttagtgagttgatgcagttagacgtgttcatttatgttttacattccgtcatgaaatcttaatgttaaaaaagttaacactttgtttaaatgtcatctcatcaatgcagcattccgcaaattacccctctgagctaacacccgtcttccatgccgcatttacccatttacaaacctagagactagagcttcctgcttcaccttgagattttctgtttatttatctgc

SEQ ID NO: 43224 - DNA, 1021 bp, Homo sapiens
aaaacctgtttgactcatcccagtccaggttatgcaacttcatactccctcttttacatatcttgttataccttaataaaatttttggttaacctgtttgtatctcccaccaggcaataatttctatgataataagtacccagaacccacaaggactgtcatatgttcatcatttataagtactaattgaatatataaatgaattaatgaatatgtaatgagatgcttgctttgttggaagatattagaaatagaaatgcactcccaaaatgatgggaatcaattggaatcaactctgttgttggacattaatttttttcttttgtggttttctatatgacattgctttgaccttactggtatatatgagtatgtcactttacaaagaggattttaaatgtcagccaactctgacttcttagaattatgttatctgaaaaaaaaacagtaggaaaatacgacaggtggatatgtgttggggattaaagtacactggggactgaaatgaacctaccaatctcattagctgtcttctgacctgctgaattctacctaggtcccctaggtgaaaggctaataattaactcaatttgctatctgtgctggggaaagctccaaaggttaagattatgaaggactgatgagggcaatcttttatactgtttaaattgctgtttaaatttgaattagattctaatggtgacagtttgaaactgacacagtttaattcattgaccacatttgaaaacctgcctacctgaactagctttaaagtatgtcttaaataagcagtcagccagtgcacttacatgtccatttttactatttacttgaaattggaatatgaacagcagttgctactcgtgtcaacttttgtgttcactttctattgttttactttctctactgtgggttccctcacctgccatgatatgcagtcttttataaatagtgtaattcatactccccaggacacagcattcgggggtgaagggaaattaggtaataataataacaataa

SEQ ID NO: 43225 - DNA, 2501 bp, Homo sapiens
ccattaacacattggattataaaatggggagtgtaccaatctatagatctatttcaataaaaattgtcctatttaaaaagatttgccaatgactgcatgttaatatattttatgctaattattattacaaaatatgcatgaacatttcaaaaaagtaatcaacatctatgcaactatttcaattccaatggcggcttctctctgttctttggatctttttaatacacagatctacaatatgctctttgaaagataaataccccaaggatttaatttgattttattaactttctaaaatgataatgctcaaaataaatgaattaaacaacacatgcacaagtaatcttccataaatacttaattgtgaaaaccatggaaggttaactcgaccgggttgagtcaaatccatgcttttatgctatctttctgaaaaactgttcatttctactgcatgtatctactcaatccttttgtttattgccaagtagatacctcacctaaaataaatcatcttcatagttcagagacctcattgttttgaatttggaaggatttgagtgaggacaggaactgcgctccatttagacacattgattgaatgaaccggtggattcacggtggagcaggggaacatctgaggaagatgacgatgtgagcaggtcttctaactccgtttgcaaaaccagaattaaatgatcaaacaaaataaaataaaaacccatatccgtataagcgtgaaagtcagaaaaggctgccacttcctaccctaagcttctaggaattttttcctattaagtttacattaaagaacatcatcaagaggaacccccaacttttcttcaagagaaagtaggatgtaggtagaaaaaatacttagcagggcttctctaaaatgtctttaatcaaaaaagacagaataaaagactctgggagaatggaggacactccaatttacacaattttctattgaacattagacagaaccttggaaagccgtgaaaatatgcctctcagatctcctgcacctactgattcatggtcccagcttctgcctttctgaatccatcaccactttcacactgtggttccactttccaaaggcttctcccaggcaatggctagaagcaaccctggtcctaataaagtttcattcctgtgagacatgagatgctaccaattggagatttgggcccaatggctccctttcagcctggctgaacctgctttggaattgttttgcactctgtgtttcttcctgtccaaccctccttcctttcccctctccttcactgatggaagacctactagtgttagatggctctccctgccttctttatttgctggttattcttcacggtcatttccatatatatatatatcttatacatgtactcctatctttgtttcctccttttcagaagatccaagaaaatagacaacaggataggaatctagcactgactcattcactcacacctggtagccaagaaaatgccattctgagtagtatgtggtgactgatagtttctggaaaaaggtggtgaccaaattgctaaagaattcacatgtctatgggtgacttgagagaacttctggcttgggaaactgccacctggggtgcaatatttcaggcatttgaaaaatatggggtcaacagtgattattacaaaagcagtggagttgattcattattatgtcaaattgatgtctgttgtggaacactgtttttgtggaacatggttctggttttcaaaaccagaaccaggttcaaaaaccagggttggttggttggttggtttttttgtgatggagtcttgccctgttgcccagcctggagtgtagtggcgtgatctcgactcactgctacctccgcctcctgggttcaagcaattctcctgtgtcagcctctcaagtagctgggactacaggtgcatgccaccaaacccagcttattttttgtatttttagtagagatggagtttcatcatatttgtcaagcaggtctcaaactcctgacctgaggtgatccaccccgctccacctcccaaagtgcttggattacaggcgtgagctgccgtgcccagcccattaattgttataagctaaatatgagacactttatcctctgtaaaagaacagacaatggcccaacaagctgaagaatcgatacttcgagtcacagagtatcagagatatttacatgtaaaatataaatgctcagtcaaagcaggtctatcatgttaaaatcagggctgtggttgaaaattcctgtgctcttgaaacatgagatggggaaatgccttcagagtttgtagagctgacatactcttctttagtaggaacaaaaacatacccagtgttggtagataatgcagaaacttctctctgttaagtcaacaggtgtcccccaaataagatttccccacttcctctcctgacatcaaggccaatagctaggatcaaatcccaacataatattactgaatatatgctggacttga

SEQ ID NO: 43226 - DNA, 1184 bp, Homo sapiens
agtacttttatttgatgtgattaagatattacaggtgatttttaatttcatcatatttttttggcattttaaatttgtttatctattattattaaaagaaaggaggaaatgctatatactgttactgaaaatacttaccacaatcataaagttttactttgacttccaataaggtacagaatacatataaattttcctttcttcatttgactaaatggatcatcgaccacaactactgggtagagatttgtgttcccgtcatttaaaaatagaataaacaatatgtgtccattatgagaaatactgaaacaggataatcaggatatcctgtgtttctaagtgcgcatagatcagaggcagggagtggaggaggcagggttaagcagggagggaattccacccaggtattgctatagaaatggcagcaatagagcagaactagcactatcttttagagaacaggaaatacctgccctgcctagtcacagacttgcatcataaactcaatggtttgaaaagcacctatgtattcaaactgaagatttctcccttgctgcagttcagagtccacgttgtgacttggcataaagacaaacaattccgcagctcagagaaagacatcattgagttcaatttctagtggctttcccccaacatttgccacttgatcacttctccttggcaagaggacactgcactgtgaggaataaatagctaaacacttacatacatttaaaacacatttaacctttttccacaagacccagagcagctagcgaatagtaccttaaaatcatgacctccacttgctgtctatctccctcgtttctttttgtcattttctggctgaaaacaaagttaatcttcttttctatttcaatttctcttttacttgcctcaggccagaatatagaaagtgagactttgtttgacaatatcaataacagaaaaattaaatattgcctccacaaatgatatttaacctattttaagagccagtgtatctgtaaagatgttaaagacaataaaaagcagctatttccttataatattctaacatttcagcatttcctaattgtaaactttctattttaatcttctaaccaaatgaccttcagtaaacgacctgaaatggattaacttacttcaactagcctagcaccctctttcattatctatttgac

SEQ ID NO: 43227 - DNA, 763 bp, Homo sapiens
tgttatttaacttcacctaatggtattttaaatttatcacagtctagaagttaatcagaatcaataaaattggtttagggcagtgcttctcaaagtgttgtccctggaccagcaacagcatcaggatacttgggagaaatacaaattctcagaatcaaacccaaacctactgaatcagaaactcagggagtgcctggccagctttcattttcacaaaccctgcaggtgagtcagatgcatgcttgtttgagaaccactggtgaagggattgagtgaaattgtttctggacaaataaactggtaacacagatgggagataagaaattttttgatgaaaatgaactatccctgggttgtggtttgcatagatttgcaggagaccagccgagatagcagatgaatgtagtggctgagacctaattctctgattggccaaggtacaagatacgcatctgtttactctggaactaagaggatagggaatgtgtcataatgtgacactgtcagcacacagagttatttttagagctaggtttttgcttcacaagtagaagaaggatttagaatacactcagaagaatacagtatataaatgtcttccaattgtgggttttcccttcacaatggtaaattcagaaataaaaagagccgagtgattgattgcacagtggctcacgtaacagtggagacagccagcctcacctgcaagtattcaagcatgttaattggtgcctaggtggctcaggagcctcacctgatctga

SEQ ID NO: 43228 - DNA, 985 bp, Homo sapiens
tcaagaattcatgcctatattctctcatccacagaacccaccaagggagcatgaagccaagcggaaatgctggtgtacagtcacctatgagaaccaaaataaggccagccagaacactgtcaaggtcatggcagagcccaggcatcccttgttaacatccatctctgagtgagcattatgcagagaagttttccccactcccaattcctcttccagatttaaagaaaaagctattcgactgcagaaggaacttgagcctttcctcataggggagatgaccatctttgaccttacctgttctagctatgaggcaaaaatctttctaaatagatacacatcaatcaccacgccatagctgcttgcttaactcaggattacatcattaaaaatcgttccctgttctcagtaagccatcactggatatggtaggggagccaagaattattgaccaactgaaaaatgacagggccccatcaaatctatttgacttgtatttcccggttccaaaggacagaaggccctttattctatgacgcaatggaatgggacatttgaaagccagcatccaatcacaacataagggcacttggaagatcctaaagtctgaagctagcactgagctacttttccagtggatatcaggtaactctccctaaggataaagctttatgctaaattcctggaattcgctaatttaacatttgaggtatcagttacactcaagcagctcctatgattcaggatatgtaataatttctcagtttactgagacaaatttaaattaagcctgctgtgaggtttgaccttgtggctctctacatgtcatcatatgctctgaaatcccagacatcaagtccctggttcttagagagaaaaagacaacaaataagaagagaattattagtgaaagttgaaatctaggttttgaggatcctggcgctcatacgacattgggtcctctataagaaaaagaattttgggccgg

SEQ ID NO: 43229 - DNA, 795 bp, Homo sapiens
tcttttctagagcccagtcttatagccctattattcattagttgagggatttatttatttacaacccacagtagctgaaaccagaaataatttaagaaatctggtgcttgaaatagttctttactcctcaaccactctatttcttctcaaataacatttctggggttaaatataaaaattacatcatgactgttcttaatatttcaaaattatgtcttgtggtttaaagacagcctgagaataaatgtaacccacaaacattttgaagttccgatctgctattgcaattatatatgagtcagaagaaggggaaagttctacaattaagactttgtaaggaaaaatgaatgtttttcttcccagaaactccccaggaagaattccccttctgcacttttgactttgtccatttgccagggaattttttacaactgaaagtgaatccagccaatctggtaatagctgactcccagggtgttgttctgctcttcagtccccatcaccatccagccattgacatgaccacaggaactcacgaaggggatggtggccagcactggtcaaggaagaaaattctgacacaagctaaaacatggataaaccttgagacattatcagtcccaaaggcaaacagcataagtctctggcttccagagggagcttgttaattatcctacccatcccgcactgctttttctccagaaaggacatttactgaaaggcaattctttttgatttttatgtttgtgcttgttgttcctaccctagagccaaaagactgacaagcaatttaaa

SEQ ID NO: 43230 - DNA, 638 bp, Homo sapiens
aagatgccatgtttatgctaacctcattcacagaaggcacaatgtcaaatgttttaacagcagccacaatttgtgttcatgagtatggagtcatctttgtatcttccatgtgtactaccatgtagagttgtgtgattaataagttattttcaaataatgctgatggtgaagaaggtgttaaagaataacgagaactggcagccacaagaaccattacacaaattaatgtatgactgtatatgtacataaggtcatctaaaccatctttgtattctcactagtgacgtaggaattgtttcgaaatagtcccaatgacctttcaacctgaacttagttcttgttttaactcatcaggatcacatcaggtttttttctgtcaagtattcaaataacatgaactggtatgtttcaatctgtcagtaactgattatgaaacttcctatatttgctgaaaatatatcctaataatttgtattaatacataatttattaaacaaaccattttttcaggcctagttatttgtgaaaactttttgtaacctttcaagaaatataaatcaaaaaagaatagtctcgcataaagaccttttctataagccaattggtcttgaactcctagcctcagtgatcctccagcc

SEQ ID NO: 43231 - DNA, 894 bp, Homo sapiens
ttgagaatttacatgccatccaagtgaaagtgacagttcagcatatataataaatatatatatattttagttaacaaatatacacatatttgttaacttcaaaaactcaaggactgatagaaaaaaatgacaaggattacagagaacaaaccaaaagtgaatttaaaagaaggatttcttagaggccaccatctgaattcaaatgtatctgccagtaggggcaggagcaggagaggatgaagtcacagtacgattgcaaaatgctgccaatccacttagagttgtttactgacctcttccccacttgcttcctcccagtctttggagaacataactgagagttctaaattctaattttcttctcatagacacttccatgggaaatcatgatgtaattcacgaatgtccctgttgccaactttagccatttaatatcacggaaatctgctaaggaaatgtttgtgctatttcccatccagcctggcaaagggcaggcccctttgacatattgagaaaagttgccagagacattttctggtaaactgacacagttcctggggctcggaaaaagaaacagatccctctaacaggccaagacagacaccaagaaagggagccagagaacaaagcaagcagattttgtcttttttaactgaactttttcctttgacattattattgatttatatggagttgcaagaaatgctacaaagagatttcctataccctttgcacactttccccaatggtaacatcttgcagaatgatactacaatatcacaaccagaatattgacaatgaacagtcaagacacagaacagctccatcaccacaagaattcctaacggtggtcctttatagcatcgtctacttccctcccaccttctccccctc

SEQ ID NO: 43232 - DNA, 3826 bp, Homo sapiens
aggagaatggctggaacccgggaggcggaggttgcagggagccaagatgacgccactgtactccagcctgggcaacagagcgacagactccatctcaaataaataaataaaaaaaaaataaataatatgatgcactttcaggatagcatgctctttgaatctctttaaatagtgacagtttatatttgaacagttattttttcatttttcaaagcacttttccccaacattttattatgaaaatctccaaatatatgggggaaaaataattgtaagtgaacacttgtgtcgggactcagaaactgatagcccaaaatatggggctttgaccggctgaatggaagcctcaaggtctctctgacctcactgcccagcaccatctctcccaaagcacaggatgaagttgaagttcctttatctggctacaatccgaacccaccaaaaggaacaattgttttttcttcccctccttgtaagaccaaaaatgtaaccacctgaacagaccctttcacaagataatgtgcaagttcatccctgtgccctgatccattcactttccctagtcatctcctcaacagaatgcctctgctcccctctccccaagtctgttggccaggatggtagacaagcttctgaaccccgttgggggtgtgtaatcactctgtgattctccccatgtacatgttaataaatgcatatgccttttctcccattaatctgccttttgtgagttgatttttcagcaaacttcagagggcaaagggaacatttttcccatggtccctatacccatatatacccactacctagattcaaaatcaacattttgctatatttgcaaaacacttttcataggctaattttattatcacctttttaaaaaaattctttttacaagtactgctccttgtggagcaggactactcgatagacagtgtgcccagagtagcttattatcattttttatttcacctaatgactaaggtatgattctatgttttatagataaggaaactgaaactgaggctttaatgacttccaaggagcttgtctgccagaagttgtaatcaacttgtgccagctgatctgtccacaccctctatccacaggtgttagatatgtaacctaggtctgaaaaatatttagaatattcttgtgatgaaaagcttgcaattccacaacacaggggaatcagcaaaatcatgggaaaaccaatagaatacatttctaactcatgaatcattcagagaaaaatccagtcttgggttttccctccccctcatcccatttctattcctgattagtcatcatttcctgcccagcctgtctgagatgtttcttccatcctttcttttccagtaacagtaacctggtgcgggtctacagtatctgttatctcagctgatttcctttctgccttttcatgaaccagagacatgtgatttccaattaaagcacagccctgaccatgtctttgctcagcttacaaaacgtcaacggctcgcagctatccaccgaattaagcctactataatccccttccttccacactacaacctatccacgcatctgtcctcttactccttagcttccatcttacatgactaagagttgtttccccaaatacacccttatttacttttttcatttataactcaccaccaccccctccaaagtttcacgtgggtaaattctagacctccacgtcataggccaactcaaatgccaatccttctaatgaaccttctagagagcccgggcctgttgtcatctctatagccaatctttggcatcttgtggcaataatctcattctaccttgtagagctttctggtctgacttcccttgccaccttctgctccctttgcctaagtataacacttttgaggaaaagaacgctgttttaatcatcgtcgcctcgcccacaggcggtgctttattgtgcttaatatcgtttaacgcatcacacactgccgagggggtcggaggcggacgccttttgctgtatccacacagacccgcgcaggcacacacgtaggccgtctgccactctgacagacacgtgtcccctgggccacagccctggaactgtctcgggattcccagcctgtgggcgcttccatgctggccagcggaaggggacgcttttttcttcagaacagctccaacggatacctcttattttagaccgcctgcggattctatctataaatcagcctaagccccgcttccttttaaaacaggattacgccgggtcgagggagcctggcgtggccgcgcagtggccgggtcccgcggattcccctccagctcccgcttggtagcgcccgctttgtcagcgcgcagcgctcgccgggcgccctgcaggtctcgccaggtctcacagcagacggtgccgacgcagcggtgttgcacctccctctccggctctgctgcccgggatttccccagaacctgcgccgcgcgagaaggagcctgggagcatccgcccacactgcccggacagtcggctcgactcggtgccctcggccccagccgggctccgctcctcgggcgcgcgaggggccgtggtggcggcggcgcccggcatgtttcatagtccgcggcggctctgctcggccctgctgcagagggacgcgcccggcctgcgccgcctgcccgccccagggctgcgccgcccgttgtccccgccggctgctgttcccaggcccgcatccccccggctgctggcggcggcctcggcggcctcgggcgccgcgaggtcgtgttcccgaacaggtgagtgcaccccagttccgggcggagaacgccacggccgccaacgcgcggccgccacctggagaccgcgcggaatgaatgagaagcccggggctgccggtcgtggagtctggcctgaaagtgggtcctttaccggagcaaccttctgcgttccctttttcctctttccctgttccccgacttgcctggggcttgcatcaaagctagtaagaactgggagactgtattcaggttcccgcttgacccttagaggccatgctttcagaatttcttgttcttgaccgttaaatttcccccttccgaggccgcgagttactatgttggttacattttttattgcacgacttaacggaaatttttatggaaaaaaaaatctaaatgatgcttatttgcttatatagctttcatggtctagatattaagttttttttttaagtcgtgataataacacattgattcgttttacgttgttttttttttttttttttttttttttttttgagatggagtctcactgtgtcacccaggctggagtccagtggcacgatatcggcttaccgcaacctcccgctcccgggttcaagcgattctcctgcctcagcctcccgagtagctgggattacaggcgccagtcaccacgcctagctaacttttgtatatttagtagagacgggggtttcaccattttggccaggctggtcttgaactcctgacctcgtgatccacccgcctcagcctcccagagtgctgggatcacaggcgtgagccaccgcgctcggccattttacgtttctttggattttttttttttggaggcttccactctttatagttaacatcattttttgtcctgtgtatctaagatcttgtaaaagtgaggccttagtttcaccaagagctgttttcatacatcataataactaccctgagttttccttttttgctacctctgtttctgcctgggcacacattaccatggccacaaattacatacaaattaattatactttaaaaattgataaattttttctttcaaaactaggcaata

SEQ ID NO: 43233 - DNA, 823 bp, Homo sapiens
ggcctcgaactccctagctcaggtgaacctcccgctttggcctcccaaagtgctgggattacaggcgtgagccaccgcccccccggcctataaaatttaaaaaaataggccgggcgcggtggctcacgcctgtaatccagcactgtgggaggcggaggcgggtagatcacccgaggtcaggagttcgtgaccatcctggccaatgggcttgggcgtggtggcactcgcctgtaatcccagctactctggaggctgaggcaggagaatcacttgaacctgggaggcggagtgttgcagtgagccgagatcgcaccattgcactccagcctgggtgacaagagtaaaactccgtctcaaaacaaaattaataaaaattttaaaaaatgtatatattttaaaaatggtcatctggaatgtgattgaagccaagactttaaactattcgcattgttggcagatatttaggtatttcccaatctagtatcaaactcctggcctcgagttatcctcagactctggagcagttgagatttgcaggtggaagccaccatgcccaacttagtcattttaaaattaggatgttgaattggttgctggagattctgaactatattgttccttagagtgaacttgacagttagattccccacccccacccccaatttcgtaggaatgtggtacattgtgaaataactgccagaatgagtatattgcctgataacttttttcttgctggaaattttaagaacaacattgttagaggtttgaggtaggaaaagtaaaagaaaaccaggtgatgtcttctgtaccagcttatatctta

SEQ ID NO: 43234 - DNA, 1195 bp, Homo sapiens
aggcgcccaccactaagcccggctaatttttgtatttttagtagagacagcatttcactgtgttagccaggatgatctcgatctcctgacctcgtgatccgcccgcctcggcctcccaaagtgctgggattacaggcttgagccaacgcgcctggcctatttatgaacattaaaatttgaatttcatatcattttcacatgtcatgaaatattactgttcttaaggttccccccctccccctaccatttaaaaatataaaagcctttcttagcttgcaggcagcacaaagacaggatgctgccagagttagctcatgggtcacagtcggtagatccctgatctagagaggactctgtacagtcagcagaaggcgccttatagtttcatatttccactcacactgtaaaaacacgtcatttttccaagtgtcccagaaatgttagtgatgggagatcaccagatttttaggttttgctttttcacatttttatttcagaggattgtgctagaaaagcccagcttgtggaaatgatttgtcagccaatagacaattgagcaccagtcgaacatgttaaactaagcatttatcatggaggggattcccttctctttagagagcttttccatatgagtctgtcctggctgaaggtatggttcagtcttgtctggatgacgcttcagctttcttgtctggtctgtgactgccacctggcaaagagaggttgtttggattgtcacactcagtctaggtgcttgtatttttagacacgttaggttgagagttctgaccttcacttgatatctctggtaatgccaagcgggtcgtggcactgctttgtacactctgtgctgtggcagtgtgtgtgtgctgtgacgacagtgacgtcgacagatggaggaggtgcaactcgacctctgtttctttctggcctgaagaatgggctgctgtgtgcgcctggggctaggcaggacagctgcatcgctgttgccctgaggcagtatcagcacagctggagatgctgacgagcagcagtccaaggtgcaggtaactttctccagggccagcccccttactagttgttcaatctagagaaagctgtgcagatacccacttcaccagatttgggacagaataatgaaaatacatggaagcagtctggcacattatctcgaatgttaataatagccttctct

SEQ ID NO: 43235 - DNA, 3241 bp, Homo sapiens
aaagcttacgaaaaaatagtttccaatggcaaagtgaagccctcctacctttacagtatttttcaaagttttgatgcaaaggcattctaaggttctttccgtgtgttcgcagccactggaaacaacatctcttgaactgtacatattcaatattcacagaaatatcattgacccaacaacttcacgtatcgttagtaccaataatataaagccaaaaattccatcccttaattcatattgtagtaatggacaatatatacaaaggaatcaagttctcattgtgctctcttactaaacttaagttcttgttctgaccagaaagcaactgtcaaacagatgtgttttaatcactactcagtaaactgcattttcctttggaacctctgaaacacatatttttacattttatagaataaaagactggtcaccactgtgttgtactcaatacatacatattatttcagactttgaacctagagcgcttccgttaaattttgatacatgtgttcatgatttcccccatcgaactgagtcacagagttttgccaagcaaactactaatttcaagtcccttacctaaaaacaatggatggaagactgttaagatcttttacagaattactgttccctgagtatttctcatcgtccacttcccatccatggcaatatgaaataggaaccgggaagaggaacatgtatgcttactattacagtaagtaaacagtattcaagcagtgctacatcgatccagggccctcactgcgctgtctgctattaagcaaagctgctttttctatgtaacttaagtccgtgcccttccgctgcagcagtggcgccgcacatcccccacccctgcggccacttccgtgtttacactcctcttccctccaattccatgcgtacattgtcagcttcactcccgcccaatcttcattggcccagcgcgggcccgtagtcccgcccccagaaatcaacgttctaatttggaacacctcagagagcagattggaaccagaggcctgtcaatcccgtccgttctgtcctttccgaggcgcttccgctgtggtgggaggtttgggggggggtagaggggaagggggcaattccgtgctgagacttccctagggccaagactccctccctcccgcctcgctccttaacattcacccactgtttacaaaaataaatgttcttctctgacgccgcaaccctccaggtcaggggtacaaatatattccgtgttcttcccattctccccctaaaaaaacaacccacgagggaaggggcataaacctagtttcttcgcagccacccgttaaatgagcaaagggaggcgggcccctgaaacatcatcccggttactcaacattattaagtgaccctgtccaggaccgttactcctgagactgcataaggtgggaatgtgcggaggagggagggtcagagcatttttttttggcgggtatcggtccaccggacatcgcccctggctgcctggtccatgcggaagtcatggaattgtggacgaagtctgaagggagaaccgagcgggggtggcgagcgttcgccggagaagcccgccgcccccgaacgcgggcagcagcggcctctccggccagacagcgtggcaggcgcagccgagagacaacagcctcactcacttcctggttcctcagcaactggggtgaagcgcacaactcgtccgcccccgagtgcccaacttaaccgcggctccgttctccagcacccgctgccagcgctcagcccggcagctgctgctgctgctcgccgaacccaccctgaagcgacagcgccggattcgaggcaggttactctccaaggtgatcacttcctgattcgtcgcctccattacttcattcactcccccctttcccccagccgccccagtgactgtgaggtggacactgtacccccagcacagactgctacaggggagtcaccccgccttctgtgcaccccctctcctgctgcaccgatgcacgggagaaaagttcccctgtccttaccggcccgaatgagcagatccagctggttcgtgggtccctcatgcagagacgtcgccatgtttatcccggggctggagctgctgcttcacattgacttacaccgtgagcagcggcggcaggggaggaggcggaacccgcggccggagacacacgccgtgcgaccgacacacactcacgcactcgcacacactccgacgcccggatccttgcgcgtcctccgacaggaagccgaggccggcccgcctcccgccgccgggctgagaaaccccaccacctaacggcaggggcaggggcggcaggggcaggggcggcggcggcggcggcggcggctgtggctgtggcggccgccgcagctggcaacgcgatccttccgccccgcgcccaaacaggaagtcccggacgcttgctccagagagcggccgcagcctgcggcgagagacacctgaggctgggaaacggctccgggagccgcgcgaggacacagcccctcggcaggaagaggcacatttcacgctctgcggaagaaaagtctgcaattgtcccccctctggaaaagagccattaatcatattttcttcctggaagcaatctaatacctagtcctgcagctgtaaataaaggtggctatttaacttcttttggctttttcaaaccttatgcaacatgtaaccagttcacttgaaacatctgcacttttaagacaggaacaccaacaaagtcatacctagaacatattctgaaagcattacttggaaaataaggagtttccaactactttctgagaccaacttcgtccttttcccttaacagaagtgtcaaagagcacattaaacgggtatttagtaaacagaacacaccaacctctggagatgagactcccccaatatgctaatcatgaaattcatgtaccctttcatttctgtttggctcacttggaaacaaatttatattgtcatttacttcaaaaaaaagtaattcttgctgaaaactaacctaattacaaatacatattaaaatacaatggacaagggagataaatcgccaatttaatgactataaatttactgaacacaggaaatcaaaccaatataatgacgaataacgcttcattaaaatgcttccctggtttcagaatttaataatacataaattgtttgaaacaaagggttatgctaaagttgtctgcacacaaaacttacataaaggaacagtgc

SEQ ID NO: 43236 - DNA, 3227 bp, Homo sapiens
atttacttcaggatagagaatcacagataaaaaggaaaacaaatctgattatcaaacacacgattactattctctcatcaccggattacaatttaaaccattaagctgaagtaaatgttcatgaacacaagaaaggggggaatttttaacagttttacaatgacgtgtccccctcttcctcatttaatgaagtactaaacttaaaggctattctgcagcgaatctgcctcctagaaagagtccatccaggatgctggcagagggaaaaagattagaaactgtgcgatctggattattcttggtgtcacggaatattttttgagtcctttatggacatggaataaaaatgcccaaatggagcagaagagagggctcggctaccctgatcacaaagctcctggggtagagtcagcatccagccctggcagagccctccctgtcctccttccgcgcccctagaccatcccgtcgcgcggtccctgaggaccagcttcgcgaggatccagaaggcggtcactggacgtgcctgttacgagcccgtttttgttttgcttaagaaacagattccgatccgagcaaagcctccctacctcccggggaatagggggagatggcagcacggtgccggcgtggagagcgagaataaaagaactgccgagtacaacctgtcgtgcaagctagcagcgccgggaaggaaaggtaagcggcggcgataaggcacgacagggaaggaaactggtgtccagcgcccccccccgcctgcccgccacccagagcggccggagcctcccaggtcccgccccgagctcgccgcccagccccggcgccggccgcagactcccgccctacacaaaccctcccaggacgcgcttcctccggagccggacccccgccctggcctccccgcgggatgaggcgggtcagttcagtccgcttctcggcagaggtgactcgcgcagagatgtaaacacggagagaccagctgcgctcggcccatcccccccgccggggtctgtaacctcttccctcagccctgccccgcgccccgcgctccccgcgggcaggcgcgcagcgcgccttcccctttctccaagtcccgctccgcgaccgttgcctggggacactcagcccccttcccccagcccccggccggtgtcaccgccgcagccgccggaaaacccctccgcaaaccccgaagcaaacaacacaagcgcggggcgggggcgcggagggaggcggcggcagtcgggacagccaggctttatcgccgcgcccttcgcgctccctctcaccagcctcggctgcccgcgctcttacctgctctccgcgacgcctgggaagaccgcggcgtccttttccctctcagcagggccgcggactagccgccgccgttggccgagcgtccggagggagccggggcctccccagcagcccgagccgctccacagggagagaaggagacaaaacagaggctcgccgccccgcgcagcgacccccgcccgcgccgccccaccgacccccaaccgcctaggcgacggcggcgacacagagcttggcgctgggagcaatggttgcccccgccccgctccgctcccggccccctccctccaccccccgcctcggctcctccccctcggcctcctgccgcctccaccaggacactggagtccgcctccccctccccgccagctcagagtgctcctcccctccccacgcggcgggggggcgggggcggcaccgccagtcaccgcagcgcctgtcaaacgcgggccggctatttataccccgcggggccccgccgccctcgggcccccaccagcccgccgaacctgcttcttttgctgtcttgaatcccgccctcttctcctcgcccaacttctcccaaacccgccttcccaggtaaagacgctcgtcacttgtccggctccttgcccagggctccccgatctcgctctccactccagccccggattggtgcagggggctctgccgcacggggcaggcgtgtgaggccgatggggccgcgcgtgcacctgcagcgcccgccggctttcccccgccggccgggaccgcacgcacacaccctcgccactcagggcccccgcaggccccgccgtcaccgcatccccaactcaggactctcgcccttctccggagacggccccacagtcgggcagtctgacagttacaggggggcgaggttttgcaaaaactcctagcccggtctttccagttcccactcctcagccttggcttagtgaaaggtgggggttcgggcaggagcgcgacgccggccccgccccggccggtgacgcacgtggcgcaccgccccgccagcctcgcgcccctcggcgccgccagctcctcctccccgctagcaaaagccgggcgtagtacacccgcgaccccgccccattcccagaaattaccacccgcccaacagcccggccgcgcggcggttggtgccggcgtttgctggctgtcgggtggctgggcccagcgcgcagctgcggagcgcggcgggcggccccttggagctgcccggggagctgcgggcactcgcacctagccattgtcgctccttgcgcggtccgcaacggagaagtaactcaagtctgagtgttgttggtgcgagaatgagagagtgttctggtgtgggagtattttggcccaagtgcctgcgaattcgaaaacgaaaacccagcagtggctgcacgcttctggtttccacactttcacacaaaggggagccttcgagcggggcactctcacgcgccttcaagtgcacaaaagccaatgacacggtgccgtgggttgccctgtgtaggagcgtctctttaatgggctttgtaggcacagttaatgcatacaaacgcctcagtctatttcttcaccaccaccattccccgccgcggcgttttctgtatttgtttctttaacaaagagcacagcctgtccggtgcgcgcggggctccttttgctcccctccagggctcctgcagcctcgccgcgatggacctggcacctggcgcggtattcaccagctgatttctgggctccagcgttaccctttttacggcttcacaaccagtctggagcaaagaagaaacactgaggaatataagtgatagctgttctcttgaaagggacgtgggaaccgtggaaatcaccctagagtaaggctcaaatgtcagaaagctgcaggaggctccagatttaaatccctg

SEQ ID NO: 43237 - DNA, 1752 bp, Homo sapiens
cacagggcagggcaggcaagatctggaagtcagtgatcaatgagactagaaggagttacccataaaaggaaaactttacactaactcatctagaaagtcaagagtgagggtgttctgtcaccccactgatgaccaggagtgatttcactgatcctcctgctccatgtgtgccaatctagagccatgactcctgtccaaaagagcgacctttccacatacaaatagagagagttctagacagaccatatgctgagtttcagaaacagaaataatcactttgtgtggtccagaaacacagctgtaatcctgcttagagttgctttttctctttgtttgcttgtgttgttttttgggagacaggtgtcaggaaatagcctttataataatgacattaaaaattttcttctcttagggccggatgtggtggctcatgcctgtaatcccagcactttgggaggccagggtgggcagatcacgaggtcaggtgctcgagaccggcctggccaacatagtgaaaccccatctctactaaaagtaacaacaattagcatggtgacatgtgcctgtaatcccagctacttgggaggctgaggcaggagaatcacttgaacccgggaggtggaggtagcagtgagccgagatcgcgccactgcactccagcctggcgacagagagagactctatctcaaaaaaaaaaaaaaggcaactttccatgattgaaaagtagtacaatgtaatccagatgggttagctgagactaagagcagtcaataaaatactttattaatggcataagagttgcctccaggtactggtgttctgattacataatatctacatttaaaaaaaaatctagttcatgtgaaagcatggacatgctttaggcattaggcagcagtaactgtaataggaccaataaggcaatgtaccagtccaaacatgtccatacgctgtgattcattgttgttatgttcaaaagggttagagctctagatagcactgaaactcaaccagcagaaactctccagtaaccagaaactctaattttttgtttgtttttttagatatgggtctcactgtcacccaggctagagtgcagtgactcactgcagcctcaaattctaggcaatcctccaggcaatacgagcttgccccaatagataatccaatgaaggctgtgaaccaaaatttcagttaaagcagtttccatggcagttccatggcttctcaaattgctgggattacaggtctgagccactgtgctcagccatgaaactccaattaaaatagtaggcagggcgcagtggcacatgcttgtaatcctaacaccttgggaggccaaggcaggaggattgtttgggcccgggagttcaagaccggcctttcaaacatcgcaagaccctgtctctacaaaaattaaaattagctgggtgaggtggcactcaccttcagtcttgtgaggctaagggtaggaggatcgcttgagcacaggagagcgaggctgcagtgagctgtgattgcgccacagcactcagcctgggcgacagagtgaggctttgtctcaaataaaataaaataaaataattgtagtagtgtccacaagaatcacctgcagaccccgaagatcttagacttcgaatattcaccctgactgctccctttacctagaatcccacttatcttagatcagtctaagtccccacctctccatttggctacccctgcttatccttcaaaactcaggtaagattt

SEQ ID NO: 43238 - DNA, 925 bp, Homo sapiens
actatttaagctctttactgcaatgtcatattctgatctcagacagtagaagagtagtaagaaatgtacaatctcaagtctctcagtcctaaaatctatcagtggatgccaaaaatcttcaagacccattaacgttttctagaaaataagtctttttttttttaaactaagtgtactaaaaacacaaaagcacttatcagacaccctatggcatttgttgctgaaatgtctaccggctggagattagccttgagccgaagcagcctcagagccaacactggcttcctcctgtaaatcatctccagcagaggactctgactcagctggagaattttcttcttctagttcagcatattcatcagaggtttcgttctttgttgtatctttatcattatcgatggtgacagcttcatccagggcagcatttgtaacctctggggttgtttcagggtttacttccgtggtttccctcgccgctgcatctgtgacctctggcccggtttcagcactgactgctgtggtctccggagcagcctccacgtgacctggacaggcagatgcctcttttatgaccacaactgtagcactgggactttcttcagcatctaccacctcagcttccactataagttcttctggggcttctgaacttgctttctcagtttccgcaacattctccttttcacctttaagaattagtcattaagcaaggtattaatttaaagatcgtgggaaggcaatgaaacactgcggtcgtttaaacacctaagacagaactacatgcactgatgtgtaacagtcttcaaggtagactctcaagtgaaacagcaaaaaaagaacaatgtatacagtctgctactattgttagggcaaaatgaggttggagcaggaggggggtaagttgtatgcctagataattgtattt

SEQ ID NO: 43239 - DNA, 1474 bp, Homo sapiens
aaaaaaaaaagtataattactatttagtaaaactgccattccttacaaaaccatgttaaggaacaataacagaaattttagtcccatcatactttttcaatgttgctgaaatcttaatttctttttagtccttgggatttctcttatggaaaaatacgtatcagcgattatataaatatcctactgttatgagagtttcactgccatacaacatataacagcaccattcaatctcgcaatgttatgtcattcccttaccacgctggtgtagtctcacgacatccgggagtaaagtacttacatagatccacaagaagacagtggtgcccaaggtgaacccaactttcagccagtcaggtttggcattcggcggctctcgcacgtagaactttgatcgcactgaagctgaaaggggaagagggtctgtaaatttgtaacttactgccttgtagggaaaaaaccctaacatttacgtgcgtattatcgcatttaattctcccttcaactcccccatctcccacttaaacagccaaggaaatagaggttcaaagagatcaagtacctcgcccagggccactggcgagttagacaggacgcacctgtcctgtccgaggctttcaaagcctcgtttaagggcttgcggaccctcagacgactcgggagtggtcatgtaaggggcgccccggggagggtgtctcctctcccggtttacgggacctaacgtacagaggtggggaaggcaaggacccaaagtccatttacaaaggccaagagtggtcaggttgaacttggataagtgctagaggcgggtgatggggagcagagagccctgcgtaggggacaggcgtgggctgggccttgggtcgtctgccggcgaaggtcactgcaggacgaacccgggccgctgccgcctcctgcacccgtgggctgggtccgccttaggaggggtaatctgagggtcgagtcggcctgcacgaggaggatactcacggccgctcgggagcctggcgggggccagcagccgggaaaggggacgcagcaaggcggacggcgccatcttgcgtggcccagctcagtctctccgagttggcaacagaaccagcgccacctggcggccggaagtgcgggactcgagggctctgcagcagagctccgtgggggcgtcaacgtgaattccagcacggcaaggttctctagcaccccggcctcagccttctgtctatacagtggaattaggaagaaaataattaaaagaaaaaagagtttacctattctctgtcctctgggggtttttcaccccatctctacggctattcatcaagaggtttattaaaattttcctacatgagccagaagaaagaaaagtgtcgtgctgaataataactagcatttggattgaattctgtggtccaggcacggtgcattaatgtatcatatggtttacattcattgtcttatttcatcttcaaaacga

SEQ ID NO: 43240 - DNA, 2367 bp, Homo sapiens
aaggttaaaatactggccatatttcaaactgaaacatagtttcctgtatatatgatttttctcaaacttttgaagagagatcacagaatttaaggaaactccaggatttgactgttaaaaaccttatttatgaccccggtgaagggcgaggacaatcaatatagcagctacaaaacccaagtttatattgggaaacatgtatctcaactcacacctttcagggacagttaagagaagtttgaaaattaaaatatctttgcaaataaatttaaaacagtaaaaaacacgcacatattgtttaataattcatgatgcaaagaatgctacagagtgaaatcaggatttggaaagaggtaatcaaaaaccaaaggttaaaagtggctcatataacttgaaaatttttagatcaatggaatgccactttgaaaaagttttacggtcagctgttaatgaaatgacttacatttttggaaggactcctattcggtatgtagtctgacctcgcctactcgagtagttccctctagtatccttgccagtctttggcttctaagatctgagaatttctggggatggggagttcgagtcacaatattaagaactagtttgaagccagctccagggtagtctgtctttaagtctccactactccgctccaaggtgactcataaggtcggtccgtcaactctgcattatatggcctcaacaacgaaattaaaacacatactttaacctccagagcctcctttggcagtgcaaatatgtcacttcggatctgactaactacctttccaggctgatcttaagcaacattcaccaaattaccgatacgacagccaggcccatttcatcggtcaagctctttcacgatttccagactctgttaagcccctttctccccagggctgttaacaagtctccactgcggtgaagcttttttcattttccactccgcctctgctccttaaattaggcatttcgtccataatcaactacagcgcttctcaaacacctacacctgtattttagcactttgggctcaaacgatgatcacacagtgtgcgagactctttccaaggaatgaaaggtcgatctagcaggaaggcgccagagaggctgtttttgatgaggaggcggtctgaaccgtacttgcctagcctcccgtagctccgcgggcgcttcgagggtaccacgcactgaaatgatgggcggggcctgccccgaccctcccggcctccacaggcaggccagcctccaggtttcccggcaagctccgaaacccagaggaggtggggaaaggaggtcaccgcgcctgcgtgttaggaagcgtgacccgggtgggaaaaccctccgcgtccgccattttggctgcctctgtcggtctgttcagttaccacgtgaaccgccgacggagacccgtagtgggggaggcggcggcagcgttaagtgagaaaggaaaaaagacaacgaggaaaaaggaggtgtccgggtagggcaacgcggcgacacccgaggcctggtggtggcggcggatcgagatattcaaggctgaagcagctacggaacggcagcggcggcggtcggacaaactgactgaccgagccgggtggtggcgggagcagcgggagcagccggaacgatgccggccgtgagcctcccgcccaaggagaatgcgctcttcaagcggatcttggtaagtgtgaggctccgggcaagcggtggggaggatttagccggtaaccgggcctgtcacccctaacctcggcccggcgggcactgagccactcccgcccgggaccccgccttcatagctctcgtcaggccgaatgcattgctttgctccctctctgtggttcctactatggcccgcgcgccagggaccacaggcttcttcattccatccccacgcttgaggccctggttccggactaggccccgacctcccggcttctagactgccggttctcattctccccgatctgggggagaagaggcccggcctttggcgggcaagtgggcgacaccggcaggagtcgcggcccggttggtgtgggaaccctgctggcaggtcggggtggcacccttggaaggaacaggtggtgcggatgcagcaggctcattcattgcctaaacgcggttctccctccatcatctgtccctccctcttcctcctctcttgggattcacctgtctccgcccggcccggggtcacccaatgacctgagaggagggaaagaaggagttcagagaaggaaagaaagcttttcaaacgactacctccttgtagtcagttgcatactggagtcttcagctcctctgcctccgttgttctcgtttctggagtagggatgaggcatttatttctta

SEQ ID NO: 43241 - DNA, 2060 bp, Homo sapiens
gaacttttagtgctctactgtccccctcactttagttaaggtctgccatgtcctcctctccgacagtccttgactttcccaatggcatattcatctgctcaaacagatgtcactgcaaaacaaaacaaacttttaacaaaaagcaatgtttgcatatttggggccttttgtatgacaatattgcacgtttcctcagaaaaattcacggagattctttaaggttgggggtttaatctattgatattttccttaggtagacaaagacaacctctaagtgcgctcagttaatctttaaccgctacatcatcgtcacccaggcactaagacataactagggcataatgagttttatttccaccaggggcgcctagtaactaccaggttcaacgctcccaggtggccgacatgtgatgtgctctactgtttgggctggggatattagctcaacaaactctggccacaaggatcacgcggatattcttggggatgcctagcgaaatgcgctgtacctaggcctcgaactctcgcctgctctccggtgggcggtctcgaactccagcctgctctccggcagcccacagcaatgcgcctgccaagaccttaggctgcaaaactcgccacggcccagagctcgcctccaagtgcgccccgcacagggcaagctttcggcgaggactcgcgtcccacccatctagccctggccgctgtcccaactcccgcagttcacagaggcggcggcggtgagcgcagccgatgccacatcctcagcggcaagctgaagaaacctgtctcctctctggggcgaccaaacgatacgtcgatgccggaaccgacccgacgccggagccgtcggctccgtccttaccgttgctctccaggtacacgcccccgtcaaaggcggctctgcggccctctcgcgagagagtgcccgtggtacctccttcctctcagttgtctgtctctccccgcccccggagtgattgcgcggcttcctccagagggcgggaaccttggacgtggcggggctgggtcagtcagggcgctgggcccagcctctctgcaggctggccttccgcgctgccgtgaagcccccgacaggtcccacgcctgcctaggtagaccggcgccagcccgagtgacgcctggcgtgtggccgcgggcaggcggctccgtgcggcggggcgggcgggtgccacacctgtgcgggcaagggcggggcgggaaggtgcgcaggcgcgctcggggctggtgggcggtggctcctgggaagttgcgcagccgaactggccggctgggcgcgcgctcttgcggtggcgtaatctctcagcctttctgtgtctcctttcctccgcctcagtttggggcgggtcgggggaatggctgaggagatggagtcgtcgctcgaggcaagcttttcgtccagcggggcagtgtcaggggcctcagggtttttgcctcctgcccgctcccgcatcttcaagataatcgtgatcggcgactccaatgtgggcaagacatgcctgacctaccgcttctgcgctggccgcttccccgaccgcaccgaggccacgataggggtggatttccgagaacgagcggtggagattgatggggagcgcatcaaggtgagcggatggggaactgttggggaggacagggtgacaggtgtcccaaccccaccgtgggctggtcgctggccgtgtgcacggtgtgtgtgcgctccatttttttctcacgctgatgagattggagttggggattggaaggattgcaatactgcaaacttctaaggcagcgtttctcagacttcattgtgcatgcgatttacctggggatcttgtttttgaaaatgcaggctatgatttaataatctcgctgatgatgcaggtgcagctagtccgtggaccacactttgagttcaggagtgtagggcttatctaccgacccatttactgtgtgtgtcgtgtgctgggagtcagtcaaatatgaacggaggaaaaacagtgaaattgcgcgagaatggaaaattcatttaatcagtaatagttattaaacattca

SEQ ID NO: 43242 - DNA, 1959 bp, Homo sapiens
ctgaacctacgaaagggtagggatgggctgcgtgtccttactagggtgaccaactttgcccaagactgtccaggttttaaaactgggtctcacatcccggggaccccctgtattgggcacaccaaaatagttggtcaccctggaccttaggcagattctttaacctctcagagtctgtatttttcttccgaaaaactgggatcatgataccttatcaggctgctgtgaggatcagatgaggacatatatgaagcacctggttcatagttggtgcctttaaaaagattctttgtctttcctggtggcttaacattatttttcctgtttgccaccattagttctgcagttgtacacccaaagttgaaagcagagatagtggagggcataggtagacagctaaggggagagaaatttaaaaaacaaaacaaaaacaaaaacggaagtaggaaattctttcaaaagtggagagaatgagggtgggggaggagttgggatttgagggccctttatctgttcctgggttgccatttatacttaaagataacagatgaatcaggtgcaaatttaagagataatagtattgaaaaaatataaagcatgtgcagtgtataaagtcaattacctaactactgaggtgagtgctggcagtgataaataagacagaaccacaggtatgacgaatctgggagcacagagttgataattctggttgggaagagcaaggagatgatattttttggggagattatttctactgaactttagcctaacttgttacattgatatggacttgaatactgagatcatttttcttctaaggccctagccgttgatttgtgccaccaatggtgagacttgagagagatttttattgtggttgaaatgactacagacatgttctgaggtttctatagtaggaaaagatatagctatgttgggcattttttaaaaccacagagcttaattttttttagtgccctttttttcgaaaactgaaaagtgatataaagagctttattctatgtgctgcttctgctgctttttggttaacctgtaatacatcttgagtgctgctgaaatgttcatattacgtctttggaaaattgtagcctgatctaaaatgacatttttcctaatttttcatctcaaagctggaaagctctattactttactagtaaaatgccattctagacattatttctttgataaaaatgagatattgcgttaaatgttttgataatcatggactagaaaattttcagaaagcatgacttaacaacagtgccctttcagaatccgttaaaatgttttatgaaatttaagaaagcctatatctgctaatccattcctaagcagtatgtgcaggtagttgaaagaggaaaatcttgtttgcaaaattttggaagtcgaataaaattataaaattaaattccttaaatacaaatacattcggcttttaaattgagactcctaactctaatccttatgctccttcctcgtgtgtatatccccttcatgactaattgtattcctttagcacaatcattttccagtggcagacacaccaacccattaaagcctggtgttgtatttaatccggcctcccattagaggtcagcaggtcctacttgaacattttagtagcttacttttttgtagcggtagaaatgaaatgttcccatgttaagtgcaaaatgttaatattaactaaaggaaaataatcaggacctctccccacactggtaaaacaaatatttaatgagtaattgctggaaagaagacattttgataagcacagagaattatgatacggcacaagggtcagcaaactatgcttgagggccaaaaatggtcttttgcctgtttttacatggccacaatctaagaatgattttttacattttttaatgtttagggaaaatatcaagatttcatgacatgaaaatcatatgaaattc

SEQ ID NO: 43243 - DNA, 856 bp, Homo sapiens
ttctggccactgaaattggagaagcaactggctgagaacgttttcagagattattaaggtacatagatctcaagccacggtgctgaaaagccagaaaggagacttttagaaacccagctgcatttttctaaatcttctccatcctctcttttgctggctctgacttttcactgggtcagaggctctaaggctggaacctgatgttccacggggactgtgttatggttgttcttctacagagtaaagtgcatgaactgaaatagctattgactgctcagaagtcactcagtctcaggtttctggctgtgttccacatagctgtaggttttgtaaatcgtacttagataagttgtgttcctgtacacacacacacacacatgcacacacacagagtccgagtgctataataattctgataaagaaatttcagaggccaagcacagtggcttatgcctataatgcccagccagtactaatgatcttataactcgtgttttacagataactgtgctccaggcagagagagattttaaagacctgtatgacacagaaatgcttctgtttgttttaaaagataaaccagttttgttcaactttgtttactgtaggcgccagaagtgctattagccctcttgaaatttgggctcatttaaaaataaagtccgggtgcggtggctcacgcctgtaatcccagcactttgggaggccgaggtgggcgaatcacccaaggttgggagttccagaccagcctgactaacatggtgaaaccctgtctctactaaaaatacaaaaattagatgggcatggtggcaggcacctgtaatcccagctactcgggaggctgaggtaggagaat

SEQ ID NO: 43244 - DNA, 4725 bp, Homo sapiens
ttttctttatccttcgtcagaacttgtgtttatacaaatcagacagaaaccagattcaaccaacagctaaaaattatttactcacatgcttagtttaaaacattctggtatcataccacaccacactgaaaaacatcacgacgtactgtatggagtggaaccaaataaatacgctaaagagtattttccagtattcgctgttacaaaatcataacatcctatgatacaaacaacgagattgtataacgtccccacatcgttttttcagaactaacaaaaaaaaaaaaaaaaaggtggagaaactcagcaaaacaaagtggcgagaaaagtcgggggaggggcggtagaagagaaggggcggagaaacacgacactgaggcggtgatatcacccacagccaacggcatggaattcagaaagttaagtgtcacccagcaatctcggtgcggactcgcggcgcgcctgcacagcgtggcggctgcatcccagccaagcaggaagggggagggggaggcctgactgagttcgctcgggggcagctgaggggagggctgcccgcctcccggacggcgcacgttcgagtcccgggtcgggagacttgtccgtcgcccgacaatgatttcatcttttcggaagagctgccgcctgggccgcggctgccacgtgcctggtctggccccgtgcgctgcgccgggggacctacccggacggggccgcggccgccgcggggcgcagaggcagcagaagggaagggctggcggccgggaggggatcggggtggccaaaactgggctaggggattgctccgcggagtccgccggcctcaaggggctgccctgcggagtgcacccaccctccgcgcccaaaggcggaaaggccagagcgcggggcaggtttcgcaactccgagggtggatgcaggctgtggccgggcgggatggagcggccgtgcgtttccagcgcccccggcctggcggagccccattctcggcctgcgccccgccgcgcagtgcgcgctcccggcggcgtgaccgtggctgtcgggcccccgcccgagccgggcaaccggccacccgtgtaggggacagtggcggccgcggggcccggcgccgcgctgttcgcagcccgccactccttccgcgctccaggccctctgcgcctcctcccccggccccggagaaatgcttgtaccttccaccgcctcctccaccatctcgtcgtcgctatccatggcggctggggacactgcccagctcggggctgcgcggctgcctcccgtccctctgggtgctcccggcggctgagcgagctctggggctcgcgagtttggaggaggaggaggaagaggaggagcagtcggggctggctcgcactgcctccccctacagccctttcaattccttggccttcagctgctgcggcagcagccgtcgtcccccctcccttcgcccacttgcccctcgcctcggaggctccggtgtgccgccttggccgctgccgctgctgcaactttctcctgtaataccctctctttgttatcgagcagctgatccgctgacatcacccagcgccggtgcgctccctccctcgctgattgacagttccctgtccctttccagaagtaaggctccttaaaacgaaaggcgctccggggccgcgcgtattccgcgtcccagccaacccgcctccggcccgtcagcgtttctcttttgcttaggtgcggcttggcgcgccccgagcgctcaacgcggtcctgggcgctgcgggcttctcgcggacacttggaccgcccgtaggggctccgagctcccgacctcccgttgtgccgggagcaacttgaaagtccgtcgtgcactgtccgtgttccctcgagacaacctccaaagtgccagggaagctaaggaagcgtttctgacgctctggcgcctggacttcctctcaccctcgcccccacatcaccccgtcgccaccgggagctgcacgagtgcgacacgcaagggagcgcaggtgtcctcgcggtcccgcatcacatccgcaagccgatttccccagctcgggggctgttatctggcccggattccgcaggatggcgggtccaccccagcgcccccactccccgccctccttcgggtcgccaggccctcgggtgattcagaaattcatcaaatccaaatggcagcgggctctctgtcaggcaggaaacaagccgcaccgaaggctcggcaggttcctccttgctgctgtggtaatggaaaaggagccgccgagtggagctaacgaggaaggaaggaccctccgtctggcgcgcctctttcccgcgcctcccgccctgtacgtgtgatgtccccagctgtctctctgtttctccaagtgccaaccacttcacagattcaggcgtcctcaagtggagaaaaccattgggcacccggcttccggcccggccacttagtgtcgttatggcgctgcctcttacaggtggcggtaaagggcgactgtaaatagccgattaaacagatgtaaatgtacacaatgtaccgtggaattaccgggtgccgctctgggcacccgccaagaacagctactgcatggaggggaggagggagcaaaaaaaaagtaattccattttgttttctgatcaatgaatgagactttggggatttcaaaatacttccagcgcccaggagactactccttgcttttggctctgtgcttaaatggtagatatttttgtcaagtattgccggcttgtttcttaaagtcagcttttcctctatgaaaaagagaacaatgctagggacattagccccacacacttccaggaatttcagcccctttgactgttttagaaaggggagggtcctggaccagaagttaggagacttgagtcctggtgctgctcacctgcagaggtgtcttgggagcccagccagccagcctgaattcctccagattagaggcttagtctacattgacataaggtccttggggcttaggctagagcactctgaggttctttggctcaagcaagacaccctctagcttagtctatacctctctgaagtctcttggcttaggtttgacctccttaaagtcctccagtgcagatactgggagtccaaggctaaacagagaaggtgtacgtgcagtggaagatgaaagagccactttaggttacatcattttcaaacatgaaccacagaaacaggattttatatctgatttttaaaaagccatcatttactgagctcggtcactcactggttttgaattatatgatattttttctcatttaacctttttacatatcaccccctcccttgcatattatactggtgcactaaaacataccagatactcgtcttccccagtttccagttgattttcagggtgaaaaacaatgctgaaagctgaaggaagcagcaaaaagactttattctcttactcaaaggcagtgaggcagggctgggaggctggaagaaatctctcaagacgtacagaagacacagtttcatggtgggtgggtacgtgtgggagtgaaggagaggggaggaatcatgttgcaagtgtccaactgtccccttggtgctgtgaggttttcccagcctgtactaagcacccaaactgtcaagcgctccctttctacctactaccttgagaacacctgaaaccctgcctacggcaccccccaaccccggcccccgccgtcggtgaagcaggggtcctctggacctacaagaggcagggacaggaagggagcagggtctttctagcaaagtcagtagtgatgcggggtcaaactacagagaaccttcaccagatctgcacatgaggcaggcagcagcagggacacagtcccatccctcttcccccaccattcattcctgctggctctgggcccaaagctggggcaaaatgtttttatgactctcttaagatccacttgtatctttacaaatcatgttgtgtatgtttcgagtctccttctctagacggactgattcttatttatggtcctagaacacaacacagtgcctggtacagaatgtgggttaagcattgtcagcaatgattttgcagataggaatattctgttttatataaacagtgctgaggctttctcacagactggattctcctcctatgttttggcaaagtgctttgtttcagttcaaatctgaagagcatttttgagttgttctactttcccacatcgactggccccaaatctgcttccatcgcattctttcccacagttttcttcattgagagctgatttcataaactctctttctacttggctttccaccagtttcccctgtcgtactctgtccccaccaatgtggtcatgggctagaaaatcaataaaactcttaatcacaaacaatgtgcagcagcaacagcagcagcagaagtagtgtggctcagctcctaacttggcagatcccagtgagacagaacaagctctaccagggaggaacgggaccgcacaggacatccaacatctaggctgggtgagacttgctttcatgttcacactgagagtgacttttttttccctgtctttggtcttgaatcaggaggaggggtgacttttctaagctgctctggcttagtttccattgcctccaaggctatattccttctcttcatacccagcttgggaaacataattccctcttccattgcagcaagcagtcaaaatactgagttaattttattcattcta

SEQ ID NO: 43245 - DNA, 1169 bp, Homo sapiens
agcaccactacaccatatcctgcacctttttacatctttagactaaagagaggtttttttcccttggaggaaaaagtggatggggacacacattaaagatggtgtcacatggaaactggataggacttggtatacaaatgagagagaagagcactgcaggcagagagaacagtgtgaaaaaggctcagaggtgggaaagcgcaggtgtgagtgagggaatagtcgggctgggctggagcaggagtgtgggtagagaatagctggtactaaatttgcaaagacaagattgcagcgatgatgccagaactgtatttgtagcaggagagagatgtggtcagtgttgtgctttgttggaggtaggctggaatggctcaggtgggagagactggaggtagtgaaactagatgctagagccatgccctggagcccatcttcactcttggagggtcgccaccacctctgttagctggagtggtccttgcccaccatcactgaaaaatgcaggtaatgccacccatcccagggagactggcataccctagggacagagagagtcatgttgctgttctgaggcagctatggcccatctgtcgttttgggctttcgcctgttgccacgtcttaaagccttgccattctctaaatagtgatcatgttcacctcctgagatcaatgagatgactgcaaagtgctaggagttgctcaggcagaaggaattcacaaactcttggagcacattactgttatctttgtttctatttaaccaaggacacaccagagagaaaaggcatgacatcaccaaagcaatctcccattggctgtccatttcccaaggggtgggttttctttccagttttttacttctcctaagtattacatgcagcacagaggcaagtcctgtcacttcagggtttccagattcagtgcctctgatgtcattaggttatggcaagagagtgagataacacaacgatgtaaattttagttgacagaattgatgtaccttagagtaagatgctctgagcttcatgtttactcctttcaggctgatttcaatgctgcattactacattaattcataatgcagaatgcatgagggacaaggataataaaattatgacactagcttttctacttagtatcctataaaatgcgatgcaaatgaattgg

SEQ ID NO: 43246 - DNA, 720 bp, Homo sapiens
gtgacagagcgagactccgtctcaaccttcatgatctgggctgcttctgtgatgtttctaacctcttcttagactgtctctctgctgctgcttaccttttcagccacaatggcccctttgcttttccttaaacaccccattcatgtttctgcctcagggcctttgcactgactttttattttgtctgaaacactcttcctgcagatacctaaatagctaactccctaatctcattcaagtcttactcaaataccatcctctcagtgaggtctcccctgaccaccttatttaaaaatacaaccctgaaacactcttcttcttcctccttctttgctttatttttctccatagctcttattgccatataaataccatatatcttacttgcttatttacttattgtttttctccacctgctagaaggtgagatccctgtgactagggaactggggagatctttttctgttcactgctgtaactccagcctctagaacaatgcttggcatgtagtacgtactcaactcagtaaatatttgtttaatgaataattgaaggtcagacagcctcaatgcatggtctacagaaataaatgcaataagatgacgcatcctatctgctgtctcatgctccctctcatcttctggagacaaagaagagggagagatacgtgtgccatcagaagctgcactttaaaaaattaattaacaattgtggaaaagt

SEQ ID NO: 43247 - DNA, 1122 bp, Homo sapiens
aagctacaatcacagactccactgtgcaaaggcgcaacctgcctcattgatctctagtgtacaccaacccagcttccctttccattcagcctgtgaaaggagatagtgcttgggccatttggtaaaagaaggggatgggagatgatcaaaaccccaagtaaggttcatccaatatggtgtctaagcagcaaatgactaattgctgaagaaggagactagacagaggattagaggcagccatggggccagtgcagctgtggagagctctgagcaaagaaacaaggttggcaggtgaggaggcctaggatagaggccagaaggccaagcctggggctgcgtgtgcactaatttttgtatttttttgcttttttgatagagatgagatttcatcatgttgcacaggtgggtcttgaagtcctgggctcaagtggtctgcctgtctcggcctctcaaagtgctgggattataggtgtgagccactgcacccggctcatagctggtatttataactacattctcccattatttattccatagttcctttgcacttagcaaatttggctggacatgatcccttgcctggtggatgacctaagccatgattgctgaaaggtctggccattagcagtcctgatgatgtagttttctgttgactttaatccaggtcatgagtactgagacactccagggaagctcctgcattccagacatactcctcatactcccaatgtatggttgcaaccccattccccttgataatcagggccaatatcttagccagtaaagaacccccttctttttctattgatgcattgacatgaggaacacaaagcggccagttttatggaaacattgctgtgtccctgatagaagcagtccttcctggccaggtgcagtggctcacgcctgtaatcccagcactttgggaggctgaggcgggcagatcacgaggtcaggagatcgagactatcctggctaacgtggtgaaaccccctctctactaaaaatacaaaaattacaaaaattagccgggcgtggaggcaggtgcctgtagtcccagctactcaggaggctgaggcaggagaatggtgtgaacccgggaggcagagcttgcagtgagct

SEQ ID NO: 43248 - DNA, 1765 bp, Homo sapiens
agtatgaataaaaacccagttctcggatgttttaccaaccaaactgtctgcctgatcttgagaaactcttcagacactgcccagctctctgacccactcctttccaaataatttttgcaaagtttttgtttttttttttaaccaagccactttaaaagctaggggtacatcaagggatcaaatcaaagtccaaggtgtggtatccaattcctcggaatattgatcaaaaaacgggcatccccttggctagggatttccccaccaccaggtggaaaccttgtgtcttttctcacccctcctctatcccctcgcagtttgccacagggatgccaaacgtaaagtgtccttttctgacccttctccatggaatgtacgtctctggggcagcgtctgtgtttggcttccgtctagctctgagtggatcaggactaacggttaaatcctggtatttttacatttgagcacctgtgggttttgagcaattgactgttacaggtcgcttgctggaaatggtcaatgtgttcatacctgaaaaactgaatttttataggacattatttagagatgattttgacagtttgtgttaactgacttgttccattttcactgatgtgcatctgtagggacttctggaaacctggaggagtaagctatcacagggacctcagagggtggcttgcctggaagctgagctgcctctggtggtgttatcccggcaggtctggcagccctggattgactccccctagcggtttcacaaaatatgttattttgatagagcaccttaaactgcagctcctagctctaaatgtgtggctgttagaatccttctactacaaattagggatgaaattagatgaccagccagtgggacctctgagaagagaatgaaaaataggctcatgcaggagagggcgtggaagggcggataagctgttttgtctggaattcctgtcccagacaggtttgtctgggaatggccagaaactgaaattctgaggatatcatcctgcccaagtcccagaagcaaaggtgagaaccaggcacaccctaagggcaagcaggagggaagaagaaaagaaagaagaacgagggaagaacaagaagaaagaaagaagaaggaggaagaggaggaggagaagggagggggaggaaggggaggagaaggaggggagggagaggcggagaaaggaaaggaagaagtggaagaggaagaagaaagaaagaaagaaagaaagaaagaaagaaagaaagaaagaaagaaagaaagaaagaaagaaaagagaagcaggcaagcagttttcaaagttctttatcatcttgctaaggtagctgaaggatgcagtcacaggcccgcatgcacaggagggctttcctgtttggggccagtaggtttcttgttttgctgtgtttcctttctttttgtgcaggacgtgacttggcctccgatctagacacatcggtgtttttgtgagtcatgttctaacaggattgtgctgtgttgaaatgactgttgtttggtgtgtcagcccagatgcaggtttagcaccacatttcaaagtgaataagagctgcttttaactgtttgttcttaatccaccaaccttttgtgttttctcatcaaaagaggggtagcttgccctttttcttttgccttaagccccagagagacaccaagtgaagccacggtacccctttttttctttaagtagcccaatcacataatatgctgtaggtttcaagagagtaaactctcctctggtgc

SEQ ID NO: 43249 - DNA, 2415 bp, Homo sapiens
attcaccctccttggcctcttaaagtgctgggattacaagtgtgagccatcgcgcccggccggtttatttttttaaaaatggctgggcacagtgacttgtggctgtagttctagctacttgggaggctgaggcaggaggattacttaagcccaagagttggaggctgcagtgagctatgatcgtgccaccacacactccagcctgggtgacagatcaagaccctgtcttaaaaaaaaaaagtatgattattatcagagtctctaggtgacagtgagaggcagcctggtgcaggggatagggcacagttgtaatctgctagactgggttcaaatcctaaatcggccattcagagcgtgaatacattagaactggcttaaattagcatttaaaatgtcaacaggattaagtaagtagttccttctcactttttccacaggaggtgagaaaggtctcagcaaggccctaggagggaagggcgtggggatgaaagggatccagagagtctgtgcattggcagagaagatagtgtaactggcactgcggctggagggctggtcccacagtgagctacagccctgcccgctggccgtgggagaggcttaaaacaaacgccggaagcaactcccagccccataaagatctgtgaccggcagccccagacctgcctgccttcctgacttctgttccagagcaaaggtcattcagccgcttgaatcagccttttccccccacccggtccccaactttgtttacccgataaggaaggtcagcattcaaagtcaagaagcgccatttatcttcccgtgcgctctacaaatagttccgtgagaaagatggccgggaactcgatcctgctggctgctgtctctattctctcggcctgtcagcaaagtaagaggcatgggaagttcgtgtgtgtgcgcgtgtgtgcgtgtgtgtgtgtgtgtgacaaggcttgcgggagagagagggagggagggagatgggtccggtgttttgtttcctacttgcccttgcaggtagctctgggtcctcagagcacagtcgcctcagggtcacccatgccgcctgctaccctccttcccaggggcaagcagagactgagaacattccagagattagttctcccaactggaacgctgtggggcctcagagctcagcgattctgcatcatctgtgattacgacccacagcccgttcaaacgagcgttagtagcctgctaacctgcaggaagtggtgtgaatattaattacaagtgttccaaaggaaacgtgcctgcttctaaacctggttgtgatttcttgaacgttgatgttttaattaatgtgttttcttaaataaactgcctatggtggtatgattatcagattgaaaaaaacttccttcagaaatattagctttagattaagtaattagctctaaattttaaaacagcttcccactaggattattcaatatctcgactgcctggttaaatagagggcttttactccatgggagtcacatttgctcaattcatattatcttacctacaatgtcagctggggaaaggggtccgagtgcaagagtgcaagacttcttaccaagcatgcatatttctttatatttccaagtatgcctgtaccaggaaatagggccaagccgtagactgctcaggttacacaaacagccagaagcaggaaggcctcacagctgaggatccagtccaggcctccgtgcatgctcaatgtcttgcctagccagtctgttttgagattgtatgaagatcttgaaccttcagactcacgttttgtggtttgattcacacaatctgttgtggagaagagcaggatatttgtttctaattaaagaagcacttagatctgttaaaaggaaaaccctagacaaattacatttaactgagtttaattgagcaaagaacgattcacagttgggcatggggaaccggaataggttcagagagactctggggctgccacgtggtagaagaagatttatggacagaaaaaggaaagcgactcccagaaaacggaagcatatagttcacgatgtacggagaaacctttaggctgaacttaaaatatgtcagaaggcagctttaggctaaacctaatttagcaggtctaaggctcactgttggtagcatcctgactcacaggtgctaccaaacctgcatgcgcctttatcctaggcctgcaggtccacagatgtcccaaagctgacagaggtgctcatcctccctgtttgctgcttgtgcagggggctgtgtgaactggggccagaatgttagggggctggatggagtgggggtaggggtggggagagaggagaggagactgggtgaatgatgattaatggtggacagggaatgtttaatgacaaggtgttagggccgggcacggtggctcacccc

SEQ ID NO: 43250 - DNA, 1197 bp, Homo sapiens
caaaagttgatgttacaatctggtgttgaaggcagtctggaggcagaagtcctttctctttgggggacctcagtcttacctcctagggccttcaactgattggatgaggcccacccacattaaggagggtaatctgctttactccaagtcaattgatttcaatattaatcacatctaaaaaaacaccttcacagcaacatttaggctggtgtttgaccaaacaactaggcaccgtatgctagccaagctgatgcataaaattagccatcacagagttgttcctgttacaaacaaagctgctgtgaatatttgtgtacaattctttgtactgaaggaaataaaaatattttacccaagatagatttctttgacagattttcaaatggccctgcaaagctgttttttgtgggggaactttgcattgtggagaatctccatgaatgcagcaaggccttcccttgtccagatctgggagagattaatggagtctgacacctgtaaagatctggaagaaacacttaccatctattttctctaaggggctgctatctgtgagatttcgtctgtataacatgactcccttggctagctgagcctcctcttcttcccctcccatatcctgtcttgccactaaaacctgacttaccaccataacctgtttttttggccatgttctgagcctgcattgcttctgtgaacccaaaatatctgataggtctcaaccaatttagaaagtttattttgtcaaggttaaggacatgcccgtgacataaaaggacatgcccgtgacatagcctcaggaggtcctgatgacatgtgcccaagatggtcagggtacaacttgcttttatacatttcagagggacatgagacatcaatcagtatgtgtaacatgtacattggtttggtctaggtaaggcaggacaaatcaaagcaggggcttccaggtcatagatagataagagataaaggttacattcttttgagtccttgataagcctttcactgaatacacaatttagtctggctcagtgaatctgcattttttttttttttgagacagagtttcactcttgttgtccaggctggagtgcaatggcatgatctcggctcactgcaacctctgtctcccaggttcaagtgattatcctgccttagcctcctgagtagctgggattacaggcatgcaccaccacg

SEQ ID NO: 43251 - DNA, 1678 bp, Homo sapiens
cttcttagttcttgtgaatgcactcctatttgcttaatgctgaattattcagttcctgttccaaaattaacctgccacaaggcacaggtaagcctgatcatcgtgaatctcggtaccctttagaaatattagcctcttctcattctactgtgattctgtattttttttttttacattttattaactttttaatgtcattttgaattctgattctgaaatttggaaattaaaactagtgaccttaatgcatgtctaaaaactatggagaaaaagaaaatttacaagaatagtgatttttcaggtattgtgcaactataagattacagtaatgtgggcaactggcttttgtaataagtggaaaaaaaagagacagtaaacatattcctgttttcttacaagtgtaaccatcatggacaatagcagaaagcactagatgcccttatccactgaattattataaagggctgggggctgggcgcagtggcccgtgcctgtaatcacagcactttgggaggccaaggtgggtggatcacttgaggtcaggagttcaggaccagcctggccaacgtgatgaaacctcgtctctactaaaaattacaaaaattagctgggcgtggtggcacatgcctgtaatcccagctacttgggagctgaggcaggagaatcatttgaacccaggaggcggaggttgcagtgagctgagatcacaccactgcactccagcctgggtgacagagtgagacgccatctcaaaaaaaaaaaaaaaaaaaaaagggatctcccaaaatgacagagtgactctgtgtgatgagctcctcaaactccagtgtccttaccaataccaagcagcatctgtcacataatccgggagattctccaggtggtcaggggacaagagggagctgggaggtggaggaactgcaaatctcctttccctgcatgctctttgtgttccctacaagcagcaccactgaagggcagtggtgggactcatgctctcctgccaccagccgccacctccctattgtgtcccactcagagttacttgacaaggagcaatttagacagttacacgtctttataaaaagattaactccagcaacctctcatccccaagccttttctgagcatattaacctgttgctctgatcccagtcagtgtaatcatccaaaagaccgcccagggtccaaagtcagaagaccaaggccgggtcatccattcagagtgcaaatggctcatggcagtgtacagcccactggttcaggatgagtcacctaaacaagaagagaaaaaatcagaagcaaacagaaaacctgcaagaagcaaacttcctttgaattgctttgtctgtttttatttagaaaaagatctactgtgaacctggcattagaaatggctcatgaggttttccttaggagaatgtttcatattttctgaacaaagttgttgcaagcaaagttgcatattgtgttcgttggacacggtcaaatagagaaatattcataaaaagttttaggccagaagtctcccaagtgatgtgcccacattgaaggaatacactaagtaatccactgtgagggtgaggaaaatattggagcatctgtttatacttattcttaaaatcctatcctttaattaaaaaaaattttttttgagacagagccttgctctgttgcc

SEQ ID NO: 43252 - DNA, 1442 bp, Homo sapiens
gacggggtttcaccgtgttagccaggacggtctcgatctcctgacctcgtgatttgcccacctcggcctcccaaagtgctgggattacaggcatgagccactgcgcccagcaattattttcaatctctgagagatgatagcaagaaatgggcaaagtctcatttccaagggactaaggcttgaggcaggtcagcaaaagagggaccagggtgaaagtacaatgagcacagctgggacgtgaggttggggtgagctcagcagtgaccagccacttgtaggggacaaagggcctatttcttgagaaagaaaggtacagagatatggtgctgagctgctccagtactccaggtgttgccatcctgtgagcacaaacgcagctgcaatcacatccttgcctaaatctcagtggcttccagccacctgctgctcacccaggatcccagcaccccggttccccatcttcccaattccttctgggaatacaggggatgtgcccagggacacagctcctgctggcaagcagctgaagcaaggggctatgccactgtcctgctccccagtcctctgtgagtacaataccctccccaggttctggagtgccttccaccaccaccaggagctgctctgggtctgtggcagagggagattaagggtgtgactctccccgactttgtctcttctgtcatctgaggcatggcaccacttgtatctggaatctcaccaagtttttcatgaggacgatccgtcagcatctgttctggtctctggtttcccattaggtgtgaaactagttccctagcttgtgagggcagcaggggaactccaaaacatcccctctatttttatttcctttctccttgctcaaaggccttcttcctctttcagataagagacacaaaagcacacatgcctatcaatttatgtggacagacacccaaagggcttctgccctctgcagtgcagtttggacttaggacattcttacacaatattatctctttgtccccagatgccaagccaaggccactagaaaaacctctaaataattagacttttatgaaggctaacctgggctatttttgaaggtgcttttaaaacaatcttatcacacctaattttgaataaagatatgttgtggaaaaacttgatgcttacatttggaataatttaaggtgtattacaaaacaataaatgatgggacaattgtgttatgtttccaaaaaagttcatataaaatttcagtgagtgggctgggcgcggtggctcacgcctgtaatcccagcactttgggaggccgaggtgggcggatcacgaggtcaggagatcgagaccacgatgaaaccccgtctctactaaaaatacaaaaaattagccgggcgcggtggcaggtgcctgtagtcccagctactcgggaggctggggcaggagaatggcgtgaaccc

SEQ ID NO: 43253 - DNA, 2353 bp, Homo sapiens
tacgaaacatctttagttcgcaacaaagctctgcggcattcaacagtggatgagagacacctacagcccccgactctgaggtgtattccaaagtgtgaaaatgtactcagtgacttgacttacacattaagctggccgaggccactaacataatacatggcttcttttaacctccagtctcagagggcttaatgagaaatagtctgtcaaatttcaggatttcaagccactgctcttgtttctaagaaggacacacactgtgttgtgcaattagagaaaaccaggctgagctttcgtcatgcgagatgtaatgccttgaagccaaatgatgcagtatttttagttgtaattactggcttgttctccaatccactccttgcccaacgacctcccttgcttctcccaagaatcttaatacagtttcttcccctcaaaaatccaactgtggctacatagatcttcactactcgcccaaccctctgactcttcagtaaaataaagggaggagaaagaaatcaaaaccaacgaacctattttacatatcttcccctccagggaaaagatcttagcaattttctaaaggctagagtgaggtaggaggtgtcaaaagcacccttacctcccccaaacaggcagttttcgacttcaaaaaacagttgtggtaaaaatatctcccaagaacagccagctgtttatttataaatctgtgcgtagggaagctttatttttctgaagtgttttcaagaacatgcatagtgtttgggtgagaggggccagccttgctggcggcgaaccaaagagcagggaatcacaaaagacggccggcggcgagcaggctggggtgacggggaccccgtggataacgggcttgaggacgcccagggcttcagccttttccaggcgtccctcgccggggcaacgcagagcagctgccgttcttcccgcgccccagcagatggtggtgtcagcccggcctcgtgcccggccgccgctgcgcccgcgccccctcccctcgcagatggcttaatcagggctcccgcccgcccctccgcggcccccgccccgcgcgtctgggcgagcgctgcgaacgtggagccaggcagtcaagtgttactgcgtacagcaggtagcctggcaactgagagcacaataccgagcagatggtgttcgcacggcgtgatggacatcacacacgacagcctgagacaatccaggaattccctggtgactcgaggccctctttgcacaaaatgagttctctctccattgccgtgtatctctggggttatctgcccccctcctccgactgacactgaactggtttctcattaccgacttttcttccagccggaggggaggaagaattcaagtgggggagggcgcgggaaggggacgtggagggaaacggaagggctgggagtggggtaggggggcagtggcgacctccggggggggagggtggcggacaccagaccccagggccgacagcccgggagggaccgggttccaggaccccagctgcacaaagccggcccggggagggggcgataaggagcgagcctcgggtcggcccggcaccgctgcttcggctcagagtccttgcaatcgcttggcctacgaacaacctaaatgaaatttagggttttattgaaaaagtcccctggggcctaatttagcctctcgactccagcctatatgcttacaagtcctcaggggactccggctaggaagtcaggagtggggcccgtgcgtccccggcaggacctagactgcctctcggcgcaggcggccctaacaaagaagcccacgaggcggtcccgggcgcgggcaggggcggtgcggcggcgctcgggagacccgcgaggggccctggaggtcctcggcccgcgcgcgccgctcgggagcccgcgaggctgcggtgtgctccagcgggcgcatttcccaggccccgccacatcgtgtgtgttagtggctgggaaggacacgaggacagagatgaggattgttcgtggcaggaaagagtaaaaataaatcaatgcataaacaaaaaggatgccccagaaaacctgtgcttttcagacacacacacacatacacacacactcactcactcactcactctgaattgggtcaagtaaaaaaaaattttttttaaaggaaggaatctttagcccaactgggatttcgacgaaattgtatatatcaaaagatagctacatccaacctctcaccagaatccagaggctttctcctgcaaagatactattgaaagttttattagtaagtttgagaaggcgaaagtatgtatcagaggtgaaagctaacatgacaattgcttggccaaagagcgcag

SEQ ID NO: 43254 - DNA, 1398 bp, Homo sapiens
ttaaaactaaaaaaaaaaaaagaaaaaagcagtttctaaaaacactagccactggatagtcttgttagacaagaattataagggatttttatttttatactttttcaaattttatattatgaatatatattacttttagtattatttttaaaagcttgttaagaataaggctaaactattatggaatgaaatgtagagttcaagaggggcccaggttatgtctgggacctggactatttctccctgagcccaccttacgctctagagggtgtaacagacatgcttaagtggcaggtccccttttaaaacctgtacatggcttccacaactgggcttggatacaggttcagcaactaggtcggctttacattgctgccacaaagagctcctaagtcccagaggaagggtactgaccatcttccaagaattctttggtctacctggacaagcctgctctctgtggcaccacccagctctctgtggcttttctctgtcttaggcttgaagccacagtgcatggccagaaccagccagacctttggagttcaagaactcgagaggtgggtgaaaactgccattgcctccacagactgtcttctccgtggaaagaagacctgagtcaccagggctgggaaacctgcaccactgagacgagcacagcctctgccggcatgcaagtggccgctgtcaggacacatggactgaaagtggtttgtcagctgctccattaggttttttttacccatatgtttgctacctttctttccttgatttaaaaatagggagggggagcagtctcagctgtcttcagctgctagggagatttttttccccctcctgagctactgtttcccccaacccgagcctttctctcttattgtacccaccctttctgatgaagtcatcaaagcaaagattgcataactgatgcataggcctatcttgtgttatactgggagacaggccaatgtttccattaatagacaagagcaccaccacgctgccaaatggagctctctgctgcaaccactacaagacaggaagaagggaagggaagggaagctgagtgctcagggcatgctgtggagggaaggcgagggcacttcccgccgtcatctccagaaccgccacagccttgggaggggggctgagagagatcagtgctgactgcctgagaagaggccttccacaagctgcctttctggtgtccccatgttcttccttccttccttccagaggccgtgagagggagggcccgtgtcagcctgctctgccggtttcccgactgctgaacctgtctgtgggaagctgggtttgactatgtgatgctgaggctctgagaggagggctacccttttccccaccctcggcccccattcctatgagtagaagcctgcc

SEQ ID NO: 43255 - DNA, 719 bp, Homo sapiens
atctttaaatggtcgaactcaacccaaaccaaagactctcaaaatgcctttcatctctgacattctatccataatcctagacagagctaaactctgcaaaaagttcagtgtccaaagttgtcaggcaatactctgcagggacaggtaccacactggcccaccttcaacaacagcttctatggtaactgtattgtcaagtgcaacagaaagacaaggtcatcacaaaggccatagctgttgccagccctgatcactggtcatgatgtgctctccctatgcaatttacctgggaatctcccttatgcatgtgtcacatcattcatagtctatgaggtaaaacaggtcagggccaattccacaaaaacaccacttcctcctagtacagatggtagaaaccctcagagactgacattctgccagtttctaaatttagtcctagccttacctccaaaattaaacaaaatagcaaatacttttggtattgtacttcagaatagggaaagttgtccaatttagcagggatgtgtaaacatttcctttctcatcctgatgtcctaccaggccctttcatggccttttcccattaaattttgtaattttaaatatcttatctaataagtttatttatttacctgggcagattaaatgcagctgaattccttggtctgtaagtgattagcgtaggcagttaaaagcagcctaaacttatgggcaaggtt

SEQ ID NO: 43256 - DNA, 855 bp, Homo sapiens
aatcaggatggcgatgatgcttcctatcatataaggcttatgccttacagaactctgtgatctcaagttatgtaactactagctggctaaagatactgactaaaaaacaaaacagccaactagttatccctgaacacctaatcagactgaaggtgactcgagtgtgtttaattccctcaggctttggaagccatcccgagagggtttcctgtcacgggggacgatttcaaaactcccagcactgcttcccacagatctgtgcccaagcttctcttgatttgtggctgctgtgtagatatgaacgaactgtaatgaactgtgtggttcagatactttttggtacagctacgatagctgaaaggtgggtaacaccctccccccaccaccaagacttggtaggcaatgctgataatgtagtttctggggcacacagtggctgggagttttctggggaccttccaaatcctacctgcatctgagctttgtgaccctccctttggattcttgccaaaatagtccagcaactgctcttccttcccacacccagtaaagagcgtagggctggaggaacctgggcaacggaagacaaagggaattttctacagagagttttatatgctatttccatggctgtgctatagaaatgaaagagtatcattagggtttagagtctaatgaggcagcattagataggccaaggaaaagtcactctatgtaaaatataattatctggagaagaaaagtgagtgtacttggatttagaccacatgagagccaaaacctaattttgatgagaaactaaaattctggctatgcaaaaggcagactaggaagctagaaagcccgacttatgaa

SEQ ID NO: 43257 - DNA, 1148 bp, Homo sapiens
ctctctcatcttcttcatgtagggtcaaggaacaaacaggggttctcaaataatcaaacgaagaaaagatttaaaaatcacccatttcaagatgcaagcgccttgccttgctgcttccaacaggagagcagagagaatcccaccagatgctgcttcactatcggcgctgacgctttctaatgaatctgacccctggctgcagctctaaaagggtgcagcagtgtgtcaatgtaaacagctaaacctagtgtcacgtcaagtggtaacaaggccactgctggttttttacaagcgctgtgcacttagcagataaaaatgagcatcctatcgctggtccccacaagtcacacttatcaacagtgagaagaaacaatgctttgtctgataggtgttgcttggtgccagtgacaggaagttacatttcttacaggctgcccattagcataatgaaaaggcaagtaacagctgcattaacaaaatctttttacatgtgtccacggtgagcagcgcagagcttcctgatgttccctctaataaagagaactaattaccctccacagtgccacctgggctagagacaaccgatgtcaggaaagggctttgacaaacacatttatttgtccaggaccaagtccagggccagcaacccccattcttcctggtatcagagtggagccagatgcacacaggatcaataaaaggtccagagttcactgcaggctgggggcagtacctgcagacaaggcatcccctgggaagactagggcttccagcctctgcaggggtgatgctttcagagcccacacggagtacagatcaacctgggcactgtgacctgatattgggttgaagttcccatctgaaacaagctgagaggtttgaggatgccaaacaaggagtttaaaagggaaggttgttttattcatgcgaacatacctgctttttaataaaacaatgttaagcagataactatttgttgacattattatcccctgattttacatacaaggaaactaattatggaatgggtaagtgactgtatcacatatctaaaaacagaaagagaagagaactcacgtttactgcattcatgagcatctactcattatctagtttaattcttcccacaatcctagaaaggaggcatt

SEQ ID NO: 43258 - DNA, 825 bp, Homo sapiens
taccttttgtctaaacaccacacatcaaaaagagctgaacagaaaggtatcaagcaaggcagtgtaatagatttcactgaagactgaccacactgccagatttgactacatgaggtttgcattcacatgcttatcagtatttaaaaataccctgagtgtacacaacagaaaatgtcaggaacttgaaaagcaaaaatatgcatgtggtgttttccagatttcagcaaagcacagtaactaaagaaacttaattatgtgatcaggcagcagttacttaacctttccagacctctgtttcctcaattataaaatgagagggttggactacatgatctccaaggtttgttccagctctaagagtccctatttggactctggatacaaatcaataacttactttcaaagtcaccctggaaggcactcttaactctgaacttggcaggtagttaccaaataagatccttattttacatcagagaacaagaattcattacattcttctgccaaggtttcttgactttggtaaacatgaaagaaaaattacacttgaatcctaatcacaattatcttttataaaaatgccagaaaaccaagtgtttaaattacatgactcattcaaaagaatttgtgactttttgatggcccattgggtgtcaggtgttgagctgagtgcagaggatgcaaaagatgcacaagtctcctgatttcaaaggaatttgtaggctgttgcatgttttaattttcctcctgtctattggaaaatgctccccttcatgcataacacttgtctgacacagacaacaatgttgtatcccattctggcaa

SEQ ID NO: 43259 - DNA, 806 bp, Homo sapiens
tcaagcctagaacagtgtctggcctagaataggggcccaggaactatttgtccagtgaatgaaggcatgaatataatgaaaaaggtgtgaagtcattaacctcacagattgaactgcaaagtggagggcctagaggttatgaaaacttggactaaaggaaggcaatgggaagaaaaaaggagctgactaggagagacttcatcaagaaataacaaccaggggctgttaactatctcagtgttcaggcctggattaaaggaaatatattcaccatgggaattaggagaatgttaggggcaaaagaggaactgaaaatgtactgaaaataaaatgatgcatagttttataaacaaatatcagtcagatttaacttcagttgtttccaaacataattgattgctattttcttcctgcttacatttctgagaatggctaaaaggaaactaaaaaagaaggaagtgggaaatgtgtaacgtgccatactttccttttaaggcaacttcagcctgaatgctgggcaaagcctcccacatttcacaatttgttctctatcagctctcaggaacacaaaatacaggaaagacagatcctgttcttctggttttttttcttttcttcttcttctcttcattatgttttctcctcccccaaaaacagtaatcagagcagatgacaagaaatctttttaacatcagccttggtgtaataagcatcttggaaatggaaaaagcaagaggggatgtgatgaagtctttaccagtctgtgcagatgttaagactttactagagccacagcaagaaagtac

SEQ ID NO: 43260 - DNA, 3436 bp, Homo sapiens
tttttatgattttatgttttaaataaatgggcttagtttaatgttttgtatataatgttttgggacatagtgtttttaacttattataacttatgtaactaatcccttaatgttggggcacatatatgttttctcaacttttcataattataattaacacagagcagtcataactgacaataaactagaaataaaaaagacaagaaaaatgaaaaaatacttaaaaataaatgaagtcttacaaaacctctcaattcaaattgctaatatgtgcaaaattagtaactgaagaataattttttttctcttttccaaattgttgtttaaacctcaacctcttgacaaacttgggttctaattgtttttctgttcactaatcttttaggttaactctgccctccgcccacactgaactactttcagttcccctaactgaccatattctttttccagggatttggatatgttttttcagtttagaaaactctccctacacaacactgacaaaatcctaataaatctttgggcttcaaagacactttttatgtaaaacctttgcaggtccctcagaagcctgagtgaagtataccttagtcaccctgtaattaattacttcaccatattacaatgatctgtttacttgtctgtcttccccactagacccaaagctctttgacaatgttttgttcactatttatccccagcgctgagaaaacagcctgacccatagcagatgctactctataaatacctaatgagtgaggaatgaatgcatgaacaaatagactcttaagcctctggcctaggaagatgggcagctcctcattcacccagatgactggatcttgcttatgaacacggccaacaacataaggcagctctctgaaatatatgttagagcctcaatctttccactgctatacaatctaggaacttaggcacctttccagaaaacaacacctcatctaagaggtgtctcctgagagctactcttggaagcaccgaagtccttttcacaaagactgcaaggtccttgaaaagatacactgtgtaacttcagtgtacaatgagcagctgggagtgttttgggcgaagttggtataaaagggtgcctttaatacaatatttaggtaggttgacctgactgcctaatttatatgacgaaatattaaagccctgggtactgtgaggatttcctagtactaaagtttgtccttatgtttccatctttctcagtattgagattacaaatcttggaacaccagttctgagggagcttggtagtcttcccttcaacaaaggctttaagacacaggacatatgccttgttttctcaagtctcatttcagaagattcttcccactgcaaacaccaatgctattttttttccctcctgacctttgtcaactgtgttgctgtactgcatttggaagtattacaatggtcattacctgccctgtttattcagtgttaagtattaacaaggcctgtgctatctcagctgctgtcatatttctccagaaaagaaatgcctatgtaaatgtcctaatgcaaacaaaagactctttttctaggtgggggtggcagaagacttggagacaattgaaaagatggaagaaaacagtagatattttaaaagaacagttttcagaaatatatgaaataattgcaccatgaaatctaatttgaggctgatttttttttttgtttgtgcatttggtcagttctggcctggtatttgctcatattgaggctataaagcacatatttctggatttatttataatgacttcaaatagtttgatattgagcaaaagtgtataaatatattacagaataaagagaaaaagtaacccttggcatcaaactctctttgtttagggtttacatgtttggtttcttgtgtggaacagctatgtcagagtgggtgggatcctgtttctgagggaatggaagagtgctgacaatattttcttgagcacaaagaagggtgaagagtcttattaaaactcctaccagatactgcttgttggacagtgaaattgcaaaacttgcaaagaggagggccaaacaccatgcagaacagatcaaatacaaattaaaaaattgacttggggaagaaaaatctttcactagagtcagcttttctgtagaaattggcccgttctcataaatttacctaagtttgtgcttgggtcagatgacaaagcaaaattccatcctctgatagttgcaaaaaactgccagtgaaacaaactgaagccaaatacatacttcctagatgacatccgatccagagaaacaaaggtgtaggtcactttttcatttttaaagtacccaaggagttacagagagatgaaaatagacaatacgtggagaaaagaagactgcttctcttctgtagctatagccatatgaaataaaacaactgtacctgctgggacttacaaatatgtgtgttatttaggagaacgggctctggagttacacttgcaagctctgaatcccagtttaaccattccattactgtgtgagcttagataagttacttaactatttttaattttctaccttttagaagtgagtatggactacttaagcaatagaaattaactagggctggaaaaaaagaatgatttgctggaagtacttcagcagcataacctttatgtaagaacaaatatcatcatttattgagggcctacctaatgtgtgccaggcattttggatacactattctaatctttatacatccctgcaaggttaatactattattcccaatttataaggttcaaagtagctaagtaattagatctacgtcttgaagctgaaaagtggcaaaaatatctacccatattccttacctaattttttttccttatttttaaaacaatgacccaagaatttctcttccctctctgattcctttttctccaatcctactcaggtcataactgcattgggaatctcatttctttcttctttctcttctttatccagtttaacgttcctgaatccactcaccaacctcccttcttcctccgcttcctggtgccactgatcccaatccttcctccagttttgtttggcttaagtcctgtcctgaatcccactgccccatcaggtccaccccactccatcagcactgtcatcataatgagagcaaatacctattagcacttttctacgtgtcaggtgccttatgagatggataccattattatccccattttagagatatgggaactgggacaccaaaaggtaacatagcctaccaggacacagaagtagcagagatggagtgctaacctcaacagtctggctccagagttcttggtccagccctactctagacggtgccacagccctggagggacccaagggaagttgcaaattccagcaagtgagtgtgagcatgagagaggaggacctgtt

SEQ ID NO: 43261 - DNA, 323 bp, Homo sapiens
gttaggttttaacacgaatccttagcacattattatctttctgctctaaaactggagtttgcactttaaatagagatttcaataaattaatgcattagctacaaagaaatggactcaatttaaatgactaagcaagtgacctgaatattatttcctttaaatagcctgagcaacatgaaaagaaaatacaaaaaggaatctgagtaatgccctatgtctacaagattccatctaagtagagcatgtctcccacaatgtgactcacaggaggcctgcagcttcagttttgaacaaacaaacgcacgtcttcattcagcacaaag

SEQ ID NO: 43262 - DNA, 1069 bp, Homo sapiens
aactggagccccagaaatctttgttttcattccaagttaccatgaagaaatatgatggctcaggttttatacagtcaggagtgacaaaaaggcacgcacgtttgatgtggacttctacgtggtccccacaagcagaattggattgtcaaagctctactcatcttccctttatttttcctgttccctcagccaccagcaccaaatcctagagccgtatttcatttttcagtgaacaccctgggaacagtcatcgctttttacaggaatcggactcaaaagaaaacacagtccctaagtaagttaaacagttcagtgcaccaaggagatttatcagagagagagatctgcctaatgaaagtaacctcctaactacgatatgggagactgcattcactgtctagtcaaaaaacatactgcctctgatacaggaggaagacagcaatctagcacagctaagattggcaggaaacaaaatgctgttcttagaagttctggtatgaaagaattctgaaggatttctgtaatcaaaacaatgatcaaagttcaccatgatgcaagaattccagtacgtcaactcaaggcaagtaacaagaccaagtttgcatgcagttactaaaatacaaccttggccagtaaaaatttgtgccaacctagacatagttttcacctatttaatgaaaaataagaaaatatgatgttcagaatggaaatggttttcatgaggaaggctgttgcttctctcagaagcggtcaccttagtccaaagcttgttacttagacttcatttggtgttggcagaaattaccactaactggcaaaaggaactgagaagagaatgacaatatggtgcctgtatatgcaactgccacagagcccagtgttttgacattgttactgaaacaaactcaactatttatgagagctacattgaatcagacagttggtgtggcagaaaaaaacatctgtttctgaagtctttttgtctagaaagtcactaagaaaggaggagaatgtacagcaatccccaacacaaatacctccaaaaaaccataaatagcattgtcaagta

SEQ ID NO: 43263 - DNA, 5085 bp, Homo sapiens
tgtttctttcttttttttttttttttttggtacacagaatttacttgcaactctgcttaagagttaaggcttacattacattcatcacactcatcacacataccagtgagagatgcatgtgaaacagctgaagctaaaatacactcctattctgtacacagccctggcatttattagtgcgtaagtctaatcaacaggctaaatcattgtcataaaatgacagaaaattttattttcacgcagtcatctttcaagtctatttgttgctaatttgctaaactgggattcactatgaaatctacagctgatgtctctgtctattgaagcaagcattatctttctattttcaaaagtaagctgtggcttgggcttgctgtcttcttcccagtaaggtcaggaggctgggcttgcttccacctgcgagtgtatcacaaaccaggcgcgcgcacccgagccctccctccaccagggcggaaaccagagaacacaacccaaacaccgaaagtttctggtcgcaaactctactcatcttgccgtgtccagagacccggcactgggaacggcactggcttttgttccagggtcccccagctggcgaggtaaacgccacagcagtccttgatccccaaaggttgtgagagattctgtggcacgggaattttggagcctcccgaaaggagcccatttctccgcaatccatgcgcgtggggtgtacaaatacacgaaaagaggacgcggggtgggcaggcatgaaaccttcagtgcctcttaaattctcagtctcaggttcacaaagtgaatctcctcctccgtggaagggcgctaggggggcgggggctgggagagaaataggttggagaaagggaccggagctacagtcgagatgcgggaccggccccgcctccggctacaatcagaaaaactacagtgtgtcagtggttttcggtttcctgtttgtaaagcgagaacctcccccgactcgaactgtcgttcttcctcaaaaccaaccgagacggccccttcttcgcgctcggggcaggctcagccgcagggggagcggagaggagggacgcgggggcatggggggcgcggcggggcggggacagccgcgatgaagcgggcagggccacggggcgcagcacccctcccagcccagcggccccggggtctgagctgggccgcgaggcggacaaagcgcctcccgctccctcccccacggccacgttccaaaagggaggaagaaggcgggcaagagtggctggaggaggaggaagggaggaggaaggggagggggaggaggaagaggaggagggaaggtgctgccggcgggactgggcaggatcgcgccgacctgggaggggagggaggaggggttgagcgcccccggagaactgggaggagggaaggattcttgaagcccaagataaacaaattgttcctcttcacgtgcggggtggggggacgtggggagcgagcactgcggcgtcgcctcccctcccccaagccgactctttgtcaccgagcgccggcccgagcccccggcgaaagcccacggcagcactggcaccaccccggcgccggggactcacagaccgggaacgtgtgcgatttctaaaccgcacgacgggagggccgcccctgccgggctctgcgccgccgatcgctgggcggtctgcacgggaaacaggcgaaggcgcgcggccccggcacgctccaggattcccgtcgcctggcccacccagcacccgggcggcgcggtgcggggggggggggcacacacctttcccaagcttccggcctcccctcacccagaaaggaaagcaaaagaaccggagaggggagataagagaaaggattctagcctccggcttggggggtgggaactgccccttcctcctggagaagttaagccattggctgctcatcctacctcgaacccgcccacccagccatttaagcctcttttacctccctgctaccttccattgctctgggcttattaagcaggcccccaaagttggcgggcagcggggcagggggcgccaagcggagaaagactccgtgcacgcaagtttaaaaggaaaaaaggaaagaatcccaagcgaagttgtgtggtggggcctcttggcgcaaaccctgggtattgctttcccctcccgccccctccaggccgctcccctcttaaccctcccagccgctccacctgccgggctagccccgagtcgcgagcaaagagcggagcgcacccgcgccccgcatccgcgcgcgctcccgcgagcacccccgcgcgcagccaccctcgctcgtttctcacccacttcaaagttcattcacaaaactctcagactttctcagcccaaagggggtgagctggggagaggaggcgagaggctctccttccccgcttcccccctaggggttgagggcctggtgcccgcccagaacctgcgacagcatcaatatttccacgcacccggcggatgtgctgagaggggtgggcgtagggggacgggtctggggaggcgaggcggcgcggctagaggtggggtggggagcggcgaagaggaggagcaaggtttcaactcaggggttcactctttcaaatcggtatcttaagaaagggaaggggggaaacttttccagcacctcactccgacgctcctctaggctccctccgcccctcgcagtcgtgactggcttctcccctctcgccccctcctccccaaatctgacaaccctgacagattaacaggtagcgacgacggcagctttttccctaagaaaagttgacgttaacccttaggcttcagcccacctcacccaccgtgcaaatcagacccttgtacccccatgtaagaagctccacgcgccccccaccaccaccaccacccccaacgcgcgccgcaagcccgctgcccgtgcgccctcaccatgatcagcgtgtggttcctctgctccgccgaggcagcctccgcatcttgctggggtttgctcgggtgctgctgtttgccggtgccggcgcccgatttcttggccctctgctccagggtccgctggtagaggctcacggtgtcccggcgctccagctccagctgctccacctgagcctgctggtacctgttctcgcagttgacgtggtgccgacggcagccctcgatgcgctggcggagccgctccaccacggtgctgtgcttgggaacggccgccgaaccgccgccggggcccccggagccgccgcatccaccggctgccgggtgattgctactcggagcagcgggagtactattgggagtattattcacaccgatcccggccccgccgaggctgctgttcaggctactgttgatgcaaatactactgccattcgcggcagcagcgggggctgcgaaatcccccatcctgctccccgggcacactattttggaagaactttttttatccacccccctatcagcctcctccttgggtccaaggattaaaatagtttaagtggaacgcgggggagacgcaagcacatggatggaaacggcgatcccgacggggcgaaaaaaacggggggggagattttggggtggtttttgtttcctttttttaaactgtaaaagctcaaggggaagaaaaggggggaacgttatcggaataccatcagacacctatcaacaaaaagaatcacaacaaactgagccagcagcaaatcgggttgcaactcaaggggagatccgctccttgcttgccttctttttataatccattattttctaataaattccaggagatttccggtggttggcaagcattttctccctacataccgaaaaacacaccccatgtacacacacaagcatatgcctccagtgcggacacgcgcgacacacactcactccacaccgcatcggaaaacggcaagcttgcttattgcattttccttccacaaaaaagttttggtgtttatgccgccccgtgttctcaaagtactttggctgctcagttgcatttcacaggaacctagatatcgaatcctcgggctgggggaagtaaacacatggacagtccgaggcgactgcaaaagtagatcggtgaagtcctttgcaaaacgccgcgcagagagcagcacctaacgctcggctgggctgccgctgccgccgctgctcctgccaccatcacaatgatcaactgctcgccgccgccgccgccgccgcctcctcctcctcctctcgctcctccacctcctcctcctcctccatgccagcggagtgatatcaggacgcgcgagctcagtaaacacggcagcggcggcggctggaggccgtgagacaggcccgcggacacggcgcaaaacccggcccggactctcacccggcaggagcgggcgcggcacgcaccagcacccggctcccgtctccgtcgcctcggcgcccggcgcccctcctacgcccccaaccacactaccgccccgccgagaagcccagagccgtcggcgacggagagaagaaagattctggggggatctcagaaataaatcaacttttgacctgtgtgtgtgcgtgagagcgtgtgtgagtgtgtgtgtctgtgtatgcgcgcgcgcgtgcgcggggacgcgcctggtagggtttccttattccaaggaaagtatcaagcgatcccaagttgttgttatacatttatgcattatattgcagaactgtgcatgaccaggcagaaacattgaagctttacagcagttgtctgtcatccctatccatgtggaaagaaaaaggcaaatgagtgacttgtttttaaaacccaggtaataagtctgcgctagtaacagcgctacttacggacacttgttccaagtctaggccagactgaacacacaaataccaaattctaaataaatagaaataggcatcaaaaatgtgtaatatttaactcactgtacataatgattgttgttactaagtcaattattgttttacttacccttggaaaaaaataaagcaagcagggacttggaggtgagactaacagtacatttaaacagactgttttgaacactaggtgctaatgacagcagtaattaaggtccttcgtaaatcaagt

SEQ ID NO: 43264 - DNA, 525 bp, Homo sapiens
tgaaaaatattatccactacagttaattaggtaataatggggatttatatgtcatctttcattataagctattaaacaaagtcagagggaaatgtctacttttctggtcagtggtctgcccttttggtggccaggtgtaatggtggtaaatcagaggcaaatagccaatgagatagccctgatattgccattccctgttaacagaggaagaacatgaaggagagccttacccaagaccatacagcaaatcaaagctgaagggaggctatatttgcaatgcgtcaggctgtggcctcatgctatttatttactctgtgtttgggcagttctgagataatgggatggatcagcatttaaaatagctttgccactggttgaagcttcatggaagagtagagaagagtgtgtgctctagatcagacaaaccttgacttgatccttgttctgcaacttactggctaaatgactttggaaggttacctgaacattggtttattcatttgcaaaatgaggctaaaaaaatat

SEQ ID NO: 43265 - DNA, 1247 bp, Homo sapiens
tgtgtgtgtgtgtgtgtatgtgtatgtatgcaaagttgaacactaaatcttacctacctcacacagttcctgtgaggattgaatggaaagatagataacgaacccattttgaaaactgtaaagcagttggcttaaatacattagagtattttatgatttttattatgctcaaagtcacttacgaagactgatttctagatccgtatttttttcctaaaagtttatcctaacttggaacaattgtaatttattactatttattaacagacatgaccttagttttgacgacaacccttgctaacaataaggaaaaaacggagccctggtttaatagcactgttcagcttttctccttttttgaaaagctgtgcccttacaatttgttgcagcaaggagaagggctgtattgcttaataatggttctactaaagttcaccaaattgtacttggtgttctgacatttattgcttacagaatatgtgttttccacctggccttattaaacacacacacacacacacacacacacacacacacacacacacacacaatttgcttggatatcaaagtggccatcctagtatggttagaacaaccagagaaatcagatttttctgaaacttcagggcttcaagagctaatctcaagtgacagagttattgaaaaattttgaccaagagaagaaccttaccttagaaaagcacaaacattttgtgtaaataagctgtctccttcctctggcaaggttgtttatgcttagtcattggaaagtttccgatgaactttggtcaacatggctcagtaattaccaagacattgactacctacagcctggatcgaaaaggcaaagcttgacctacttgtagcatggacccccaaaagcatcactcaaggtgatgagatgctttccttggaacgctctctctttatttcatggccacacctagtatagcccctctgatttcaggtctgctctgccccaggaaggaccttgagttggacagtagcagagaaacattattgagctctccatgcattattcaatgctgtacaaacttccatttctttttttttttttagttgaatatggttctttttttctttttttttttttttactttaagttccgggatacatgtgcagaacgtgcaggtttgttacataggtatacgtgtgccatggtggtttgctgcacctgttaacccatcatctaggttccttcccctcaccaccccctgaccaacagg

SEQ ID NO: 43266 - DNA, 1313 bp, Homo sapiens
tggcagcaacaaattctctgaaggaagtgcccacacccttgtaagaagagggagcagcccttctctctctcctgtggcttccagaggccagcgctggttctggtccggtttctcctctcgcaagagactcttgcatgtcagtcagagagagctggttctattgttaatgggaaggtgcctgctttcacctgcagctgccttcatccgactggcctattgtctgactggtgtgaccaccagcagaatggcgtgtcttaggcagtagcactaggagccctggcttctggtcagcctctcagctgaggcattttgtgaatgtgtacagagagataggggtaggaaacgtgaactgccctcggctagcatgaggctaaaagacaactgatgttgcttaaaaaaataccagtgaaaatccaaacaagcctaacttaacttccctaaggagagcagcatgtgggcaagagagctgagggttcgtccaggccccgcctcagagctgcgggttcattttggggcctcagtgatctttcaggcttggctacaaggatgactctgatccaaaattaggctttgaatgtgtaacacaaggctcttggccccacccaccgcctctctctgccctatgctgtttctttagagcctggctgtgggccagagctggcccttctggctcttgggggaagggctggccacagcgttctgtttccaggcagggctttagcgtgggtgaaggtgcatggcgcaatttgggaagaggaggggagatcaatacacttggaaagggcacccaaccctagaatcaccagccccgtcaatctaaagctggagagggccctgcaaggggcaggtgtgccacctggggctgccgcattgcccccacccacctgtgcctcccagcccaggctcctaatagtcccactgagcgccagccaggccaggaggactgccctgtcatgcccaatagcagcctccgaggtgggaagcagctgggagtctgctgttgaaaaggagctgctcattttacagggcaatttcccagggatgcctgccctggcagtagtggctcaagtggggcagacaggaacatcttcgagaagattcgttctttctgtctgagcttgggcagtcatgccatggccagcagcagccagctgtctattatattgggtttcccatttgcagacctctttgtttcagtattaaaaaatctcgggaaacttttctggctgagtggtactgggcaggtactcgggggcacttgctgggaaggaataatagcagacaggtttggcaaatgggatgcagagaattaa

SEQ ID NO: 43267 - DNA, 2718 bp, Homo sapiens
gtgagtcaggaattcagggatagcttagctgcatgattttggcccagagtctctttaccaggccaagctgttggccagggctgctgtcatctgaaggtgtgattaacattagaggatcctcttcctagaaggctcactcacacggctggtgagttgctgctggctgatggtggaggcctcagttccttgaaacatggaccactccaagcaactgcttgagtgttctcatgacatggtgcctgactttccccagaatgaatgacgcaagagacagcaatgtggaagccacaatgcctttcatgggcttgaaagtcacactgtcattctgcaatattcacttggtcacacaggttagccctgcttcataggggaggggaatatacaagaacataaataccaggaggcaagggtcactggaggtcatctgggaggctagcaaccacagctgcctattggtcctgccactgcctctgggaatcagtctgcccaatgcctgaacagctatataaatccgatgctcacggaaattctccagtatccttttagagaagggtccacagctcctgacctacttgcctcaggtgggtgctggctcagtcccttgccctagccaccacacctctggctgggcggcagtgtgcatgtggggacggctaggaaggaggccctgatgagccagacacacaatcatggcttagaatgcgactttaaagccaggcccacccccagagactcttcgggctctaaaatggccaactaaacctaagtaagtgtctgagttacacctgtgaggctctggggagaatgcggcctcactggatttctgctcttttcctggagggaaataaccttgctgactcagatgggagtaagaagctgttagcagttgctgggttcaccttcgatggaaatctggaaattccaatgaaccaccatcattttctgcaagataatctaacctaatttcaactgtaaaatttaaattttcaaatgtactgaagagatagtacatgccaggcatttatacacagtatttcccttaatcatcacaaaaaacctgtgtagtaggtatcaggcccaccattttatagaggagtgaactgaagccccagaggttaaactcccagctagcaaatgggggagccagggtctgcctcccaagcctgggtgatagggctctgtcagaactctccaaaagagaaggggcataaatcacaggtctatccagggagcggagggagagggggagtgccccacacagtcacagcagcagggcaggaggaggatgggggctgggggcagcggaggacagatgggagctcctgttaggagccacgtttcctcggctgggaacccctactgctgagtctctgcaacagcgatgccaggtctgtctcaagggcggcaaactgtgcctctccctcctcctgcaaggagagtcgggttgttcataatgataggtactctatgccaggcttcctgccaagttaagaaccactttttaaaaatcttcacaacattcctaggaagtaagtattattccccgcatttgatagctggggaggtgcggagttggggactttaggaacatcctcaaggtcacagagctccagggtgtccatgctcacgtttcaatccaggcttctgactttagggccagcagaactctttaacatcatgttccaccaggcagaggttggggggtcaggcgaccacatgggccgttcatctttgcaggaactgacagcgttagccccgacacagagggcatgggccccgcggctccaccgggaagggggctcgcccgccggcccgggcaccccctggtggggcctcccgctctcgggctcgggcagaacccgctgctcaggggcccgcggtcaggtcaaggaatcctcctgtgggcctcggcattcctcgaggggagggcgactcccgtcgggcgggcctgcgctcggggtgggtccgggctccgcggccgggatgggtgagctggggagggaggcgcccaggctcgggcaggcgtcaggcgccgcggcgcgtggggctgtgcacgcggtcaccattttcctcctgctggtctgtgtgtccctccggcgggagccgaggccggctaggccgcagcagccccgcgcccagggagagaggaggaggggaagaggccgagggcgccctgctcctgggtcgccgaagccccggaggctttgtgtattcggaaccggattcaccacctcccccgccacccccgcctcccattcccgctttctttttccctgaccgaagtcccagtagagtatccagcaattagcacgcgaggagggggtggaaggcggcggcggcggcaggggtgggggcggcgagaccccggctctgggctcggccccgcgctccgcctgcgctgccttcgtgcgccacctaccggctgctcggggctgctgcggcggccgccagagctgttcctaggcggatcttgatctccgtggacaatagacaatgggattttttttttggaacaatgatttatttttgggggtggggataaggaggaaggagggagggagggaggaagcagtagtgtgtttgtcatcgctttagaaaaaaaatctctgttctatcattgtttctgcatatccattatattgaggacaaaagaatcccgttctggaacaacaaagccaagggaaatgttttctgtggctgacatttaattgtgtgcac

SEQ ID NO: 43268 - DNA, 2628 bp, Homo sapiens
ttcaaatctcatcttaaagaatatcctcacatcatgttggaatctggtaaatgctaaaatactggtgactcattgcttccccaatgtccttatttggtagcatgcaaataaaaatgatcattttcagatttagattttctcaaaccgtggtgcgagcagctatttttacttttgcttcagtcaccattctctgtagtagaaagtgtatttagagttgtaaaaactgtttttccatttgcagcctaaatttaaatataggatacagccaccaaagtactctcctggtcagatacaggagtcacgatagtgaaatccaggacttctgacatgtagtcctcatttccatccatttaaggactccatatcgctaacttcacaagtgcttcatgagaccatttccatagcacttccccttaggacacctcaattgacttgcagatgttctattgctaattctcttaacagttgtatttgagagtggtgggtccattggaaagatatctgacttgcagaaagtgaaacctcacccagtcatctgccttctctcttacaggccatgggacatataccctgtacttggctccacaagaaatgactgatgtcaccaaaacatgagcaaatcttagaaccctaatttcccaatagttgttgtcctgtcccaccaaaaccaaaagttgggcatggtggctcacacctgtaatcttagagtgtgggaaggccaaggcaagagtatcacttgaggccaggagtttgagaccagcctgggcaaaataatgagacccccatttctacaaataagtaaattaattaaaagcccaagcctgctatcacatttctccaggggtcagagctggagtttacctcctgctcaagacactggctgctgggtcagaggagattcggacacatcacctggtttaaccccaggactctatgtgaccttcatcccagccctgactcagcagcctgccctgtgactaacttcctgtgactgggctttcagatgttgatgttgatgatgtccctgccaggataaccggtccagattggccagctgtgagaataattcaagtgggtttcaggtaaatcactttctgatcaccaatctctttctctttgataaaatatcctgtgtctcttggggccaggttggtggcactaactcactggatgcttatgtttatgaggcttttaggggtagttagatgaaccttgccagttctcctgtcctggctgccctctcttgtttcagattttgtgatggactggaacacttagacccagaatctgacaccaaagcctgatgaaacatggggcagtgcctggccaccgaacctgcccccagagcaggtggctagaggcaggaaataaagaggatgctggtaggtgttgcaccttaggcaacagagtgtgctctctctgcctaaagccacctgccctatacccatcccagatgggggcttggtcagtggggcctcctccacctcccctccccagactctaccatctttactggggactttggccccagtaaattcttgcaacatatgaaatgcccagtggaaatgcaaaataatcacgtcatctttcacacatttatggtatgttggcaatgtttctaatagccactaagggacaagagtttatctttctatcttacatctcataaatctcttcctttttttcatccctagtgtaaattgtgcttagaccaataacacatttaaaattatagagcttttcatcactacggagatgctcttgcctatgataggaacgatggctacatctgaagctgagcaaatttatcttttctcttcgtctgcatcagggtgacctctggaaggtaagtgaaagattttcacttagctgggcacaggctttgttcaaggcatctgcttgtaagagccagtatttaagggggaggtttgggcctaggggagagcctggcaatctgtgtctctgttcttcttcagagtttctttttcagactccaaactgagggcgagtcatctgagctctctcacggcggtgaggagcctgggttgtgtaaatataggtcagttatttaacctgtctctgcctcagtcttctttggggataataatagctctcataagttcattgtgaagattgaaagcatagaatgtgtgaagagctcagcacagtgcctagtgcataataagcacttttaagtgccagccagcatcatgatcatgactgtttctatcctcccgtttccatgtggcagccttttgctttgccaggtccctagaactgctggaggaatccatacaccagagatgtcgctgcacttctggctacagtgccatgactcttcatatcagtctctgcctcttgggcaaggaacaagcacaggcggaattggtgacaagctggcagaaactccaatcccaggcatgagtggggtcctcagacagttcttgcctcttctttccactgctgactgctgttcctcacataggtcgtccggctgctcccactctcagcctgccacacctgcacagcatagtggactgttgccagagcagtctgcggaggtgctctttccaccctccgccaagcacttgagctccattgagtctttctgcccacacagctctagag

SEQ ID NO: 43269 - DNA, 791 bp, Homo sapiens
ccactgacttctactgatgcttctttaatctccagctggtgtggttctcttcctttttaaactttagatatccaaccaacattttctgagacattttgtggtatttcccttaggatactatataaggaaggaggaagaaaaacaggagtttgacacagaactaaagatcattcaatttagaggtttttgggagaagcaaactgggatgggccctgagtgtcattgcatattcttgctggtatgccaagaatacagtcaacccaggctttactcaggtatgttttcagagagcaactttaagggatgaggtaatgcctctctggttaaagagcaagcttgcttccacttgccataaaagccaaagattccccaaactcaatgttcctctcctatattataacccgctgcatgtataggcatctacaggggccctctgcctcatccctgtgggacttgggggacataggtaacagcaacaaatcagcatgaagctcatgatgagctgggagtaagagagtccttagactctgacccagacatctcatgtcttccgccagcattcatgaaacaggcaatcgttagcttgtaagtgcagctgacctttgaacaccatgggtttgaactgcatgagtccacttgtatgcatttttttcagtaaatataatggaaaattttttggagattgtgacaatttggaaaaattcacaaacttcatagcctagaaatatataaaaaattaggtatgtcacaaatgcataaacatatgtagatactagtctgtgttactatta

SEQ ID NO: 43270 - DNA, 1887 bp, Homo sapiens
tgtcagcaaactgtgccagaagtaaaaagtcaagaaacagggagacataaggcttgtctctacagcttaggaggctgtgccaaagccaaaataataatgtattgctgtggatgtctaccttgtactcaacgaatattaaagcaggatgccgctttgtgtcaagtactagattacgatgaacggtgtcacgaagaacactccactcttgataccgtatatgtgaccttgagcaagaaatgtgttcacgctcaggcttcagttcctttctgtgggttgctgtgaggctccacaggggtaaggtaagcacaagtgctatgcctcagtaccactagggtattttctcaattctaaaatattaaatggccacgcactacagatttaataatagtttcggaggaggggcgtgaggagaggaacattccactagctcaactataagctttccgatttcggaaataagaaaaatatgaaaaagtctgcttttagaattaaggaacgacggtgtcgcgttgactttctctgcttggttcgcaaacgctcttttctcgaacttgaatgacttctctgtcgctcataccaacctctttcctgaatgacttctctgtcgctcataccagcctctttcctgattttccacactgggattctcactccaattctcaggtttcctgatagacctgatgagccgcttcaccagcgccgcttagcttcgcttctttactgtcattggctgtcgctgttccaggtcccgcccacagcgacctcaatcctgattggatgtcagtgtccttttgttatggcaaaggtggatcccggtgctttgagattggacgactggggtgaggcgggcagctaatgcgcaggcgtgtattctcgagtcaggattggcgggcgagcggctgggacgggatgggattcttctcacggcgcacgttctgtgggcggagtgggcggagctgccggggtcagttggtccaagtgtcccggcctgaggtgtcggccggatccctccttctcccggcgcctcaagcggaaggtgagggccgtcccgggcagcggagggcctggccccaggcgactagagctgcatcctcagtacctccgagggcctggagggcggggcgggctggacgcggccctgcgcaccgggggcccgggaggagcggtctcgggcctgggcatttggtgggcggcggaggcctggctcccggcagaacccttgcgcgacctctttttctcctgttttcgttgtcaggcccaggcgttctttgggagagggacctctcgcggtccctgacgcagacatcgtgtagctttctccccgcagctcctgggtcgggagccgctttgcagctctcggctctggaattggactgcgggaggggcgtttgggtggaatgggacctggcacgcctggaccttcccgtggctgctctgcgagagcctgagagatgggaggggaggctgaggtggggagggagcctagagagccgtaaaataaggattggaccatttttccaggcggcgaaagcggcacctgggtttgtttcctgatcgtcttctcccccagagtcctgctgaacaagttttgggaagaaaggtttggaaaggagaaagaggatacattcctgaaaggcagggcttctgttatacagtgtgtcaacctcacactattacgcaacaataaggacagatgccattccaggttgccaacacgttttctatgcccgaggacccaaagctgtgcccatgtattctggtacctctattcctgattaaaatcagtgtagctagccattctctgagagtatagcttccatttaaatcctcatttggccaaacagttccttgatcttgtggaatttgaaactggatttatttaaccag

SEQ ID NO: 43271 - DNA, 2027 bp, Homo sapiens
gaagatcaaaccaataagacgtgaaggcaaaactccaaactgaaaacaggtcaaacttacaatgacccaaaggagggctacctcgagtgatgtcgacatttgtaaaacaagcaaaatcatcagatgagatcgggattttgcctgcttttaagcaacaaaaagtttatacgttaatgaactcttttctaatttgagacttcttcctgtggccacgttatttaccttttctctcccagtcctgagctttggttgccatttgcttttaactcccaagcaaacacctcctctttgttgcttgggcagatgctataaataaaatcagcgaaagtgtctgattgatggtaaacaggcctggggcgataatgagtctagtaattagggcctctctggattcaacccagccctttcgcccgccccccggcggcgcacaatgggctctgcgcgggtatcgagggagcggccaacagtccctggccccaccgccgtgaagtggggtcccttcgcttccacataggtggagactgagacagccgagcctattttgatctcgtttgggtttctgtaaggagcagtcagcagagtgagcagcgcccagacgcgccccgggccccctctacaaccattgggagagcgccccgggctcaagcgtggaacggggctgcaatggcaaccgctggaataacggcctcggctcccggtggctcctcaagcccgcaggggaggccggccgggctaggcacctagctgtccccgtgctcgtccgccccagcccgggcgcagcaggtggatgcggcggtgctgaagacacaaagggtcccaggtggcaccacctcctgcgtccacccacggggccgccagagcccagtcaagaccctagctcgctgcagccccatcgccagactcaacatccaccctcacttggccccgaccggttcagccctctggcggcaaagtaacggggtgcctgggggaagcagcaacgactccgcttcctcaccccaatctgcgcgcaaagggcagcgggacagcgggaacgcggcctgctgctcacgcacctctcttgcggcctgttttcggcagtgacagctcagatgtccaagtcgttgccacttggtccccgcgtctcttcagaccagtcccgccggcggccgcgcagcagcgactactaaccgcgcgtgcgcgtgcggtggcgggcgggaggcggtggcggcccgaggtgtgtgctacgcgctcctgctccgaggggctcaaccgcctccagggggagccgcacatggagcctgtgccgccgccggccggttgtggcctggaccccgctcccgggttagcccaggaggaattccccctgcaagtccgaagacttttcctcctctgagctcccgccctctctgcagaccgtgctacctcctgttgcgcaatgattgggtcctgaattttatgtaaatcatatttatgaacaacgtccagtaataagtgcagcaagattagggctctaggttttctccagagttctagatgttaacagatctgcagtcatggtgattaataaggagctttcctgtctggtgtgtgtatatgacaaatacagatgcgttaagtgttaataaatacattgtatataaaacaatatgttctttttctctcgaacaacactattaataagagctgctaacatttattgtgttcattgtgctctaaggggcttacattcattgtttaaccttcgtggcaacccaggtgatgaaactgatggcaacttgctcgaagttacacaacatgtaaacagtggaaacgggatgtaaatcaggcctgtctctctcagagcctgtagtttcaaacacattgaaataaatcttagcataaacgtagtttatgctatgattatgcaatcacaagctgctttgccttttatatattggatcaatattaattttactacttaatattttatagtaaatcttgactttgaatttggtataacaatttaattttattggaagattaattaacaacatttaattgacttg

SEQ ID NO: 43272 - DNA, 1606 bp, Homo sapiens
acccctatacccttaacatttagtagcatctgacatattaaatatttggctgtttgtttcgtgtttgactgccttttggaacactgcctgtgctaacaatcaacaaatacttgttgaattaagaaacttactgcttgaggtttttaaaaagtaatcacgaaattactttttcaacaaaaacaaccagttagggaataaacatttgataaattaacttttagacctatagtattataggataaagtccaaacttcgtttctcaacacatggactttcctcatctgccacgtattggccacagtcaagtagccggttcccttttctcgtgcataaagtggagttattcataattacttcacagaattaagattcaatgcagatgaaagcgcttttgtaactaaggcactataagttaccgtaagcacagggtttcttccgcgcttggagcctaggaatagtacaaggtgtcaacccgcgctaaggacctgaggttcaaggagggaaaagtctccagcgcagcgctaggaggcgctactccggcgcggggcggggctcctggccgccgttgccagggaaaccgtctgggcgtccctagtatctgagccctcgcgcctgggccactcagctcgacctctctccagcgttagcaataggtggagcgcgggccaatcggaagaggccggaggggcggggcgggcagtggccctgggaaggcgggtccgcggcctcgctccctgacttccgggtcgcggtgcttgaagggagtgttccgtcgtttccgttgccggctgtttgcagtggggaaaccgaggcagctcctgctccccctagttcttccgctcctgtgaggtggctgctgtttcttttcctcttgccccggatgcctcggtgcggctgcactgagagcgcgcgggctcgcgagccccgcggggttctgcgggaacccgggggcgcctgggccggcgggtctttgtgcgagccctgccctcccattcgcgggcggcgcgcgaggggggtcggcgcagagacgcccagagccctggggtgctcaggcgccgctacgcgtgcatcccctctgctcggcagttctgcgcttttgtcctaatgagcgcggactagatggcttgattttcaagataatgatcaacccagctgtgctatgcgctctttctgcactgacctgcgggtacttcgaacttcgacagtccctcctcaggccctagtccagaggtgacgtgtctgtgggaatgtttaaggcaggaaggagacgagcaattttgtttttaagtatctccctctcactagtatctccctgactttttcatttagaagctgaagaattttcttatggcataagatatagttgtatcgagtgtgtacttagcaaaacaaaaacttgttagtatttctgcccttgacctattgaatggaaaatcaagaatgagctaaggtgttatatactcagtgttcaacttgtatacttaagtttgtagtgtttttatttgctggcatcacctgactgggacagttgtaacgaattatccacatgggataagaagagtgtattctataaaaacaactctgatgttttggtatatattttaat

SEQ ID NO: 43273 - DNA, 559 bp, Homo sapiens
tccctagggtttctgaaaaagaggagagtcaattgtgagtatgttatatttctattttgctctcccttagaaaaggagcaaagaagatcaatgtcttttcacaattgtttattgggaattgtagtgaaaaagctaaaaagaggagtgggagtagggaagagaggaggaaggagaggtggtgagcagaaccagtcaggttttttgcaaggcgaccttgagagaataaaggaaactgtgtcaaagttccgtgggctttgggactgcattcctgggactgcattcctggctgcagggtggaggcgggtgtgtcagtggcagggaggcagaagctgaggtcagagtggcctgctgggttgagctgtactctgaacgagcatgagtggagcccagcagccctctgtgggcagcatggtgttggggatatattccgggagggaaccccttaacctgagctacatcggttgacaaaggttacccaaagcatttcctcctaagcaccccaagttgctctgaacctggcctgaacatgggtgcaggcactttcatggtgctcacaacc

SEQ ID NO: 43274 - DNA, 1285 bp, Homo sapiens
ctaagcaaaaaaaaaaaaaacaaaaaaaaacagaagcaaaagagcatattccgtgagattccatttgtatcaagttcaaaagaaatcaaagatcatctacgcttttagaagtctggagatttattaaccatggttggatggacagtgatatgaaaggggcacaaggggcacttccaggttgctagcacgttctatcttttgatctgagtaaacagttacatgagtgtattaaaacagaggctttaaaaagagtgcctttgtgagcctttgacctctttatcaatacctactccccaggaatttgcaaccatttttatcacctccactttttgttttattgttgttgttaaaaatgaactcagtatgtttaataaagtttggtattatcaaaatcgcagtacaaacatcaagtcacacgcccacatgacagaattccatttataaaatgtttctcgggaagcccccactgggcccgtgcccaaagagagcctgaccacagcctggggtctctgggtgggcagaaaaggtgagtatgggggtggggaggaactcggggtagggggaggagggcggagaggaaggaaagtggagaaaaatgcagactcagaagcagtccatataacagctcaaaaagagctagccggcgatattatcacaacgatacagtacaaatcaaagcaaaaataaaaataatttggccgatacagcaggctacactgccaagaacccagatggcggccttcctgcggccatccgcacgggcctcctcaccccccatctctcccgtgcgcccactcgcttccttctcgctcactcgcaggcactctctcgctaggaaacacagaaagtattttgtgtttggagatagtaaccttagtcaaatgaatcttccgaagagtcgctgaaggaggaatgcaccttagcctctcgaagcagcaaacaaaaccactgcttcctgctggtggctggcttaggtttcagagtccgggagggggcggaggagggggtgtgtgccaggccctcttggtcagctaggggccgccagctgccttgctgtcctttgccaccatgccacacaggagggaaggcatcagtttggagctagccggaggggccttgggcgggccactctccttcaggaattcttcgtcttcctctgagtctgtattgtaagagtagctgctcacttcggaggcaaacgcggaatgggccgacttgggctggcctctggccttgaaccccacccctatcttcctggctttggcggcccttttgtgtttacctt

SEQ ID NO: 43275 - DNA, 1129 bp, Homo sapiens
agtaagaatggttctaaaaccagagtcagacaacactcttcctttgtttaaaattccagtgatttttcatcctctcttgggataaaattccaaggcctctaagcccttcatgctctttccacctttcacaatgccctctctgaccagccaccaccaacctcttcttactcattagttctagtggcctcttcatgttccccaagtgcatcatgcaggctccctgccagccacggcctgagcaccggctgctggctgccccctctgtgcttctctcagacagcactgtattcggtcctccatggcatctgtgtctctgctaattgtcatctcaccagaacaataaacgctcagagaaacagtatgtccccacccttcactgtgccatgttccttcttacttgaatttagcaccactttgcatttgtttttgtttgttggtttgtttttgcttagtaaatctatcaccacttactctatggcagagactgtgtgaccaggacatgagccgaggacagtgctgattcacatgtaagtgctcaacaaatatttgctgaacttagggggtcctcatgatcattccaggaagtaagtgctcttcctatccccatttcagagacaaagaaatcgtagtttagccaaaatcattaacttgcccaagtctacacagctggtaagcagcaaagctaagttcaaacccaggtcgtctgatttgagaactcgtgctcttagctccatcccggggaaactccctggcaccttacctttctgacttgctgcacagcacagtaggcacccaataactggctagggatgccagattcaatgaataaaagcataggaaatacaggatgcccagttaaatttgaatttcaggaaaacaatgaatacttttttactataagtatatcccaatcaatattaattaatcctgtatttttttctgacatccctataaatagcaccactctatagatcagtctgtgtagtggactctaaactatcctatttcctaagttggagtttacagcaaaaaagactatgcctttctagtaccttttactttctgttttggaaggactaatccagggaattgaaaggaatgacccaggcattcctttcagataatcaga

SEQ ID NO: 43276 - DNA, 736 bp, Homo sapiens
taaatgatatatatattgacagggtaaacactcaacatttcataattcagaaaagtggagccccaagacccctggactggccaaggccttgtctctgatggtcactgagagagctggcctcaccactcacgctggccctggaaaagccaacccagctgacagggacataacgctggcttttgctctgttgatgtgggagacgtactgtgatttcttgtcatctgacctgcatttcatttcagcgggtacagagttcaggtcatgatgccgtcaccctaagggtcacaggaagcaggtgagacccaagttgggctctggcctggagctgtgctctcttcatgataggctggccttcaggcgaaccccattcctggatgtggaaatacgggctcagttatcaccccaacagagggccgtgtggagaccaccctgcggtctcacatggtccatctgccgttaaaggaaacactgggtctaactctcaacattatctctgagatagggctgtgtactattgttgtatacactagtttcctggtactcgttttgagtttcattttcacttaaaatgcagctataaataacttctaatttgaacaaggaggatgaaaatggaaatctgtttactctgtcagtgatctgaatctggttgtcaaggtgactagttcactaaacacagggaagacaagaaaagactggatggtaatgatcttcttgggtttgaattataattaga

SEQ ID NO: 43277 - DNA, 1178 bp, Homo sapiens
agaaatgggatacaagctaaggacggagctggtctgttaatagttcaataggcaactggatatagctttgtccagcaccagctccctgaagctatgctacagacaagaatgatgtagaatgagccataaatttccagcctcacataactatgatctggcccaggtacacagcggccattttctcaatggcaacctaaccagcactgatgcatacaaaattttgaaagttttcttcaagattctctttgaattttagagtggtgaaggctttctaactgtgactcacaatcccaaagccatgaaaaacctgatatattcttctacataaaaattcaaacttctacatgtcaaaaacaccattaaattaagagaaattggaaaaaaaaaaaaaacttgcaactcagatcacacacaaaaggctcatgtacctaatatacaaagttcctaaattggtcaataagaaaaggagcaaccaccaaaaacaaagtgggcaaagagcaagtacaatttataggaaaaaaatctataaatggcttgtaaacatgaaaaaatgttcaacaacacttaaaagaaaatgcaaattagaagtacactgaaatatcattttcacttgtcagaatggcaaaaatccataatatgataacacattctgttttgcaagactgggaaaacagacattcctcacacatggtttgtgagcgtgcaacttggtaaaacccctaggaaggggaatttggcaatacctatcaaaattgcaaatgcatataccaatggccctacgatttcacttgttgaaattttttccacaaatatatttcacaattagccaaataacatatgtacacggctatttattgcaacagttttatagtatatgccgaaaaatagaataaacgtccattaacagaggagtaaataaaatgatggcattgccatataatggaatgtgcaatcataaaaaataaaaagcaaaagaaagatgacatgctatgttttgatacagaaagatataccattgtacggtagatgaacctgacagcaataacttaagcataccctgagaacgaccctgtatggtctatgcacctgattgtgtgttcagagttccaagttaaggaattcaagaggagccaacctggagattcattcctcatctatgaggaacatctgaacccctg

SEQ ID NO: 43278 - DNA, 1316 bp, Homo sapiens
ctaataaattattaacctcaagaattaggggatgcttgagggacagctgctcagggtcaacatgcgcaaacttttctcctcttacatcttttcctaaatgtgaattatggggcttgaaagtagagacattctcacaacacccctacccccaatactaccttgtcttgaaatggtgttacttaaatacacacaaacataaaaccaagtataaacttcttatgttcaaagctcatttataatataattataaaaccaagctatatttaaaaataaatatggtaaaattataaaaccaatgaaagtctgaaataaccacatttacttattgtgcaagatgagattgttttgttaaaactaaatcacgacttgatcagaaatgctgtacagagtaacatggcccaagttctcctgaattcagcataccacattatctttgttacacaaagcagttactctaccacaacttttctctattctttgcttagtgtgctgcaaaatcatttgcccttcttttgcccaaatgcatctgttacatagtcaagctgcctctgtcatttactcaatatctcataacaactgatatgcggtcaacccagtcataaatccaagtgccaactcaaacactaaagttgggtgtcagtggtgagtcataaggtggtcattctgataaccccaaataaacttgtatcaaggttatcttgttagcattcttaacatcataacaaaaatgaaaatatcaaatttaaaaattatagagagaacttagactctgagaggtatacagatccccagcagttcacagagcctagtgtgcaaaacacagccataatgagttaccatctaattatctgtaatttgtttgaaatgcagtgattgcccctattcactgccccagtggaagactctactgtggatctgattctcaagcccctgaggggtcagactcctgactacctggctctctcctggctcctgcatctactttcacctttgattctctctttgcatcactgcccacagcagtggggcaggccaggccccattctggtggccacgttcaggctctcaaagcccagcctggggcagagtcccaaaccacctatggcctaggatggaagcgtggacattttgtgatgctataatccccattcagcacaaataactattttccataaagggcacatatattacagtgtgcatttgaaagcctctcattaagtcttatcaaaaaccaagaaactaatttccatattaaaaatctattgttctgactcagaatgtgctattcagcagattcttgctgaatacagtctctt

SEQ ID NO: 43279 - DNA, 756 bp, Homo sapiens
gctaattaaattctttctccagataaaattttctttaagaaatcatagtctaccagaaaaatagagtagagtttccatgcacatttcttttattttacttttttacttttaactctagctcctataggaggaaggacacatttatttttaaagtatttgcagaagtagtatagggagtcattctgatatttggcctgttgccatggctaaagctaaaacaagcaggttctactggcccaaagttaataaagaaagtaagatggtaaacactgttccaccaaatgcaatgcacacagttgttataaaggtcactggctacatactgcagacattcttttgataccatattctgcaccagtcaggaatgttggccataatccaatgaaaggggaaaataaacagaattctctcaaagtcaagtgtttctgggttatattaaaaaatttttaactttaaatggtaaaaaaaaaaaaaaagtaacagttttaacaaaactttcaattaatttaagttagccatcttagaaaagtagaaatctacttgttttttttgtttgtttgttttgttttttttgagacagtcttactctgtcacccaggctggagtgcagtgatgcaatctcggctcactgaaaccttcacctcctgggttcaagcgattcttgtgcctcagcctcgcgagtagctgggaagctgggattacaggtacgtgccaccacgctcggctttttttgtttttttgagaaggagactggct

SEQ ID NO: 43280 - DNA, 569 bp, Homo sapiens
gcatggtggcgggcatctgtagtcccagttactcaggaggctgaggcaggctaattgcttgaacctgggaggtggaggttgcagtgagccgagattgcaccactgcattccagcctgggcaacagagtgagactctgtctcaaaaaaaaaaaaaaaaaaaaaaaaagactgactcatccactgggctttttagaatgcacatctgacaagaaaagaaaacaaagaaaagcagaaggtgggttattgacttcttcacagttctctagtttcactagtagaggatgttttcaaattacaaatttctagtaactatacatacacacactccccacaaacccccaaagagaaaaggtgacccctcctcctgtctttcccactccagtcctctccctggtgattccagtttgccattctcagagaggactatttgtgcaagaaggaaacagaagagaaaagagagaagaaagaaggtgcaggggcaggggagagaggaggagcaggaggaggaggaggaggaggagaaagagaaagaaagaaactaccttttactggtagagctttcaaaatgt

SEQ ID NO: 43281 - DNA, 2219 bp, Homo sapiens
tcataactcatataggaaatgaccacatcagttccttacttatcgcttccctggaaacaaaagagcattttatacctgatcctgctgttgccagtaaagaaagtggagcaaaaattaaccttcttccatccctcttttccatttggaaaacaatatttttaagggggggaggggaagggaatgatgcattcaatatataggggataatacattccctccgccccagactcactctttcccattctcctcaacatatccacttaaagagcgctcagtacgctgagggccccaagcctgacagagtcaaaaaaagaagcatctctgcccaacctgaacatcacgactctcgatgcctcgcatacaacgaggcagggcgggtcgcccagccccaggggaccgggcggcgtctcccgagcctgcagcccaggccgcgggcggcgccgcagcgctcccggctcccctcctgcagggatcggccacggtccttacccgccagtccgccgccgccgcctccatcgccggcgtggcccttcctccgctgcaggatgaagtatgggttggccctctcggtgatccacagcgcgttggccagcaacacctcctccgggttcacccacatggtcctggctgccgcgggcgggcgcacaatgggcccgtgggtccagtcctgcacccaccaccgcgacaggcgcgcactcctgggcacacgcgcgcccgcccgcccgtccgctaggtgcggcggcggcggcggcaggcgacttcagggggtggcccgcggcgtccgggccacaacaaagccccagcaggcggcccgggaggacggtgaggacgcgggcgcggcaagcagcatcctccccgcggcgtcgccgccccgcgagagcccgcggccgcagacgcccggcctggcactctgcagcccggctcccggcccacggcggcgggaggagcgggaggaggaggaagaggaggaggaagggagcgggaggaggaggaagtggtatagctcagtcccgggatccggctcagcgccaggcagggctaagggccacccgagcggattcggccccgcggtcagggccaagctgggctccggcgctgctgctcccgcggcgccgactggagctccagagcccctcccgtctctacctgctcgagctcccgaagtcgccgcgccttaacgcgccgtgtcggggccgcaggcgccactagggaagcccagctccccgctggaaggacgctccggacactgcgaatgaatgacgacaacgcggctcacttggagcgggtccgggtttgtgcggactcggtaccaccgcgggctccgcgcgccgagctgagcagctgtggctggcttcgggggaaccttcgggggaagctcctggggaccgtgtgccaagcactgggcccgacgcccatcccagcagggaggacgccgccagcctgcgtgggtgcgtgtgtgctgtttgtgtttaaggttgacgctctatgggatagcgccaccccttttcccaggaaaagtgtttcaaggttccagacctggagctcggttagagacccggggtcggaagccaacgcagccaatggtcgtcgatgtttttgtttcctgcatccccagggcaagtcatgcgctaaacttgtcaccgcttgtgacccctcccccctctccattccattgtaattaaagtggcctagctaagtgcattacatcacttctttccttgacctgtagggcgtgagcaatagagaagttggaagcggcccaaaagcttagaccaactaattcacaccacagctgttcctatatcgcatttggggcttcgaaaactgggcatggcagaattttaaaatttatccactcttggtagatggattttttttttaatcagtgaaaccagaaacacacaaaccagggcagctttatccctagacagtttcagtttccccaaatacttcgagcttccagtggtgatcacagcccatctgcctacatatctgatgaccatttttttttcctcccgcccaggagatctggaggatagttcagccaaaaaaaaaaaaaaaaaaaaaaaaaaaaaagttcctcttcccaaatgatgggaatttagcagactctgctttgttgtggatgctgggcaatcctagggacttttccctttccaaatgagcagagattcaaatgaaaccttcttgtgtgggcttcaaaattgtgacttttgtag

SEQ ID NO: 43282 - DNA, 410 bp, Homo sapiens
tccttctgtgtgacagcagtaaaattgatcaacaagatccctgggaaagtgacatctggcaacaaggaacaatggaagggaatacagctaatgccacagacaaatgtcaagtttctttaaatttaatcctctcagtaagacacagttgaactggacagggctgattaagcaatagacgcttgttttgtttgacattaggaaatctgaagttgtggcactgccaaaatccttatctatttcaaagggacaaggaggtgcactgataaagaagggcctctgaatttccacctgtgacgttcattcatacctaagagtctacttaaatagcatgttctccctaaatattaagaactgttttggatattaacagatctctttttatctacttgcagttctcttaaatccatata

SEQ ID NO: 43283 - DNA, 627 bp, Homo sapiens
acatcccctttccagatacatgaatacacacacacacacacacacctgtgcacaagcataaacccctcataaaactaaaaagagaagttcctcacaggctacgaggaaaaatactcgattacccactggggatcctgatgtagtgtctgcccctttaaatgaacttggcctgccctcctaaacctgagctaggattatgtaaaaagcccctggaaggcctccagactccatttctggaattattctaggtcactttccatctgctagtaatgctaatccttgatcttggtgtgactagaaaagcttttcagatattaatttatgtggttttctccctgtatcttttctttttcaatgcccctgactaccttcctctccctcttcctcctttccccacctccattcaagttgaaccttgatctcagctctctggcttcagtgactggtggaggtgggtagaaggttgggggatgttgttatggtagaaagcatcagtaatctgcaaaatgacctactttctttgctaaaaatctaagcccacaagataattaattataggggtggtaaaattggtagaaaggttaagtcaatttatgggagtaggatagtttagaaaaacacaagggg

SEQ ID NO: 43284 - DNA, 1285 bp, Homo sapiens
gcaaccaagaaaaggtgggatgtgaggcacgcaagatgtagaggtggggaaaggtttccaacagaattcaacatgaatttgctgtttgagtcaattgatccagtaccaagtctgtgagttcattttcctcttccttttagatttctcctttttctaaaaaagtaaaactgagggggccttcccctgctttccctccttctgcttccctattttccctcgcattcccttccttttctgcagatcctctgcttaggaatggggcattggcccccgcaggagtgggcggggaaggggcggagcgaacagaggtgggcggctcccgtcctatgacgtcagccgtaaggcgctgctgtcgtaaaaggacgtccggtccgtctcctagtgtccggaatcggctgtcagcctccctggctgttagtaccttctttcccggagtcctggtccacgagttggatttactgctgtcgcgggtgggcctcacgccattccctgtccctcggccccctgagtgagtccggtctcccggcgaaagtgagcgaggtttgcccggagcgcgcacgaggtagggtgtcccgcgggcgggtgacggttgcgggtccccgttgcgggtccccgagccgcctggcacctccgccgcttctcccctggacgcccctccgccccactgggtcctccagctccaggctggactcctaaagccgcagtgccccgtgcctgtttcctcatttggtgacacacgcagtgcatgcaagaagttggagtgttaccggaaaagggcttgaacccgtataaggctgagaagaagattcactcttttgagcgtgcagaacaaactggagggaaaaaaaaatgagatttaactttatcagaggattcagaggatatctctgaggacgcagaaagttaatccgcatgatcacctcgtgattattttctgaggttctttggccagggcagcacgccctctagattttgtcattttacatattggaatggtgccttagtggtctgggcgttacgttaccgaaataaccacctattaaatctggctatttttcagttgctaccgtactgcttaccacctgttttgttttttttttaattgagcattcagttcagaaaacttcagtttagaaaaatcttgtatttcaactaaatgatgaaaattaaacatactcttaaacgtaaatttgaaccccgttaaaattacatgctcactgcgtgtagagggaagagcatttgttaaagtcagagcaactaataccttaaatatcttcagaatgtt

SEQ ID NO: 43285 - DNA, 628 bp, Homo sapiens
gacagaggaggcgcccagagcgagcgagggctgtgaggactgcctgcacgctgtcacctctcagtatctttataaaaggtgagcaattttctgctcagtgtatgaacttctactcattaagacaacagcacagttgaatactatattaataacgatgaatacagaagtgattattagcaagttctatatatctaattagaaggctttgggctataacaaactctgggaatacaagctcgagtacattacccaatatttgagagatgtctcagaacacatgaatgtgaggatcttgtgaaattgactggacattacattatgttgtgcagttagaaccagataatctatcaaggtgaaaaccagtgtctgggacataggccagtgtctgggacttggtccaggatattcctaggcaatggcaggcagcaagtcaatgtttttcatatgctatgtgtacatgctctgaatggattcaagtcctgattttgccatttttaaagatacccactaacaaaagctgggtgagactcagtatttaagtgagacctgaagtcatggttatagggctataaaaggctgtacagatcagtaacagtttttatttatgtgcacatgtgtgcctgcatac

SEQ ID NO: 43286 - DNA, 952 bp, Homo sapiens
gaattacaagctcagccaagctatcaatcaactgtgaatgtagaatgatattttccaatatgtgggatctcaaaaaatgtgcattctgttcatatttctcagaacactattatgtacttcatcagaaagaggaccaacaaaaagaggaagcctctgcatccaagtaaaagatgctacatgacaggagagggataaagggactatctaaacgatggtgcagggaagtcccaggatgacaattgtgtaatgaatctgagaacagtcagttcaggtcagaaaaattagcccagagaacttcaagtagtatgtttccaaactaaacagaactgatactacccagtgctgcacatttgatcgctgaaaattatacttccaacaaatcaaagataatcaaaatactatttttgtcttgcatcgtccctttataatttttcagtggtgggattttttttttactatttttcttatgaataaattttctagaagtctacatagccaatgagctcactcctagaagctatagagccctggaggcagaaacagactagctgtttaccaagcctgtttctttttcttctgttgcacaaacatagtgtttcccagcttctcttgcagttttgcatgaccacgtaactgagttctggacaatgcacatgtaagaggaaatgacatggcacttcagggccatggctcataacaaatcttgatacaagaggcttcttgttttttctcctatcagattcatgcagaaatgaacctagtggctccaaaagctgtatgttaatgatggtggaaccctaaggtggaaagagactgggtttctaagtcactgcttggcgcttgcagcatagtcaactgtgaatcaagaacaggcatgtcaggtggtaaaaaagtatacttctattgtcctgccatcacagcacatctagcaaaactgtcctctggagacctg

SEQ ID NO: 43287 - DNA, 988 bp, Homo sapiens
gttacggtactatctaccttgcagttagtgcagaccccataggttgaaggctcagtcccacaagactgggcccccaccccaacccctccacttcagatgccagtggcatggcttggatatccacattacccataacatttgtccaacttggctacaaatggaaggtttacacgactttctcctgaggtttgatattttgccctgatggctcacaaaactcagggaaacactcacttatgttcactgctttataacaaaggatatgatgaaagatgcagatgaacagccaggtgaaggcgaggtcctgagcacaggagcctctgtccccatgatgccagggtgtgccaccctcctgtcctgtggatgtatttaccaacctggaagctctccaagccctgccttctagggattttttatagaggtttcatcatgtaggcatgaccaattattaacccagtctccagctcacagtttgaattatggcttggtgtttctggaaaacagccctcatgttgacgttatccagcagtccgccaagtgttgccttattagaataaaggcactcttattacccaggaaattccaagggatttaggagatctgtggcaggaacaggaggcagaaaccaaatgtatattttttattatgtcacaacatcctgttacactgtatcagaaaaagtattatacctctcttggaagactgagggagataattagtaataggcacaaagaaatcaattatataataagactattgaaaattaagcaatttaaaattccacataaactgaaaagttgtataagaaaggaaattgccttctttcccttgcaccccctgctgtactactacaagctactccttgactcatcattcagggaatgtgagtaaaggggatgggcctccttacccctaaatattcttagcaaattaatgtggaggtgacagactcaaaaggtggcttttctcctaccaggttgcccatccc

SEQ ID NO: 43288 - DNA, 1664 bp, Homo sapiens
ccgcagagaggctcattgctctaagttcactccctgtaccaactgtcttgcacaaagctgccacccgggtgtcttcttccaacatttcccctagttggacttcaaagtttccttcttgcagcctgtgcggggaccaagaggccggtctagagtagccgcccagcatccagatccgacatccttttccctttcctcaggaagacttggatgcgcgccagcccagcccgggtctccaggttcagctgcggaagcttcccacatggtgcccgtcgcttgggatgcggctatccttgtgccttctctgcaggtgtcccggcaggtagaggaggagaccggtggctggtgttcctgcagggcggggctggggctcctcgatgtccttgcgcttgccctgcaagttctgcgccccaggccccggcagggacggaaacaggccgggaagcagtgacacctggggcagtcagtcatccaggagccgccgccacccgccccacccccagtctccgcgggaggtgtttgtcttcgcctatgctcccggctctttctctttcacttttcttttcgccaggggttgggactccgggtggcaggcgcccgggggaatcccagctgactcgctcactgccttcgaagtccggcgccccccgggagggaactgggtggccgcaccctcccggctgcggtggctgtcgccccccaccctgcagccaggactcgatggaggtacagagctcggcttctttgccttgggaggggagtggtggtggttgaaagggcgatggaattttccccgaaagcctacgcccagggcccctcccagctccagcgttaccctccggtctatcctactggccgagctgccccgccttctcatggggaaaacttagccgcaacttcaatttttggtttttcctttaatgacacttctgaggctctcctagccatcctcccgcttccggaggagcgcagatcgcaggtccctttgcccctggcgtgcgactccctactgcgctgcgctcttacggcgttccaggctgctggctagcgcaaggcgggccgggcaccccgcgctccgctgggagggtgagggacgcgcgtctggcggccccagccaagctgcgggtttctgagaagacgctgtcccgcagccctgagggctgagttctgcacccagtcaagctcaggaaggccaagaaaaggtaccgcagctccccacttcctaactgctcccgtcccaaactcattgtgggccggtgcagatgtctgtgcgtgcgcgtctatccctacctttgcaaaatcaaattatcgccctcttctttgcttgcacacgtcttctgggagagaaatttgcaggaatggtcagtgcttggcagtcaggcctgggtctgtattggttccaactctgcgccagccagttatctcttagagaagcgatagtgtatctagaatgtcgaaggaacttggaaaaaatacgagcgaatttcactgaaataaaatcattattcaaggtggcttttaaatgaaaatccagccaattttttcaagtgttattaagaccgcatgtagcaagggtatatagttcatttgactttatgtaattccatgcattaaaaactatgttgacttcaaagtatgtctaaaccaaactaattcttaaatgatgc

SEQ ID NO: 43289 - DNA, 2557 bp, Homo sapiens
aataataataaataataacgtgctcttgaaaaaaaaactaaaacaatattggaaatatatatcatacaactagatatgtcaatgctttgattaaagatgtctcttatatcaacttttcaaattgcccctttatttggcaccctggtgaggcaaggcacatgttaagattctggatagggagagataggcatttttttcctaaagtgggagaagggtaattatgaaagaggaagtgaggaaggagaacttgccagaaatctgcctgctttgggcacacatcaggcatatctctggtaaaaggggctcctatggaagtaacggatcttgaaattggttcctttagaaccgtctatgtccacaaagccctgggaaagttgtagggtatgccagaggtgcgtgttgttcagttgggatatatagttcagccttctttcccacaccctccctttggcttctggattaccatgggttactgtgcttaaagcaaagtacagggagtaggatggggagcagtaaagagcctgggctagcttctgtagaggtttcccactggggactagtgcgaaataagctctagtagggcttggatagcctctgcagtgcagtctcctcttctagcctcagctgcagtcaccttgcctcagtgtccagacacacttgccattctttgtcagccttcatgggtcctgctcaaaatgttaaccctctataactttttctgtccccacctactgcccaggcagaattattttctcccttacatgaattcatttggtgctgtctacattcccttataacagctttaatgtctgtaaactcatttttatgtgtctgactctacacttacattttgagtaagggcaatgtgctccatgtgcttagcagagggttggtcagagtctatttgtattgacttcagcatgagtcaatcatctttcaagtgtttgacagctaagcaaacaactgtaaaagaggtaggaaacataagtaatatagcaaaacaatgttggaatactgtaataaaaatagtattttagggaaattagtttgaggtagaatttattgaagaaaagacaattagagataaggaaaccagctagaaattcatcacagttaattcaggagtgtagtttcattctcattatctgctcaaggacataactctagtaattcattctttctctccatcaccatttttttctctgtctcttatgggtctttcccaataccatgtagccatgctataacttctgccatttttaaaaaagactcatgtttttctcctcatgtttctgctcacttctatatctgcttttttctgcccacattttacaggaaaacttacaaccttaactatattctctgtttccagttttcctctctcctttctctcctgaaccagccaggctgtcatctccactgctccactagaaatacacttgtcaaaggtaccacgaacatcccttttattaaatccagtagttagttattgggtcccttcctatgtaccctttcagcaggacctgagagttcttcatgtggcttccaagccactccccttctccttattttccttttaccataccagcaacaatttcagtctccttttaccttaccagcaacaatttcagtctctgtctagttcctaatttccctaacatgtaaatatagctgtctgagggctcagtccttaggcctgttctctatctgtactctctgtcttggtgatctcatctagtgtcatggtttttaatcccttcttacattgatgattcacaaatgtacgggtgaatctagccatgacctctcccctgaactccagactcatttagcagtctatttagctgttattcaaccatctctgattggatgtctaatactcactggattcctgcctttactgccatatctgcttgctccaccttcttcctcatcttacctgatgtcaatttcattctcttagttccatagataatcaatcaatctatcttgggtttgtccttaacgtctctttatgtcatattccacgttgaatctgccaccaaattatttagctaggccttcaaaatataccctacatcctatctcttctcaccctttttttcagtgctgtcacctgggttcaagttgctatcatgtctcacagtattattgcaaaagtgcctgctgcttgtccccttatctccactccagcctgttctcaacatagcagccacagtgttttggttacctgtccctgcatctaaaggatcaacagccataaaacaagaacaaaacaaaacaacacccccagaacttagtgacttgaataacaataatttgttatttatcgtgatcttgtaatctgggctactttcggctgcttgactcctcctaggctgctggagatgagacattcaagaaagcatcttccttcacatgtctagaacatcagcttggatagctggaaagctcatggctggccaagcatccatctctccgtatgtgacccctatacatgactaacttggactttacataatgttggcctcaagtagttgtatcatttaactaatta

SEQ ID NO: 43290 - DNA, 1286 bp, Homo sapiens
caatcaagagaaatcccttacttgatcatacaaagctatcatttaactagggaccccatggatttttctgaagcagaatatttgatctggtgcacacaatgaaaaaaaaaaaagcaaatgtgtgatttcgttgatttttttttttttttttgacagagtctcactctgtcactaggctagagtgcagtggcatgatctcagctcactgcaacctctgcctcctgggttcaagtgattctcctgcctcagcctcccgagtagctgggactacaggcacgtgccaccacacccggctaatttttgtatttttagtagagacagggtttctccgtgttggccaggatggccttgatctcttgaccttgtgatccgcctgcccaggcctcccaaagtgttgggattacaggtgtgagccaccacgcccggcctcattgattttaaataacataaacaaatatatgccgtatatttcttaggttgttaagtgtaacatattttgagataactattaatttctttgttaacagcttttgaatcttgtttgcttgcctccattaagaaaatgacacagtcttctttttcctcatgactcaccaggccagagacagcctcccagattacaactagctcagtggtattaggagcagtatggattgtgtatgaaacaaagtccaacttttatttactcaatgactaagtaatttgggacaagtcactagatacagctggacctccttattctcaattataaaaataagcaagccgttccacagttctattattttaaatgacatctgctatgatatactttgcttagtatccaagaggctggaaatatttaatttattttagtttgaccactaagaaatttgttctctggatctcataaagacatggaaacattttacaggtgaatatgtgtaaatattatagtaaaattaatttgaatactcatggggcttgtcatacttaatcaagttataagattattttccttctttacacaataaaattatttctttggtttcaattttttgtatactcttgtgatctcaaaggtgttccttttattctctttcttttatttaaccagaaatatcttttattttgaatgctattttgtcataattcatgcatgattgtgcttactttaaatgggacatgattatttctgctgtctaggatacatgaccaaaatattaaaaaacagataattgcagattatggccaacatggctacacaatgtcttagaaaagttagttttgcctttctttgtgaaatatat

SEQ ID NO: 43291 - DNA, 708 bp, Homo sapiens
cttacatatagtttgaaatcccttgcccctctcttccttgtacttgcttggtatacacataacatgtttaaatccagttctgtacctattccaggctttctttccctttcagcttactgtggctggagaaaacacataccaccctaatgactaatctcactccacaaccattcacaacattgatccttcaaaaggtcaggctctcatactattctcccagttacctaaatggctattttgtgtgtcctcttccctctcctcctcctcctgtccccatcctcctcctgtccccatcctcctccaatcttcactttctgctcatgtctttttattttaattcactgagaaaatggaagtaatagtagaaaacttacacctacctaccagccccatcccccttataactcagcattccttcccgtgacagtagatgactcagccctcgccccctcttggaggtgagctaacatcctcatcttcacttgcttattagagaacattactctggcacttcccaccccctccaaaatccttaattccccctctctaataagtcagtcccatcagcatgcaaacatgttgttatttccaccacttaccacctgcaacaaccccctttccttcctcccttttggagcaggattcttaaaaacattgcctgcactagcatcttaaaaaccttttcttgctactttcttgtcagccatc

SEQ ID NO: 43292 - DNA, 872 bp, Homo sapiens
tcataatgtcaaaagaatattttaaaatagatatagcaaaaggtaacctaattctaagagaccttagctctttcagaaataactttttaaaaaatgatgaagggtagataatcaaagcaaggaaaatgcacaaaaaaaagttattctgatgaggtgcaacatttctgttgtatggaaaattacacaaaagttaaaaattaaccttttatcatttcttgttcagaggaactgagtactacaaggccttggtagtaaagaattcacaatttttttttccttgataagaaaactcatcaaaagtgtaccaacacattccattgcttcttttcagactcatactttttggggatataaccccagaccaaaaaaaagtttattttcctaaaaccttacacaacgttctatatctacttatcttgacacattattttagaataaaactattatctttttcctttaaaaaaacaagaacacatttcattaccttgaatacaatggttatatttatttgccataatttttccatttagagtcatgctcatctatggcaattaaaactttcaaccaaagtacaaagttctacttcacaacaaaaagtgggaggcaggattgagaactctctgtcttacacaagtattttggcagaccagagaaactcatgagtacacattacacaacctctaaaatcacacgttcctttgacactcttaaagtggcaaaaataaaaatgttcttgaacatatctcaaaggtatagtcactctgtaacattttaaataaaaactatgcttggtaaccaaattttcagtattctgtgttgcttagaaattatccatgcctccaaagattatgtattaattatggtattaatca

SEQ ID NO: 43293 - DNA, 574 bp, Homo sapiens
ctcagcctcccaaagtgctgggattatggcgtgagtccaaatgtacataatagtaaacatgctatgcgagaaaatgttaacgcagcaagcttgatgtttcctaattctcacatttctgtagaagggcttgcttgtgcggctgaccttgactggcatctaaaaatttggcttttgaaatgtttcccacatgactaatttataaagctgttttgcatgcctgggggcactgaactctaatgtaccagcctgtctacagtgtttgtgcaaacaatgtgatttatgatgaacacctgctttccttctgggagtctgggcttttggtaatcgcggctggtagcacaggtagagagtacctgcatgaccaacctccaataaaaactttccgctctgtctaaagcaggctttcccagacagaaacactttgtgcatgttaccacagttcattgctggaggaaggggcgtgtattgcacaccctcctgagggagaactttggaagttgtgcctagatctctccagatccctcctgatgaggctttttgtccttgctaattctgctttatgtcttagctgtag

SEQ ID NO: 43294 - DNA, 1224 bp, Homo sapiens
tccctagctcatgcaaaccagtgaaagcaatgttattttaggaataacttctatttcagttactttctctttccataatgatagtcattcatgtcttaaatcaccgttagtaacagataatattaattgattttctatggatttttatttagcagatgtacaagggtccatgcatttgcagttctaaaaagcactctaggtgattctaaccacactttgaaaaacgctgagataaagttatttacacaataaatatcatgcatgttgggccttactatatatctcaaacatcgatattcttaaagattgctaagagagtttacagttactttatcaaaaatttgcaaaaaaggtcaaggtttacaaataatccagacagggcagagctgatgccaaaatgtttgatgtgtttaccattttagtcagcttatgactcacacacggtgtgtattgccactgccacctcctatttctggaacagctcagttaagtctttttaaagttcatgttcctaagccagaaacactatgtaggatttgggtgggggcatatctctaggtatcaagttctccatttatgaaaagagtataatttaatttccactaccttatactatagtgacatagtctggagtcaaaaggtgggctagttttgaggaaagtggaaaagtggctggtaatatatttagaatcagagaaaggagctctactttgaaatgggaagtgtttctgctactggtctcctggtacacagttacaggtctaggcataattatctgcctatttctgctctgtgtccccagtttagcttccgaatcctccttccttgatcttgatgcaagtgttcatgtgatagtgacaaagatgagtcttatatagaactacaaaacaaacaaggatggaatgaagggatccagccctaagacagggtttcgaatgcacaaactcaagaaagtctgctccaaaactttaccatggccctgatattagttaataacctgatttaaaccttgggccttcttaaaatatttttataatgtgggatatattccaaggagaagggagagtaacagagaagaacaaggtttagggtagcagagaagaccctagcctattctgggaaaaagaaaaaaaaattgaaagaaaatatttgatatttttgtaaagttaataatttgttacgtgttggataaataccatcttccatgcagcagtttcctgggta

SEQ ID NO: 43295 - DNA, 888 bp, Homo sapiens
gttatagggaggtagatgttgagcatttactctcttagtggtatttcctctccctgcctatttgttcctgaatcttgcccttggatgaagtgactccttaggcagctcccacagagagtctgggctcaacagccaccttcttgctaaaagattctacagctaccaattaatatattaatgacagaggacctagaatggtggaatttttaaaatttcccctctgtgaatacacctgtccttgaaaatggcctcagtagtgtataaaggtcaaaggctagtcaaaattatttttatcatagcatgatggaatgtcaaagtacaaatgtatacagttgaactatacttaatgggaacagaaaacttattttatgtttatccagcaaaaattggtttttttgagaagaagagagagtactattttttattttactttgggaaagtaaacaaacagaactgccctgaacaaacctggacatacagtcaccctggccaaggtaaacaatcaacttggcaaggtacaagtaattaagcagtcatttgagggaacaaattttgctttgctcttcacagcaggagctttccctgcatttttggtcacttagcatcattttccttattataaatccacctgactacttctttatgaaaagccaaggtagattctatgtatttatttatttatttatttttattttttgagatggagtcttgttgtgtggagtgcagtggcaccatcttggctcactgcaactccacctcctgggctcaagccatcctcccacctcagcctcctgagtagctgggattacagccacacaccaccatgcccagctaattgttgtatttttagtagagacaaggttccaccatattgccccaggctggtct

SEQ ID NO: 43296 - DNA, 3868 bp, Homo sapiens
tacctttgtcttccactgtggcattattcccagtaaagacaaacatctgtgtaccttcacctcctattggaaaaatcattcctgtctctagcatgactgatagattaattacctcaattctcttttatcttccgtatcttcctacgagtcaacttggtcttaagttcccttttactcaagctcctgtctcctctaaactgctcttcttaagactaccataatcgacgtgtgaatatattagtgtaatcgtgtttgtaacttggtaaaaaaacaaaacactatttagcaaactgaagtaacagaattttgttcatttttctacgggacattttaaatgacctatttctttaaagttttgtctgtattacagggccttaatgtctagtttcacaactatattaaccaagcctgaagcaggctacagttaggcaatattttccaatataaagacctctgattaaattcttactgtgaatcttcggaatttggcatgaaacagaacaagcatgattgcacctgttcttccctattgtaaaccatcttcggtgtcaacatatacaataagttttgtggtatttccacctggttttctattttcaaagtacccttgtatgacacaggtataaaaatattttgattctaatctgccattttccttactctcacacttttttggacggcttataattttcgatatggtacaaagctcactaactggttctttgctagaggcctgctactgatactgatggtcgctaaatgctaggtacgccgccagtattgctcttacttcaataccgacatcgcaggataaaggcagtcacatttaggcgcgcaagcgcaattcttgattaatgagccaaggcagacttctcaatccgagttttgagttttccttacttttcccccaaatgctcttttcctcggatttcacatcgatagcacttattcgagttttcacgagtaacctgacgcaggcggaaccgacgaagactagccggcaagaatcctacagtcgcagccatctgcgcagcgtccgccggggacgctccgcgcggaagaccgcctgtgactcgacacactctccagtgacgcggccgtcgccgcacctgcgcggcggggcgggaaggagactcccagcgccggggggaagggagtctacgactcgggagggaggtgggggagcagggagggagagagggaacaagggagaaggagagaggcggacaggcggaggggcggaggggcagaggggcggaggggcggtccttccggaggttcttaggtccttcacttcctgtttgccggcacttcaaaatccgggtcaaagggtgtcgcttcggtctcttctccccggctgatcccagcactctccgtgacagcgcctcctgactcagcccaggaccggcttcttctcacgacctgctggagactggacgcccacacctgacccggaactcggaggcgtgcttcctccacccgccggctagcagccccgggccctgagctcccgccgacgccgctggggggcccgacaggcccctcggcgctgatgctgagtgggatcgagggcccggggcggcggcggagtacgggcctctggcgccttaggccagccgcaggtgtcggttcttaggctctccaggctcgctagctcccgccccggcttggatgggtctccctgcgccataaatgtggctgctgaggcggcggtggccgtggcccgtcgcgctgctgctgcggcgctccaagttcatctccgccccggggctctcctgccccacctcggggctgccgccacccgctccttatcccctggccctggccttgcagcgtggcgacaatggacaagatcctggagggccttgtgagttcctcgcatcccctgcccctcaagcgggtgattgtgcggaaggtggtggaatcggcggagcactggctagacgaggcgcagtgcgaggccatgtttgacctgacgacccggctcatcctggagggccaggaccctttccagcggcaggtggggcaccaggtgctggaggcctacgcacgataccaccggccagagttcgagtccttcttcaacaagaccttcgtgttgggcctccttcatcagggctaccactctctggacaggaaggatgtagccatcctggactacattcacaacggcctgaagctgattatgagctgtccgtcggtgctggatctctttagcctcctgcaggtagaggtgttacggatggtgtgtgagaggccggagccgcagctctgtgcccgactgagcgaccttctgaccgactttgtgcaatgcatccccaaggggaaattgtccatcacgttctgtcaacagctggttcgaacgataggccatttccagtgcgtgtccacccaggaaagagagctgcgggaatatgtctcccaggtgacaaaagtgagtaacttgctgcagaacatctggaaggccgagcctgccacactactgccttccctgcaagaagtttttgcaagcatctcttccacaggtaagggtcattatctttcagaatatctcataaaaaatcagtatatgtctctcttgcacacacacattcacaccatgttttcctcctgccctaaaaacattcttaagcgagagcaaatcctaatacctcatcccaaatttattcacattcactaccttattcaggacgtcacatcgtactttaaaaacaggcagcgttcccattttaaaggttgagaacgtccaggtctaagacctttggcactaaacaagttgcttaattacccagcctctgctcaagttatttggaatgctttgaggatgacagctactgcagaaagcttccattcattagtgactaatggtagcatgatgtttaccatagtatttattgtacgtgtctctaattttgtaatgagtttttcccccatttttgtatttcctcatttttgaattaatggattgtgcagtttgttttattactggattatcccagataactatgaagtttttaaatagtgacattttttgtctacagtatctagtagacaaaggaggaatacagatagaatgagggaaggaagagtacgaggatttaaatatttgtttttgtgcccatgaactgcattctcagaaagcagagaagggtcacatgatacttgcctagaaaatgctttctcgccgaggaattttaccagtacctctaccttcgttgttctgtcttggacctttcaggtctgaatagattcaaaatcatgttcatttccgctctacttggtacaagcattctccttcatttataacaccagtggggactgtgtggctgttcaaattgaacttgtgagggatgtgtcctcttcttatcttaagaaccagaagtaaaggtggagttttaacaaacgttctgtgttctgatgaatttaatatatttacgaaagaattacaaacgatgtatttgcagtatctgagttggtttgtttttttttcttattgtaattttacttctattgcctgtgttgtcataactgttaggttcctcccaaattttttgaactgtagcagtaaaggtacttgtcttggatttgcttaatttgtatacagtttaagcaaaatctccacaaaagtcaccttaatttctactttaagagattttttaaaaatcttccttagagcaatgtaatgatgaatagttttaagttattttggagggtctgaagtgggagttgaaatgatacttaagtgcccccaaaagtcaccttcatttctactttaagagattttttcaaaatcttccttagagggatgtaatgatcaataagtttaaagttattttggagggtctgaagtggaagttgaaatgatact

SEQ ID NO: 43297 - DNA, 735 bp, Homo sapiens
cagaactaagattttaacccaagtcttcagagctccaaagtcaatactctaatggagcaacaggactaaagcaaattacatattaacaaaagcttaacaatgaattttgtaaaatgaaatatcagtgtgtttcctttatccttttgcactccaaacatgattccttaagaaaaaaaaaaaaaagatctactttgttaaaacctatatgtgataatctaaagggttgagaaatgtggttcttaaactcatttgttttacccgcgtagtttctgtttgctttactaggcttatctcttccattcttgcctttatgccctctgtcatgcatattggaccttgcatcattttttttcacacagcaccatatacttgccatctcgagacctttgcacattcaggtctcaggatagcataccattccccttacgctactttctcttcccagctttcagcggactaatgacctcctactcttcagtatgttcatatcttctcatactgacttcccaagctgattagtctccgcctttatcctgaggtgtgtattgtgcttctctttgagaaggccatggcttagcaatggggctaaattaacactggagtaaaggctaatcctttacagtataaagtttacacccaacaaagattaaaagtaggtcttaaaaggatcaaattctaatgctggttaaattctttaagtaatttaactgcatacagaacaaatggcaacctttt

SEQ ID NO: 43298 - DNA, 3318 bp, Homo sapiens
ccactacgcccggctaatttttgtatttttagtagagattgggtttctccatgttggtcaggctggtcttgaactcccgacctcagttgatccgcccgcctcggcctcccaaagtgctgggattacaggcgtgagccaccgcgcccggccaagtgtccctcttctagtccagcatccgaacagtagatttcaaacaaatacaaagttaagtggaataggcaacaaatggaaggggtgtgagacttcaaaatgtctcagagataggacccaaccaaatccttggcctcgccaagcgcccccatcactctggcagaacagctccagagaccagccctggccagccctgggtccccatctgtcctcccctccaagctggtagctcccgcgccctcttggtctgtcctttaatctcgcgcggcggggaccggcaggatggtggtctccccgcggttttgcctttcaggctctcaagtaaagaaaaccctcgaaactcctgatctcgagcacagcacaagctccgagctggcaccgggctgagtcaagatggcaagccccggactgaacattcgaatgtccctcagtcttccccgcgcccaagccccggtgcctctgccctagccgaggcctctgcggtcttcccgggcgaggagccgattgggggccgccggacggcggaggaccctgctcctgcttcccgaactacagatcccagggtgcctctcggactcgcgctccctccctcccttgctccctcccttcgtccgtctcctcccccggcccttgttgttttggctggaagcactccggcggagtttcagagaaagtctgggcagaaaccggagccgggcctgaacgtgggaaggggaggaggagagggaggaagaaggagcccggcggccgggagagggagggagggatcgggatctggggccgagccgctcaggacctgccgcgagccccggggtgggggaggcggcgggggaggagcgcgaggggacgggacagcgggatccctcccaggagccaagccgccaagcgcctcgttcctctgctgctccccgccctcttcggcggccgcgagagcggacccaccctccggcttgacctgcgacctccctgcgcccgccgctcagaaacgccccgcgcttcgctgccaaccctgcggctccctctgtgacccgggaccagccccgcgcccgctgcccgtaggcggctcgcggcttcccctttcctcggcgttcaccgagcgccgcgaagtgacccaccctcccccgaggagagggaaggaggatcgctccgggcgcatcgaaaccgagggcgggtgggcgggcgagcgggcaccgcgcggggcattgtgtgtgtgtgtgtgtgtgtgtgtgtgtgtgagcagcgctgtgtctgtttcggaaagcgctctggggaggtcttgtccctagggggcggagcgcaaaggacagaagctccggcaccgagtcggggcagagtcccgctgagtccgagcgctgctgaggcagctggcgagacggcacgtctggaggcgaggcgggcgcactgaaaggaggccggcgcgcccgcggccccggctcgcgttctgttcaggttcgtgggcctgcagaggagagactcgaactcgtggaacccgcgcaccgtggagtctgtccgcccagtccgtccggggtgcgcgaccaggagagctaggttctcgccactgcgcgctcggcaggcgtcggctgtgtcgggagcgcgcccgccgcccctcagctgcccggcccggagcccgagacgcgcgcaccatgagcggtggtgaagtggtctgctccggatggctccgcaagtcccccccggagaaaaagttgaagcgttatgtaagtagagctgcgggcaccactccgcgggcctcggcgtccacacccctccccagtcggctcgccggcggctgcagctggccgcgcgcggggctggttcttaaacgaatgccggtctctttccccttggcccctacccctggcgggctcgggacagggtgccttgcactccctcacgcccaggcatccacttggccggacaactttcttcctccaggttccagacagcctgctttgcgggcctgttcgccccataaaaggacctagacgtccagctaaactcctgctgcatgctttttttcttccttaggaaggatggggtgcgatggagagaggagccttcttcctgctttattcctgcatctgattattgggctgatgtgtgctaaagctcccgcaccgggaaaactgccgaggttttagggctcactagccctttctttggtgggcgctccctctcctccgcccctcgagatgggttgcgggaagcgggctgtggagctgaggagttggtagtagagacaagcatatcgaacgcgcgcaaaagggaaagaaagaaaagttattacgcgccctgccgtttgcttagcagggttcacattttcgcggttttgaattgagggactttggagtttggcccgggagccttggcggtttgctgcgagaggagggcgctgggggggagcctagtggctggtgtttgggcgccttggatgtgctgtcaaactcggcaggaggggacagctgaagccagaagggatttcagttgcggtcctttcccagggaaccagagtggctttaatggtgtttgtgtaattgatacaagatgctatgtgttaaaccgttttagctgttaggaaaaatattccttgaaagtatcaaccttgctttagtggaaacctgtgtcctcttcagaggtctgggatcttattcttcctccccattggttgttttgttgctgctcccttgcaaaggaaagaaatgacacttttgtgctgacatctggatcaaatatttttctagtaaaatgtgtttgcaaaagcaaaatttatgcccccttaaatataatataaatttaatgcctgtacgaagggaacccgtttgtcgttgaggaatatctacacccagtattagagctcaggttaatcctgttagtcactgtttgcttgtatagaacagagtgaagtacacagagtgaagtatttaacttcactgacaactcaccagtgaatttctgatttactttctgccagaatttattatagacaagtaattttattgaaagactcgatgccacaaatcataagaaagctctccagagatgtgtaatgcctccaaatcctgtccatctatcagttttcctgaatatcctagtaaaaatgctaactttattccaaaaatatgaacgaggcagtgtttttttttccagctgttctaaagagaaaggtagggg

SEQ ID NO: 43299 - DNA, 655 bp, Homo sapiens
atctctcctgcttcaccgttcaatctcagtagcattggaaacaacagaagggtctttatgcaaatacctttcaggaaggcgtgcgcctcacctgtgtttgctccttcacagtagtaggaagttaattatgtgggatttgctcacctgatccacacagctgatcctactgtagtgcacatttggaaatcccacacccctttcttcccctgaggaaaaaattctttcctcatcctagattcagtgctctgtttaatcttgagcatatgagaatgagtcaccatgggtaagagtgtaatctcatttatacctttcttccaaccctcctttaattttttaagtttatgatactggatcctgctttcctacataagggctggtgatttggagactaattttgggagtgcgaggtgttgagattttttttgggaaccagtgctttctgttctgctgaacatgaagctgcatggcctaagttctgaaattcaggctatgtatggaatgtctgtgtggatgaagaaacaagccaatgcctttttttgggtcggggccggggggagactgggagaaagatgaatgaaaatgttaagatagtctgattttgtgggggaaatattcaaattttgagaatttgtgcaaatcaaagacaagcagttag

SEQ ID NO: 43300 - DNA, 525 bp, Homo sapiens
aaatgaggtcaggtatgtgaattctcatttgtagtgttgtgtcagtgcccagaaagtgtcagattttagaagattttggattttcagattagtaatacacaacatgtagttgctgcagagatcatatggcctgcaaaacctaaagtatttattatcttgccctttacagaagatttttttgttgatgtctactgtagacaatggggaaatgaacatgggaggagcaactggtagtctctgccacagtaaagagaatgataagaagggtgaatcactgcctttgaaatgtagagttagaactttgtacttaggcatactagtggcccatggggcagtgagttggtatgcaggtgattggttttttgttgttgttgtttgtttgtttgtttgagacagagtttcgctctttttgcccagactggaatgcaatgatgctatcttggctcatcacaacctctgcctcctgggttcaagcaattctcctgcctcagcctcccaagtagctgggattacaggcatgcgcca

SEQ ID NO: 43301 - DNA, 1041 bp, Homo sapiens
gtgagttcaacagcaggcgcttgtagcataaaatatagtagtgcttccagacccctctgacctagggatgtctaagagataaggagggaaagtgcaggggtctcttttcttgtggtttatgcattttgaagttattaaagcataagacaatttgttctggaatttttactcaagataaaaactatgaccattgtgtgaacattactgcttcacctccctctcctaactctacttttgtttactattccatatccagtgtctagcagtgtactcatcaaacagtaagtgctcagtacatatttgttgaatgactaaataagtggattctggcacttaattataagagctttttggaagatgaaaagattcttaagcaaaatgattttttaaagatgtaaagacaaaagaagcttatcttccagtccccttcctcacttgactctgccagcccccttcaatacatgcctcactggcacctctcctggatttagctttaaaagtttgggaggagtgaaggtgtgtgtcctcatattactaaaagaagaaccctagtgttgtgtaacagtgtttcacaggctctttcataataaacataatattagacacagccaaagtaagttcattttgaattaataatccagtatttcatagtgctggttcgaggtacagatctaggccttgtgtgcaacagaatagaattttagaagtagagtaaaaagtttcatccactaagctgtttctcattggcctgcagtctgatttctttcaaagttttggagtttaacacaaatttaggtgttcagctaataataagattaagggtgtttgtgggcaaaccaaatataatttatatcccttaattttgagctcataatgtttctgctctgggtttataagagataccaccgaagaaaaatctcaattagagtgagataatttgtaaagtaataagtagggttttttttgttttttttttttaggaagcacactagtgtagtggttaggtttttgactttgcatcatagagacctgcagttgatt

SEQ ID NO: 43302 - DNA, 2486 bp, Homo sapiens
ctacaatgtatttaaattttgtaggcgatgaatgcacaaggcccttaagctgcattgaaggctgcctaaggcagtatacaaaatcagtgctgaatatttgttaacacttaaggagaatgtacgttttaattttcatgtttgatgcttggggaaaagattacatcgcaccacctatcttccccatatattgattattcgtgtttctcacttccatggtagtgtgcacgttatttgcttaactttggcatataaattcagaagaaatatcatttaactctgtgcctaaggagggtatttagaaataaccgacgcagctaacatgagaaggcaaaaaaaaaaaaaaagaaaaaagaaaaaaatcacactaacggactttttttttttttctaacaacaaaaaaccgtgagacttcacttggggtaaccataacgtcgtcaaggctgtggcgtcacgcctctaagcggatacggcagaagttttggggccagacacaagacttccaagtttgaatgggcagcgcaaaacccagacaagttttccggtagtgccgccaacccctgtcaggcacagaagacacagcgagaaccgtgagccgttacgaaagcctaaaacactgagctcgcgtcctgccaagcagcaggcgcacaaacctacacctccgagcgctccctggaggtcccgcccactcttctctcccgagccggctagagatctggaagagggcgggccaagggtgaggagggcagtatgcgcatgcgcgctcaggacccagtcagtgagccaataaggaatctcgcgagtgttgaaagtcggtggcgtaggtcgtcgtcctggatgctggcgagatagatgttatcttccagaggaagaggaggaggcggcgaagcgttttcccagcctcagtctctctttcgttttccttttcccttcccccaaccctccgcccttctctaaatcagccggccttccttgacctcagtgacccgtctggccccgcccaccctcgtcgacgtgattcccgccgtgaggtaagcgccggtggaacctagagccccgcggaagagcagaacgtttgggagtgtgcagctcctgggcccggctcaggcccgtcgcggaggcgcggcgcaggggagcgctcgggtgggagtctcgctcctccaccagtttattgcgacgtagcatccaggcctaggcctccccgtccatccccgccggactcgggcctctggcagcagcgggtgacgcagacggaacatcatgtcgtccgcggccgagcctccgccacccccgcctcccgagagcgcgccttccaagcccgcagcctcgatcgccagcggcgggagcaacagcagcaacaaaggcggccccgaaggcgtcgcggcgcaggcggttgcgtctgcggccagcgctggtcccgcagacgccgagatggaggtgagggcgacttgcggcatggggagcgggtgcagcggggaggaggagctggctccctcgccggatcgtggcgatcggacgcagagccgggtttctctctctgcaccagactcagcttcacaccctgtggatacgaaatgatgctctcactcttgctcccttgttcttaccctattcgagctaagcaaaatggatttctggctcctcacatttaaattatttgtctctttcgtgaatcctgacaaatatttgaacgctctcagtgaacagatgttcttggttaccgtggcccgggggacccatcgtttttttcccactagactcccataattccctctcctacctctgaatgtggtttttagtttccaccaaacttcggggaagggcgaggagatgaccccttaggagcgggatgcacgggcggggtgaaggaggcatttaaaagcagcgcgtccgaggacttgggcctccttttcttcttcccggtccttgcaggggcggtatctgttgtgggcagaaacaatggcgagagctggatggccgagtgcgcagtggggataagcggggcgcagctgcttctgtgaagggagagaaggcccctcccaggcactattccactggaagggaagcaaccaaggcagcagcagctgtctcggatcccccgtctaatttaggggggatgaataagtgtaggaatgaattagagaaccaggcgcagttggttggctctcagtccggcacttttctctttttggcctctggccttaagaaaaaaaaaaattagtaccactcgctgccgagacttatgggtttgggttgggcaggggatgctgacagtactgagggggctggaaagatgggggaagctgccaggcgggtaaattggatatgcttccaggctttgcatctgggaacaaagtaattgctccttccaatttttattttcttggccttcgacctgttttgagatattttgtgagtcggagcccaaagatttctgggattttcctatccttagacagaatgaaagtaatactgctccgaagatgagt

SEQ ID NO: 43303 - DNA, 2241 bp, Homo sapiens
aataactggcccattctaaaaaggttgacctcatctttcacatcttttgttaattttactaagtctattcatatgtgaaaaaacacttcaatactggatcgtgaacaatatgtaaaactgctttggtagcgcagttactgctactgaacattgttatatatgctattcaaaataggtgcaatagttctgcataccgtttccttgacacctcccattgtatccgaagttgttctttaatcggcacacaagcacttgatacttactaaataacggcagacacaacggactgtaaactttggcaaggcctgaggcttaaacgctcaataagtaatttactgaatgaataaacagatgaataggttcagttatgaactagttgtcacttgcctgcaagttaggtgagatctagggcgagactattcaacctgcaaccatcattactaactgaatgtcctgttacctaaaaaaagatagaaataaagcccatctttagggcagaattcaactgccggacttgggactggacgccaccaagtggataaaatatggagctcggaaaagattggattcccggccctgaactgaccacacagttgagaggaagttgaggcctagaagagcgcgcaacagtaagccgtgtcggcaccagactctgttggtcctactgacacctccagcgttagaatgactaaggctccactcctgacccaccggccttgaggaaagcgcaaacgtaaaaaaagattgaaaccggagaggcgaatgcatctgtttacgctaggaccacgctcgacgtcggagaaaagcccacacactcacagtttccagacctggctgcttgccgaaactcagattctcggcacctccagcagctggcttcgccaacggcgttgaacaagggtcgcagctcaatgacgtcatatctccctacctacctccagggttccgcctcacgctctatgtcgcgcgcgcgcactacgtcctatggcttgcgcgtgcggcggctgggcaccgccattttggccggtggccgtgagaacacgctgtgtggctgaaaagtgaaggcaagagctgatttggcctctgtgctcccctccgcaaggggatcgttttctccaggtacgtgaatagcccggagaggtttggccgttagctgccatctgccaggttggaaagaatgtagggacgttctccgagagcctttggttaggccttaggtggcggagacagcagcagcgcgtggcagcggttcctgcgggacagctggaactgatggagcgcgggcgacgccgagagcttgggggcgcctcggtcttcccctccagccgacccggctgtcgccgctgttgcctgccacacccgcgagggacttcgagaatggacctagatgccgtagtctccactccccctttaccccactcccgccctgaagctaaacctgctggagaggaaggcacctttagaacttacagcactctctagtacccccacactcctccagcacccaaaatggatatattgtcacatgtgcatatttggttgtgggaagtcgtggcttccacgttttgttgagtggaatgagtcatggcatcttgccgccatgaagtcgaatactcgctgtccactcccaggctttatagaaatgatgcccacatgtcactctgcttttctcagaacagcgtgtacgcagctatgactggggttgtcccaagtagtttcccagtagaaatcctatagtttttttggtacgcttttgtagcactaggcactttctccccttacccgtttttccttttattgtatctaatactcattgagatcaaggttgatgtctttactcagaatacctttattatctcttcagggcttcgtacattgtaggcatttaatacgtattgtgaatgaatgacagccaaagccgaattcccacctcccattaactacataagcttattttctcttttttgatggtaaaaatctataagaggaagaactgtccaaataacatgttttatttttttactctttcccaacaggactgctaactagtcatttatgatagtggcatttatgttgcagtagtttgtcccatattctgagaatattcattgtataccagccacctgacactaatactttgttagtgtaaccaaaggctcagaacctgtatttgaaccaaaagctgtttggggtttgtgagctttttgagaacttagttctcccctattttaaaaaagggag

SEQ ID NO: 43304 - DNA, 4265 bp, Homo sapiens
gtggagctagtcttaaagccatttacctagcaacaggtggcaaacataagttagtaaagcttattttcaatcaaaagcaatggtaggcatatctactggttcttctcttttaacaaagattttggcacatacaatctatctgaacctgttgctcagaagcaaaactcttagcaacttctataaagtgtgagagtgctggtaattcacaaagtcaagcactgcaagaaaagcaaggttaaatgacaactgtctaaaatgtaaattattgtgcaaggttgataacacttcgaaagaattaaagtagtatgacaaatatctctgcaaattaatatatacatgaaagcaaactagaaggctttcccatttttacttgggacaagatagtgataaatactgggaaaggctgagacactgttttagcaagtcctccaagactgccctatttttagctccatggctgtggagctgattcaggtcaggcctccggcaggcccaaatccgtaagtgtaaaaaggaaatggcctatctaaatcagataatttggagagaaagaccaaaatcctaactcgagtctcctccccgtctttaaaaactgccacttagattatttactttgattccttcttagaaatgatgagtatttgtgattttataggagaaattgttggcaaaaaatataaattattggtacacattttaaaagggaagcctgacgctggtattacttcctttttcccacacacacacactttgcctttggcgatgatggctataactgtagcctactgaataactgaacttcccccaaagttcaaggtcttcagctaagctcatcagactaaaactgagtcacataactgggaagggtagtcccttatgcctaacctaaaccccattacaaaatacaataaaatgtgttacctgatgtaacaaagagttcttagtgtaaactagctcttgccccttttctacttaaaaacagagatcccactataataaaagaggcttctgtataatcaaggccaccgagtatctatggtatgcactacggaaatcaggcacacccttctgcttcaatataaactaggactcaagataactcaaatccaagtaagcgccaagcttcccttaccgccatttatttctacctccttgcttaccaaactcttgctaggtctaacagtacgttataaatacgggctgaattcacttccacctcttccctaggcttctggaggtgctgaggagtccaaggaagcaggacagacagagattcagaaaattcacaaatggggcagactatttacctactaacaataaggaccggaggcagtgggtggctgtgaacataccccacagcaacactgaaaatgagaaacggacagagcctggtttggggagcttttggaagaatttttcaatgacaatgtccgcaacataaagcaacggtttgtgtccgttaaatcaatttcttgttttaaagaaagattttacgctacctatggtaaataaatggcttgcctttcaatgtttaaaaatgagaacagactggcctccacatgttaagtaaaacatttactcacaaatagaaattttaaaagttatttagcattcaaaaaaggtgagggaaaagaaaacagaaacatcataaaaaccccacaggcgggtagggaggggtgtgcaatggggtgtggggagcaggtcctaggtcaaaggaaagcacatgtgaatcgtctgaaagacacaccagagcagaaacttttatccagctacttcggcagctatttttcaatataggatgggttttggtgactgcacacctacaacacacagtgttatataacatggaataagctcgctcaaaaaaaaaaattcagaaaaatcttcctgagcaactgtgttagaaaatggttttgaaaagctccagttacacgtaccctttctactaccaacatcaaaacaggcttttttaaaaaagtcagttctgtttagtatacctacacagcccagcagagcataataaagggtggaacctactcaagacaaatccttcaaaatattctatatttgtaaaaggctggttttctcaaacggcagtttgcccatttgattcaagtgacatgggcgagcttgcctaccctacattccaaagtccagcagcaaaccaaaatatgttccacaagtaaagtttgatccaccacttctagtaaacacttggtttactggagtggggtgagcgtggtgcttctcaaacgaagggaaggaaggtgaatgcggaacaaaagtaaaaaatatcatgtcgccaggtccccagcaataaatcaactgtacaagctccgagcaggcctcacaagttgtcctcaactcattacctcttcatcaggagagagacaccccgttaatttgcgggctttcgagtttcaatttgcacctttcagacgcaaagcagcgtcccactccggcgttacaatggggcgctgtgacgacagccagggcacgcgcagccccggccgtgggcggcccggacagcccgcagctgcctccccacccagacccgccgggccgtccccgcctcccctcgaagccctccccgcccccccgcaattacctgctccgccacggcccggaacaggcacgacccgtccttggcgaccagtttccgatacaagcccagtttccgcagataggcgtccatgggcgtcgcgtcctcgcggggccccgcgccgccctggtccccgccgtcggggacgccgacggcagcctccatgttgctggtcctgctgcaggccaggcgcggcgagggctagccccacatggccaggccgccggctgctcgacgccccggcctggggcaggcggcggctcgggctggggctcgggctccgcgagcggcggcaggcggcggcggcccgaggcagcggtccgcgctctccgggcgcatagggaagccctgcctaatgcatggctgtccgcacgcggccgcctcctcggagcgaacacgcgcccacgacaaacggggggagcgggattaaggaaaaccccgagagtgagtagtcacttcccgacggcctcgctgcctgactcaggacccaggccgggggtcgccgcccccacaagtttcctcctccgtaccggtgtgaagcgagaaaacccccgcccctggcgcgcacgctgggccggctcaggtgaagcggggcctgcgcccccgcgcactccccacgccgggagccgaggaaaccaaaaagaaagacgcggcctttcgtttccccacctcgctggagggcgccggaggggcagggagcgggtgggggcgcccgggagagaacagcacctcgcagcccagaatttgttttcgctttcggcccgacagcggagaggacggcgggagatgtagtcttggcagccgcaggaagtcggcttgcggcgggcggggacgcgctggccggcctacccgggggaggtgcccgggaggcgcgcggactacaagtccctacagcgcgggcgcgccgccgccaccgccaccgccccaagccggcttcgcgctgcactggcgccgcgtccgcgagcaggccgaggggctccgccggccgatgtggggcgacctgcgcgcgccacccgccaaccctgccgctgcgccgcgggaatcgcgcgcgccgggctggcgtggagttgccagggacacggcggcgcagtgtcggccctttgtgtatttctttccagagggcgcacctgtctgctcccttccccccggcctgctctcctggtgtttccatggaggtggctttaacggcttaagcagaaaatagagctaattggctgaggctccgggaactggcacggtgcgggacgacacactctgtccataaatcaaccgtggactgctgattgctattagtagtacagctcacgtactacggcaagatgaaggctttgccaaagacatttttgttcaccctgtcactgtagctgagcaccccatcacagagacatgtcactgtcggaagacgttagggtttttttttcccccttaaaaaattcatcttgtaaattgcttgataacatgctgactggactggccatggcttccaccagtgctcgaggcttcagctcaacttcccaccctccgacgttgaatggcagggaattgacaaagttaaattatgctttagaacccagaatttatccagcatgcttctgttgcaccaaaattttattttgctaagatacaacatctggtgtccttatttaaatacatggttaatcat

SEQ ID NO: 43305 - DNA, 851 bp, Homo sapiens
acggtcacagttctttctggacaacttctggtagtgatgcatctgcaaaaaaaaaaaaaagaagaaatctcaaagcaaccagatttcttctttgttctctctctcagattttcctcttttgttttttcacatttgtatttttttccaacacctgtaagaagtactttctctgtccccttgtcttgtttgtagaattatcagcagtattgctcctgactgatgacctcaacaataaacaaatgtttgaacaaggcacatgccccttgtttcagcttttatatttcactctggctctttatttccctttagaaccatgatggtcagagcatacacattttctgatatttcttcagaatattatatcaggacactgctttcatttcctttcttcataaactctcgatttctaccaaatggcttctgtggtgaaagagtctttgggcctccctgttgcccatacccaacctttgagcctaacagtagttctggctggaggatgccctttagctcacagttaagaacaagggggcattttaccccaccgctggtctagttaatttacaaacaaacaacagagcaaatggcccagctgctgcgtgggccttttcctgtgtccatgtctctgacccccagaggagtgggtttcccatcactactaatgtcaactggtgcctgatcatgatcctgactgcccctcaacctttgttttgagtgatatgaatgtaatcccatatataaccagactctaaatctgaattcacaaagaactataattttcaaaatgacagtggctgcttcttaactcttagcagtaattcttaaatcttagtgtgtttcataatgcaaactcc

SEQ ID NO: 43306 - DNA, 667 bp, Homo sapiens
aaagtaagtgggggaaggagggagaaaagaaagggaaagaaagaagaaagaaaaaaagctcatcaggtggaaaacactattttagagatatttggaaataaatgtaccccggtcaacttaagagttatgatgtatttacaaactagtaaatggagtcatttatcttaactgcaaatgactgagaaaaaatgaagttgcatcttcaaattatagcattctgatttccacagcatttttggaaagtaccgtgatcaataggcagcacttcagagtcagtattgcaggatgattaaacagagtggggtcattgaagtcaaggtctgaattcacatttcacaaattaccagctgtgtgaccttggataagtcacactgtctctctgagtctcagtttactcacctctaaaatgaaaatactgttggctctccatatccataggttctgcattcgtggattcaaccaacctcggatcaaaaatatttcggaaaaaatggacaattgtgtctacacaaaacatgaacaggttttttttcttaccatcatttcctaatcaatacagtacaacaacaatttatatagcacttactttattgtactaggtattataagtaatctagggatgatttaaagaatgcaggagaatatgcataggttatatgcaaatact

SEQ ID NO: 43307 - DNA, 1421 bp, Homo sapiens
gcgtataataataaatacacaattactggttgtgacattagtgtcagtacattgtaatacttttatacattattatcagcatcttcaaaatggttaaaaatgtgtttcaccttaggaatatgcatatatgagatgataggtatgctaatacttgcttttagttttaagaattttacatcaaaatacctgtggtaagtcaaaaggcaaggagaactttaatgttatatatgtgtgttttattgatttataacttgcacacaataaaatataataattttaagcacacaatatgatgaatttgacaaatacacagagtcatataatctttacaataattatgatatttccatcatcccgaagaggttttttgtgaccctttgcaatcagtcccctacctaaaactcttgacccctggcaaccaaccactgacctgactgcaatcactgtagttttaccttttctagaatttcatacagacagaatcatacagtacacaatcatttgtatgtggctccttgtattaattttctattgctgtcttaacaaataaccacaaacagcagcttaactcccacccatttattatctcacagttctgtggggctgaagtccagctgcagtgtggctcaacctggacctctgcttagatttcacaagaccatagtcatcaggcagccctgcactccttgctagaggccctgggggagaagcgatccccaggttgcttcaggttgttggcagaattccacacagttgtaggactgaggtccccatttccttgctggctgatagctgggggccatccttagttcctagagacctgtctccaatccttgcacatggctttaaaatgatcctcaaggatcattttgacttcctcttctgctgggtctccatgactccagctagagaaactgctgtgctgttaagggctcatgtgattagactgggcccacctgcatcacccaggataattttacattaacgtatttagccttattgacatttgcaaagccccttttaccatttaatgtagcatattcacaaattccagaggttggggtgtagacatctttgggagggcattctacctgccacagagctttcatttaatataattattttaagattcacccatgatgttgtatgtatcaataatgcatcaatttttactgctgagtagtatgtcattataaggatataacacaatttgtttcttcattaccagttgatggacatttgagctgtttttagttgttgtctaatagtaatgaagtcactattattggaggtcaggaaatgataccctaaagtatgacactttgacaccctgagtactttgaactaaagaagcagcctcacagccaaggtctctctgatcttttccaggtccctcacccatctcttgcccctttgcttca

SEQ ID NO: 43308 - DNA, 739 bp, Homo sapiens
acgtagtggcttattcccatcactcacttggggttttgtctttctcgtccccacaactctggcctctgcaaggctggaggtcccaaagtgtggcccctctctttccaagggacacagcaagggtacttttgaactacaagctttggctgcccccagcacactccctataactccttgtgactagggattggccagtgattagtcaatagaatggcaggggtaattgaccctgattaccaggaagaactgttacgagatcctggccagcttgctccaagactaaaagttccatattttgttttgcttataaactgtttcccaaaaaatggacagtacttagattttctgactgaacattatattgatatcgctgctcaaaagtcatttgggttctgcagagcaaaaaaaagcaagttcacctggatgacacataaatcaaataaaaatgctctggacatgccgaaaccccgtctctacaaaacacacacacacacacacacacacacacacacacacacagaattagccgggagtggtggtgcgcgcctgcaatcccagctactcaggaggctgaggcaggagaatcacttgaacagggaggaggaggtttcagtgagtcaagatcacgccactgcactccagcctggatgacagagtgagaccctgtctcaaaaaaaaaaaaaagaaaaagaaatgcactgggcagatgagcagacagagaagaacatctagttttgtt

SEQ ID NO: 43309 - DNA, 795 bp, Homo sapiens
caattactgaactggatcttttatttttacatgggcacatggaaacatttcaaagtaaaatactaaatgtgacttgtttatccaaaacagcttataaagaattaataaaaacaatgtgaaaacttgtacaaaatgaaacagcaaattaaattaatccagaagacaaatactattcccgtcttatagattctccacaccagatgtgataaatactaatcagatggcaattgtgtgacacagttatgatgaaaattcctaggagctatttttagcttttttgccaactgaaaatcatcttccaatgacttcattcaacaaagtgaaggtccggacaatcctaacctgctgttggacaactgtcattgtcagtcttaggacaacacgtggtgaaagtgaaacacaggggtgcaaacatgacttttaaacattaacaaatgtgtgtatgtgccacgtaaggctcattcctttaatctcattagtgttgggtaaaagttttctgtccttccagtttatctcatcaatgaactgcttcaaatatgtaggctgtttggggctgaattgtgtccccctacacacattttaatacattgaagctctaaacctggtatctcataatgtggttgtatttggagataaggtctttatagaggtgaccaagttaaaatgaggctgttagcatgggctctaaactgatctgactcatatccttataaaaaaagagtcggtcataaaaagagacaccaggcatgtgcaggcatcctgaggaagggccattccagaggaaggaccaggtga

SEQ ID NO: 43310 - DNA, 2596 bp, Homo sapiens
gttagccaagagaaaagttgactcttgcaagaagatattttcaatgtctatgcagatcaggtaggtaagagttaagtgcgggggagttggcatcatctaaaagactgtagaaattggaccaaaaatgtggagttctaaagcagtatctccttatggcatgccattatttggagcaacaaggttacctactcgaatcactggatcctgagttgacacaaaacgcatctgttgactcagggtttgtataaccacgtgcagtatttactaggctatccaattctgggtacgtacaacttctggggcctgcaaattattggagagtgagtgaggggcaacgaaagatagacataaaagggcgcgtctcgaaaggtaactgtcaacatgcactccacgtttatagaacgattcagtgggcgcggtggaagcgttaatgaacatttcagaaaataaacatatggaacatcgaaattcacttgcagataatggactaagtccgctccaccgggactaaaaaggcagggttaggaaagcctgaacgccgccacactgttttttctccaggaagaaacggggcgtggggctgccggtagaagggggtggctccggccgctcccccgcgccgtcctccggccccggccgcgctgcgctcacgccggccgggccgggaatttggagaggatccctggtcgcgcggcagcggcggcggcgcgcgggtgagcgggtgagcgtgtgagcgggcgggcgggcaggcgagtgcgccgggtattggcagctgaggagtggaggctgggcagctccgactccctgacgccagcgcgaccagatcaatccaggctccaggagaaagcaggcgggcgggcggagaaaggagaggccgagcggctcaacccgggccgaggctcggggagcggagagtggcgcagcgcccggccgtccggacccgggccgcgagaccccgctcgcccggccactcgtgctcccacacggacgggcgcgccgccaacccggtaaaacgaaacagacccgaaccgaactttcccttcatgccgcgtcccagccctcccctcggcgccccgggctttccagcgccgccgccgccgtctctgcacgcgtggggccgccgcggtcgtgctgggctgggggcgcgggcagcggcgggaagggggctctttctgcgcggggcgggccgcgaccccccccccccatgatggcgcctcccgtctgctcggaggagcgaacctgctaccacgtcttctcgcgcccagcccgccgggctcccctggtgtctttgttgggtcttctgctgtgggaagcccagttcccgggcccccgagcctcggctcccgggcctgaccgcgctgggatctccccggccgcgctccccttccgcgcgctcctcacatctctcccgtgctgccgccgggccgaggcccgttcgcgtggcccgcggacccattgtgtcccccgcgccggcggggcgacccctgcgggagctggaggacgaccgctggcgctgctctccaaggcgcctggtggagcgggtctcgcgggcgggggaccccggcgccccgggcccctccacatcccgcacgggttttcttctcggccccagcaagcctctttggggtcgaggtcaaggaaagttcgcaccgagatcccctctaatttattcaaaggtttggcggcggcgcgtaattttttccccctcttccgcctacacccgctgcgtctcctggtgtctcgttcctttccctttaccggagtcgattgcctcactgcatgtgtattcgtgagttcgcggttgaacaactgttcctttactctgctccctgtctttgttagtgtttctcggggttgtttctgtaggaaggtgggggtggtgggcgtgagagacagatgtgggcttgtttttctagttgctgaaactgtatgaaggctttaaagggagaacgttttcttgatgtgctttaggaggggaggaggaacaaatgcctgccagatctcacagctacagtagctgagcttttgtttattttgaagagcatgcaatttttaaatacacggtgcaagataaccagtaaaggcgcgttccttctgaaaattgaggccggtctcagaaccatctcctgagaaagcatccttttcgtgagtgctgagacaactgtcctttttctctgccctcccccctcttttctttccattgtatctgaagtttcaaagtacgtggaatgatacagaagttgcatgatttctgttatttcttcctgttgctgaaactctcagccgctaaatctcagaatgcctctatttcagaacatctctgggtctaattgcctgttgtggataacttgcccacacctcagtaacacaatgagaaaactgttccctgcccatgttgatttttcaaattgtttgtaattactttaaattgtattgaaggtaggtggaccgtgttaaaaaagaatcggaacagaagtgttcactgccccagcattttcaattggtataaatattgttgcatcagtgttattctgatgtaggtgccagatctaaatatgctgtactgattaaagtgtttgttctgccctctcccact

SEQ ID NO: 43311 - DNA, 622 bp, Homo sapiens
attaatggaaacgaaagccttcttagtagctgagcgtgtaaaggaggagaacttgggttctgaagtcttctgagaatattgtcttgggtttttccattgtaattggtaaataaattactttagggaagttagcagataagactgtactgaacaagtgatcagaggtagaaaggactagattcatgggcacagggctcacctaattctataggtgatgcttgcttatatctaaagcattatttctctaaaaccagtgaaaaactttgcatttgcttcttttagctcttaggtggagggagctctcacattctggaagagggggttgctgctatttgttcagtttctcctccaaggtggccaaatgaatgtttgcaattccagtccagtttttggcagattgaaaaagtctgtcattgattgtcatatgagagtggaatctggccgatgtcaatgtttgtttcagtggttagataaactttgatttttagaagttattctttcaaataacagatttctgtaatggaaaaaggacaggaccaaattgcttgtgaagatatttgaataacatagaacatttttattttaataagaaattcatgcattgaaaaatttgatggatatt

SEQ ID NO: 43312 - DNA, 1350 bp, Homo sapiens
cccaaattattacgtagtctttatgaacataatttttaaggtctgtataatattccattgagtggatgtatgcagtttacttaggtatttttcaattattagatgtttctctttttttccctattataaataatgctctgatgaaaatctttgtgcaaaaacaattttccctttctggttcagaatatttccttagagtaaatttctgaagataaagttgctggaataaagatctcaatatttttaaggctgctgggtttttttttttttactagatgaatacttttttgttagtgtgaaatgtttatatttggacaagagggaaggaaatctctgtttgctgactcatgtttttattttgcactttaaactgataaggccacttagcttttgacataaactaaggcaggaagtacaaaaaggggcagaaaaaaagtagttgtcttgccaaggccatagtatcatggactcatttgagttccttatatgaggtaggttacctgtttgacttgtatattaaaaaatgcttaactcaggtaaaaattagtcatcagcctgcattttgttttgtctgggcatgtttatatgcaaagtgctgtgatctttcactttaattttcgtgagtggcctcaagacatttaccacctaactggcttctataatgtttggatgcccttggtttagatttttttttttttttttgctcccagtatgaagaaatctttctgtattgaagatattaccttagttgtctttctaaaatgtagatctaataatgctaattctcagatttaaaaccttccacttgtccatatgataagattcttcagtcttgccccttccttcatatcagcttgtatcatcatctccagcggattaaaccctagcatttctatcatgtgtctgttggaacaagccatttggaaaagtggtttaaaaattctggctctagagccaggcaaaatgggttcagatccaggttctgccacttatagctgtctacataactttggacaagatactcaactattctatattttattttccttacatgtaaaataaagaaaatgatagtatttacttcacagtaaatactaaggtattgttgctaagattaaactggttaatagataaacagcagtgaacagtgtttgtcaagtaatgaacacacaaaatgtttgctctattgttttgcaaaattctacttatcctttaagtctgatgttttctcttggaaaaaaatgttctgaaatctctggaattgttctttccttttccgtttttatatattattgtcttagtttgtaggccgctataacaaaataccatatagactgagtggcttataaa

SEQ ID NO: 43313 - DNA, 1163 bp, Homo sapiens
taaagcattattggaccacagctgtattcattcattacatattgtctatgactgcttctgtgttacaagggcagaattggatagttgtgataaagattatacagcccataaaatcttgctggcctttcacagaaaaaattcatcaacctctgacctagatgaatagtattttgaagtatcctgatagctgataaaagccttctgctaataatgttgcagtctgctttaagatttggcacttgtaaatcactaaagttttgctctttgaattatagcaaattgatgtggtagagttgcttagcaagcagggaagatagtgtatgtttttagctaactacttacatatgtaaagcgactaacttatgtgtgggttttttcatgagtattttccttgttttttttttgtgtgtgtgtgtgtgtgtgtttgttattgttgttttgttttttaccaaattctaaagtaaagtgcattttagtatttgtggaatttgatgttaagaacacagaggtgcttctcccttagcagttgtagtctgggcttctgatgtggactttctttcttttcctccttttattattgtacacccaagacttcataaacctcagatcattatatattggtatgctggaaatatatggtttgtattcctggaatctctaaaggagtggtacaagaggttttactacagaaggaattcatctttaaaaccttttagttgcaaatgtttagaaccatgttctgtttggagatttgttagtcttaagagatttgacttaacaagctgcatcctgtcagtaaagttgggtaatttccattgttggcccattctgggaatggagagacaaaacacacctgctctgcatgacttaaagcaaatataaggaagttagcatgaaatctggatgagaaagatatgattcattctgtaagaatggccagctggcaagatttcttcctgagtttgagaactggagcaacactgtagctgtgatagttattggcaacttaatatgaggtaaagtaacttcttatcaataattagaaactgattttcatggctttgaataagcataggcatacttagtctttgccaaaagtaattcatttttatgccagtacctttggcatattttcagtcttctattgttctcttcccacttat

SEQ ID NO: 43314 - DNA, 2885 bp, Homo sapiens
tcatttagacttgtgcttaattttctgtcattggctattgagtctacaatcaatctttggagtaaaagtggtagtcttttggtccaaatagtaataatgaaaatggtgagaccagtaattcattttttattattctgtattcagtaagaatcaacctgtatcaaatagctgaaaaggcctgaagcctcccaaatgcatatcattacacaaattctgtgtgaggactgacatcttggtttcatatactaattatactgcatgggccccatttataaccatatctactcgtcatttgatcctggctactgccgatggatgctatcttcatcacattatagcaaacatttgggtgattaagtttttctcaaaaattctagattagcatacaacggctttactacttatatgtcatctaagacgttttttaagaattagttactactacgcccaacgcagtgaggtagcaaatattatgcctgtttattttcatctccatttcaggcttgcgcgcctttcccccctcgggacttcccgaggacacccctgcagcagtgagcccgagtcctggctttggctgcatgttaagaaatattaatcaaaatgaatgcgtgccctttaagagaaaaaaactgtgggtccttcagcctttaaaaaccatgccgtggtttaaaaacttaaaactatatttcggcagaacgctgagcatttcttcaaatcactctgagaagcttgagtgtctttaatttcaccggtctgtcaaacgtaacgcgtctctccctcaccccacattttaagtttccaaggagcggaagaagggcctccgggggtcccggccgccgcaggctgctgggggtgaggacacgactcggcctccgtccgactcgagggtgtcgcgaaggccaggagggaacgaaagttaccctcgaacttcggaggcgaaagatttcatgtggatcttaaaaagggcaaaacctaccccaaaggccgtaaaccgccctcccctcccccgccagagaacttcccggcgcagagcttccgcagcctgctgcaggccgggagaccttcacgctcactcgctctccgccacacgccggaactgcgcggccacgtccacggggaccctggccatgccccgcaccgccacccagccccaggcgatccccgggccccacgcgcctgcagtcggcgctgcgcctgcgtgggaggatccggcggaaggggcggggtcaggtggcacttccgtggcttcgggcgggtgagtatggggagtgcgcgcggcgtccaggagtcgggactgggctcccgcctacggccgccctcccgccggggggccagcgcggtcctccggggcgccccctggaggatttggggtgggggaaggaaaaggagagtattatcgaatattctcctaatattgatgttcggggtgcggatatgtgtggacaggcaggagtcggcaaatgggttcaaatggaagctttaacaaagaaaggccctgtacgtaaacagtgttttaaaattctcatcttggttaggtttctcaggttatctctgagccacagcaaggcagctttgttaaggtggctcttcccttgtcgctgccaaacccggtaaatggttaacctgaggccgcgtcagagaaagccactatgactcctaccaaagagtgaaattgaaactcttttctgggaaatcaaatccaggatataaaagttggattcaaactaaaagttacaaacagtatctaggttccgtcacatggcgtgccgggcagggtctaaatctctttcagcagagggcatgctgtcttcatatgtatttctcattagaaaatgaaagacgacctaaaccaaaataatataaaaattttttattatctgtcttaagagttgtaccctaatccatatgtttagaaaacataaactaataaaacttttccaacttggtagaaagccaaaagtttccagaaaaactgtgtggattattcagcattttgctgttgtctacaatgttcagaatattcttttacaataattttgcactaaataccggtttgtgttcagggtaacaagaggtttttaaaaagtcaaagacaaggacaggttttttaagggctgtattctattaggagagacaaaacaagcatgaaaagttacatatccataagaaatgtaaatcaccatttgagatatttgaagatgtcaaaagaaaacctttatttagaatggaaagagctggtgaatgctcgaaacatttaccatttagctgattgttgccatgtgggaatgggggtctctcaaacgcagatccgattttctccaacacaggccaaagatctgtatttttacgtattttttcttgatttttaatgttacttgcaaccaatttagttaacacacaccttctgtgggtgggccaggtgcaactagtttgtgacctctgcagattttcaccttagtacagtcctacacttacacaatggttcagttaaagattttttgactttacagtgggtttatccagacacagacccgattgtaagatgaagactctttgtattcagaaataattggaattagaggtcagaaaaagtcctagagactgggatggtcaggaaagattttaagctgggtagtataggagagatatcatagagggggaaggatgtaaaagatgagttaaatcttggggttgggagagttggcaggtttggaagatagtaaactctccttagaggaattttggaaaggcaagcgcaagaggtgctgctggcctggggactacactttgagaaccactgtcctagggtacggtgaacttttggaggaatttgagtaggaggctaaggagatcacattcacctttcagaatgagtcttgctgtga

SEQ ID NO: 43315 - DNA, 441 bp, Homo sapiens
cccgagtagctaggattacaggcatgcactaccatgcccagctaatttttgtatttttaatagagacagggtttcaccatgttggccaggctggtcttgaactcctgacctcaagtgatccacccgtcttggcctcccaaagtgctgggattacaggcatgaactactgtgctcagctatttttagtctcactctatcacccaggctggaatgcagtggtgatcatagctctgacatcatgcttggctccaatatcatgcctccaacatcatccttggctaattttttttagaagttttttgtagagatggggtctcattatgttgcccaggctggtatcaaactcctgggctcaagcagtcctcccaccttggcctaccaaagtgctgggactacaggcatgggctaccatgcccagcctatcaaaatgtactttaagaa

SEQ ID NO: 43316 - DNA, 497 bp, Homo sapiens
caccacttcatccttaccagaagaaaatgctggcaaaactgaaaatcaaggacttttggacccatagggaaccaccacaccaaaatctggagacaggtgcacccagacagtcacagccaagatctgcttatctagagtggaaaccactggagccatgaactattagattattttgaaaaattaagtgattattttgaaggattgctggaggctgagttcggactagtgcaaaagtgagaaactcctggactttgcagtcttaggggaatccccagagtttcacggactgtacttccaagaacagtgttgtcacagtggagattcaaccaaaaaaaaaaaaaaccctctcatgactctggcaggaggcggaaaagagaaatcattatgtaataagcccagagccttctcataggcctactctccagggcaaaagactgtctgagctttttcccagctgggataatggcattccttccactccattcccagctgatgct

SEQ ID NO: 43317 - DNA, 4787 bp, Homo sapiens
gaaggttaagagagatggaagaaaatgcaggatcaatcccatctcctgctcatgaatgatgtctggtttggaagagaccatttaattcccaattctgtggaaaagtgacctttgcggatgagcgagtgttgacaaccaggccatttttctccagcttcatggacggtgcgattctgaaagcaaggtttgctcatctgaggattcagaagctgatcgatactccgattatggctggggaggaccctcatcgccatttaactgagttggaaaatgaagccacaaggctggaggcgtggagtttgcttaataaacaactttgaggtatggggccctcccaacaccctccccccacccgccccgcccaggaacgtctggaccctggcaggttggctttctgggacaattccatgggcttcatttatcagttttttccctttttaattggtggagagagacaaaagtttttataatctttattaaattttcctttttaaataaatacttgggaccacatttctctgctagaaccacagaaatggtgctgcggccccgaccgtcgggggctccggcgtcacagagcctgtcccttgtatctgggagccccggggaaggcgcaggggcgtgagaaatgctctttgtattcagagcggtcacccagcagagccggagccttccaccgccaggttttcctccgcgcaaggcgccgccgggaagcgaattggctccgacagtcgcgggggcgggggcggcctcagacgcggcgggctcgcgagctcaggggcggagtcgtggccctcccgtcccggctccctcggtaggctgcctgcgcccccaaagccgcgcccacggcccgcccacccgccgcctgcccctcccctccccggtccgcctcttcccgctcctcccggcccgccggagcggccgtctccttcttcctccacggcccacctcttctcccccacgatcttcctcccctagcgtccacaggccgcctccgccgcctacgaccctcctcctgctgattcccccccaccaccgcccgcctcgtcgcccccgcggagcgcgcgggagggagggaccgggagcggcaggggctgcacatgacctggggcgcgggaaggagcccgctgccgtctaggcccgcgaagggccccggcagccgccgacttctgaggaaaagcagaacggtgtttggtttactaaagtagccgcctcctaccactcttcctccccagccccgctctctgctccccacacccccttccgtttactcctagttaccaagaccgtccttctcttaggatttctgttgaatagaaaatacaattaaaagtcgcagcaccacccctgcctcccgccccacaaactcctagtgattatttttgtctcttagccctaggtcgggttaaatacattccccgggagccatctggtctgattcccggcaaccttcgtatggtttccattaagctctccaaaagcatgcattgaaaaggcagccctgtagccacttaggaacctccggagttttgccctggccagccccagtagacatcccaggcagaaggagagaaaggcctctgtttaggttccgagtctagtacctcatgatcctggttttaatctcgaatttcttggcttttcctagtccaagaaaatacagttctccaaggtaatggctatcattaattcatcatttgttttttactatacgcagaggatagctgattagaattctgttttaattctaaaaatgaaggctaacagctttacagataggttgcaacagtaacctggccacacaagttcaatttgaccagcaacattggtatggtggggtctacaccttctcgcctgtctgtccaccattccttaacccccaaaaggcaaagaacaaatatttgcttgtggaaacatattccctcacacgtgggttagggcttgtgtccaagaaaaagggaaccggcaggttcatagactctgagtgttgtaactagagtgttccttaggattcatccgagatgtatatccattgattgaggacactcagaaagtggaggggcttcgggaaggtcacgtggctgatgagtacagtactgcggcctaatttggggatgggagggtggggaagagacctgggcatcaagagctttatcatatacagcaaggaagattgtggtcaaaccaattcattagtggcacatcctgaatctccccagtccctcagccgcagtcccatctctgtcctgctctgtgcctccctgtttgcggagttagagccctttgctgttcctcctgtttccccactcccgccctgaccgtgtgatttttatttgggttttaaaaatgaaaccaggtgctgcataaaacaaaagcaaagtaataacaaggaaagactagccaacgcctgaggaatgtgctgagttttatgactcaggctgtcctggcaaagagcttggactgacagcgagaggtgggtgccacggagcacagaccatacatggcagccctggcctccccagataggcatggtcaaggcagcctgtgactcatttcacaaaaccagagactcttgttctttgtggagcaagacttcccggaggctagagcaggatgatcgtcaacttttctccttagagccggttcagtctgataaagcaggggccaccccggagtttggaggggaagagagcccaggcacaaggccatccctgggaaagaaacaggcttgatgcacttgggcgagggctttggtgcagtgaggagatgaataacatggaagttgcaacgtgacatgaaaattagcatgtattgtagtggagacaatggcttgagagttccaggtcggggattgccacagtgccttggagaaggggactgttggagtgctcctaagcctggaggaggtgtttgctcctcctgagtgcatggagcacaggaaaagattgtcagatgccagtagggtttccgaggtgccattcctcacgcaatctggaagagtaactatgggcaaaatagtagactttgcataaacacccagagagccacccaggcacacatcctcacattgtgagaattcttttcaaatgagcatagtaatgggatgaggtgtacatttttttctgttactaagagacagactgggagagtgagaatgcaaaggagaatgtctctcctagcagaggtggtgggaggggttggaatttggatgacaaggatctgtttgtgccgccttcattacacaggcctgagtggaatgggactgatagggcttcttctggtttctgcttctggtttcttcttcccagagaaggctgtcactttttgaatgagaatgaactttggctggcataaatgaggtcttcgtgcagcagccctatggaacagggacttgtttttccttatcttctttctctttttcttttcctttccatggaatacccattgaaaagctatggtgactattccataattgcaggcaaagctctgcttaacttgttccttaaagtctacttacctggaaaaataaagtcttttaaggacgatgacttcataaatatttatagtgggaacaggcatcactctggttctgcgagagaatgggctcattcaattttatttatgatgtgacacttgggtgagtgacatccgtcatctgggtcagccctacactctgttccagtgaagcatgtttatggagtgattatgcctgcaaatatttgctatatttaggccctctcctcccctaaccccctcttagacttattaagtccccaaaccagcaaaaagccaagctatggtctggaaggtttgaaccctaatgacaaggcacaggggcttgaacacgtgctgtagaaggatttgacaaactgggaggcaattagagtgggaacactgttattatagcattcctatattcaggaggttttgctggtcctgtgtctagcaggtgagcgctctcagctaggcatgaggagttttgacaggtgacgagcacagccctgagtgacgaatgcagaaggatgcttttgaaactctttccttcccagggagctttctctggacaggatttcacaggccctcagatctgtcaccatgcaccctggggctttaggggcaggacctgatagggactctgtgacctgagctgggtcaaggtctgggtgtaacctgaggcctcctctcagccacacctggtccatggctgggcgcaacagctgccgtccatcagctgtggagcagggagggccttctctggcttcctggctttcgagtgcacatgccctgacctaggcatttcaggctggacttagacatacttcaggactcaatatttgctctccaatcggcttggccatctattgtttatcctgggaagggccaggtcttggcacaggagcctgaagcgttgccagtgttttatttttagagacaggaaaatgtctgctttttggcagctgctctttttctggcacacatcagggatggtgtaaaaaagttcaagtgagagattccaagccctaaattcacggcctatgacacaggcaatagcaccatgagcctctcaataggcgcctttggggaacctaggatctgtcattagaaggccttctgggcagaatagtggcctccctgccacaccctggcggcgagagtcctctctagttcataaacctcagagtctgaacttctcgtgagtcccttttgaatgcatcagccgatctgaactattatagttcttacctccattcatctccttatctaccagtccataatctggttcaact

SEQ ID NO: 43318 - DNA, 825 bp, Homo sapiens
ttccttaattaaacccattcggtagaatttaggaaggagttctatcaaaatctgcttgacaatacattattatcaagtagagcactcagttatcttcagatccaatttgttcattttcaggaggataaaaatgaagcattatattccaggacctctcctgccccagagtaacccacaactgttgcccaaggttgggcaacagtttccacagtaactaagtctctatcctgccccaaatcttagttcaaggaggaacctgaacgatcatcttgttcaatgttttctgttttatatataagggaactgaggccaagagaacctaagtaattaccccaggtaacctggctagtgactctgggagagcagagacagacccacggtgtcattcaagctcttccaagccacatgaaatcaatgccaaagtctacaaacaaacaaaggagggatttttcttctcttcctgttctttggctctgagtttaatactcttggttacacatgtgcagatttagcaacaatccagacactagcacttttctccatttctgttattaaaagtataagcctagaatatttccaggcacagagatgttagaaagtgtaatatgtcaaaacttacaataaagaaggaacaagaggaagatcaactagggaagtcctaacagccaatcctctctgaggtaaacatggtattactgaagaaagttcccttgaacctttcattgccatttggggagcatttttggtaaaattaaacaaacaaacagataagcaaaacctcaaaaaacaacagggacaaagaaaaagactttagtttgtttcctt

SEQ ID NO: 43319 - DNA, 2429 bp, Homo sapiens
accagatcctcctggttgggttatttatgcatacaaaaagaattcagtttctcaaaatggatgtagtttaccctaacttcatattttttttttgttataacttattctggtatatgcttgtgcaacccagaagaggggccaccattgccagatagcaatctgttcatttcagtcaaccaagaattttttaactctaaagtctcttcggtggaaatttctattaaaaacagcaaagcccttttagaaatctggactagtttattcttacatgccaaaaggaaatgaacgcatatacatatgcgtgtgtacacacagaagtgaaaattgatgtaatccaatcacttgtaaaggtttctcctctctccaccctctactccccactccagtgaattttgaagcttgcatcattccagaggaaactgtaatttggactcactctctggctcaggcattaagtaatcaacctcatagcctgccagcaaggagtggactgcctattttttcactgaaacatattatctcactccctatctcagcaaactgcctctgaacagcttggctgaagaatggtacaagaacaagtctagactagataatcactttttttctggtggctaaaaaacatttaaaacaaacatctagctgaacaatgggtttatataatccaagtcttgaaaagtctatgaagaatctacatttcctcagatattacgagtaacaaagaaaatgtttttaaaaagtgattttgacatctgaagattattgaaggtaggtgggaactggtacatttagttgaaaactcatcttgaacctgaacccttcagtggctgtggtcattttacttagtaaccaggtttttgatgatttaatatttagtagtgtttctaagtaagggaggcaaataaatttcttattaggtactatttccatgagtggggacagtgcaaatccctccctctaaaagatgcctattatgtattagcaaacatgagcttttttgattgtcagtattatatttatataacaaatatttaagaattccattctaagtgacagatgttactgtcttacacaatataatttgatataacatttagaaaatgccatcattggtggctttaggattgtaaatcacctcttcaatggcagtactggcaaaatacaaatacacaacagcctctaggcatgttttgtatgcatctgttagagtaatttgcagttttattggagaattcatagttccctgacacgtctctttataaataatgccggagcaattccttttgtgtgtgtgtgtgtgtgtgtgtgtgtgtgtgtgtgcatttgtgtgaagcaaaattcacctttctgatgaaggcattccctcttctagaaggaattctaaataatggatttgtctctaaaaaagaatcctggtttcatgttctttaactttctgagactttctttttgttactagaacaagttttgtagactttttcccataagtattcagttaaatatctagatagtcatttttaactgattaggaaaaaaaaatccccaaatttcaaccaaatgtaacaaaatagaatccctctgtgataacttaatgagaaaaatattgggcaacactcaccatcaataattaactaattattaaaggaacatgcacagattccatccactataaaaattctgctcagcaaattacctttctttgcctcttttatctttatgcagggcctctctgttcccattaagcctttcagaggacattatttgggctttaaagattaaacaggaaagagttaaatggaagtaagatcatgtcacttttctgctcaaagcattccaatggttcctggcatacttgcaatgaaagcccaagtccatgctatttcagatgacctgggggccggctccctccctcccctccagcctcacctcccttcctgctgtcacttccgcggtcaagctcaccctgacgtcagggccttgttgctccctttacatgaactttcttccccacgaggcaatacaggactctctcccacccttgcttcaggtagctgcttgaatttcaccttctggggagtcttttcctgaccattctaccttatgtgaccccttcccaaaccccctctttcccttgcttattttttttcatgatgttacctataatagtactagtttattgtctgcctccccctctagggtgtatacttcatgaggacaggggctttgttttattcactgctgttccccaggacctaagaagtacctggcatacaaaagctgctcataagtatgttgaataaatgaacttttttttttttttttttttttgaaatagggtctgggtctgttgcccaggctggagtgcaatggtgctatctgggctcactgcaacctctgcctcctgggctcaaaccatcctcccatctcag

SEQ ID NO: 43320 - DNA, 1728 bp, Homo sapiens
taatttttgtatttttagtagagatggggtttcaccatcttggccaggctggtcttgaactcctgacctcgtgattcgcccgccttggcctcccaaagtgctgggattacaggcgtgagccactgtgccaggctgctttaaaaaaaaaaaacaaaaaacaaaaacaaaaaaaaaacaaaaaacaaaaaacattaattactatgaaaggcatggcaagtcttagtatgacaccagtgatgatatttttaaaataacacattttcgagtgataaaagtaacagttgggagatagaccagagtgctttaaaaattaacattttcataaaaatgaaaaacaatttgaccaaaaattgtgtcagaaataactttcacataccgaaagcttgcctacatgttaaaagcatttgcaagagtacacatttttttttttttcctgagtaaactttccccttgtttttctgtgggtgcaagtgactatacagtacatagaaaattagtgagcaaaaaaaaaataattaggatgagtcaccttaccttttaagtcatcttgccacaaaatggttacctacaatccacataaccaattaattcctgcctccatactctaacaaagacagccagaatttggatctaatctttttttataaatcattctacctccaggctatcccactccctcattatcctgtttcctggcctctttcccattcctataatacagctgatttccctgataacctcagcacaggcccctttcccaggaccctcccccatcatgaatctttcaagcctaattccattgaagttaaaaaagaagcaactcatttgagtgactcattcctagatacttagggcggagaaactagattctgcagctggatgagtcattttgactggaaagccccgataggaaagaggttctgtagagtgcatacaacagaggatggggaaattatgaaggtagtaggtacagataaacgcagaacattcaaatagtgttccttagtctgaagcactttgataccttaaagaggagttctactttgcaaataccactttacaagattttttcccaacattttcattgaaaatatctccatttactttagctgcttttaggtctaccatttttctggagtcacagttatgtatttgcttgttttttaattttattttttagaggcagtgtctctctgacaccaaggctggagtgcagtggcttgatcttattaatagctcactgcagccttgaactcctggcctcaagcaatcctcctgcttcagcctcccaagtagctgggactacaggtatacacgaccatacatggctaatttttaaattttttgcagaggcggggtcttgctacattgcccaggctggtcttgaactcctggcctcaaacaatcctcctgccttggcttcccaaagcattgggattacaagtgtgagccactgtgcccagcctagcgtcatatttaaatgtggttctgccaaagtggattttgtccaaagctccaggaatatcctcatgatagaaacttccagagagagttggtgtcaagcattcagtatgagaatagtatgaaaagatattttctcctttgttcaaaatgaaactaacttattggtgttttctgattgaaaccacctttgcaaagatgatgacagtgagagaagtccagcatggctgactccattcttgcttctggcctcacagactggctgcc

SEQ ID NO: 43321 - DNA, 1229 bp, Homo sapiens
atgtgcacgcacactcttccaccaactgctgcgagttttctgtgaatcgcagcgcggagcctcccaactcgccctccccgactccaccgccttctccttcctcgcacaaaatttccctacacacgcagccgcctgcgagtgattttatgtgcatatatattacatatgtgatattatcctcagaacctctagcgggcaggcgaagaaaggactgcacaggggcattttttttttttaaaggaaggggaaaaaagcacaacccaagccctttgcgtcgactcctgcgtaccgggaaggggaaagaaagaggaatgtttgcggagcggactgcttgcaagtgcccttgctcgccacttcggctgcggcccgggtgacacggaggcgcgggggcgcctggcccgagcagcccgcgcccccctcccggtcccctgggcaggcaccgccgcggttatttcgcgagggggagatcgatcgccctgcctgtctgcagcggaaaagcacaagctcacacacagcccgagcccgagacaccataaccttaacccttcccccaccctccgtgaacttcaggtgaccgaccacgtcggcctgacacccgggcgggcgggcgctccggctccactcccgcccccagcccgggttttgcaggatcgggctccgagcagcgccaaaccgccgggagaggggagtagtgtggggggagagaagagaaattgaccctccgtctcccccgacccctccctccggcgcctcccgcgtcccctcctccccgtcaccccgccccacgccttctcccctgccccctcttccctgcattcaaggagccgggcggccccgggggatatttttagttgcttctttctccttcacttttagctttagcagcatctcgaaacactcaaagcggagaaagactggggggttggggggagctggagagggagtgggggaaaagttaagagtcgcgcaaagaaaagccggagggagggcggagagggaccgggggcgcgggtggaggaggggaaggggaccgggccgtgccggcgggtgtgtgtctccagttggcgtgtgtggctgccgccggggagggctgtgatgcactttagtcctggactctgctcaggctcgccaaggagggggtctgagagcccgagtctcgcccggctccgtctgctccgactgaccccgcattttattgcggccaggagccctgctcctccctctcctcc

SEQ ID NO: 43322 - DNA, 1370 bp, Homo sapiens
acctctccctggatcctgtacccggcggctgctgcgcgccctctccccgacacccccaaacgccatgtcacggcccccagccctccgcgcgccccgacccccgcaccctcaggcgccggaatccacaaggaatttttttttttttaagattccaacctctcccacctccccccaccaaacccccgataaaacccccggcatccacactactcccctcctcccttctcttgccccctccccccagcaacccagagtgaggagggggaaggggagggaaagggaaaaaaaagcccgatctcaaggaaaaaaagggggggggtgagagaaagaaagaaaaagagagagagaatagaaagggcacggggctgatcatcaccaacatggctgcctcagcatagacctaaacgaggagtaacccgggctgtgtctttgtcagtttcacctctgtaaccctaaactaatgcagaaaacaacggaggaggctgcggaggggaaagaggagagggagggcgagaaaatggcacgagaggaggtggagaagggatgacttacgtgagggaaggcgcttgggctgctcctgcttcctcctgggcattttcccccttttctcacattctcctccttggttaatgtgagatcaaataaacccccgtgggggcagagaggcagacactggcaggagcggggaggtagttggggggcgggcgggcgggcagggggaaaccccttctccggtgtgtgcaatgggttgaagcttgtttcctggagccagaagaggggttttcttcttttctttcctttcttttttccttttttttttttttttaaatttttggtcgtgcacctggcttgtccccgagcgtaatattcttcaatggaaacggatctaataggtgtgagtgtgtgtgtgtcctatgctcgcgtgtgtgatgggaggtataaataaatgagtgccggtgcggcggtgtctatggccgcgctctgtgtctccgagcccctaacactaatgtcgggatcaaagggcagcggcggcggcagcacagctcacagctcgctctcttgctctctctctctctctttctcgctctctctcctctcgcgctctctctctcgctctctctctgtcacacacacacacacacaagaggcacagactgagggaaagagcgagagctacacacacacacacgcacgcacacacacacacagagcaaagaggaaagtgccccaaggctcccagggcggactcagcctcggatttacaaccgctctgtctggaaagaatggggggcgcgcgtgcgggggtgggatggagttcttcaaatttatcccgctagtcaccaaatctagggggaaaaagtttttctcac

SEQ ID NO: 43323 - DNA, 1319 bp, Homo sapiens
taaagacttgaggtgtttcatttatttatttatttgctttaaactattcaaggacgtttctgggtacacaatgccgttacttaaacagtaaattccagtttcctatgacttcaagttattttttacacttctgtaaataaatcctgcccaaaagatcacttctagtttcctggaattttgtttttgttttgtattgtatttgttttgtactcagatttctgttagaggaactccactgcaccaattttgctactagacaaaccaggaatcttggatttgcgcgctttggtgctgacaggctttttcggccccagcgggctgccgtagcagagaagagcactgattggctgaggcagaaaagtgcccctgcctcggcgctttcggttttggctgggatcatccgcggcggccgggctcgtggggcgcctggagtgagggttctggttcccgccggcgaggtgagccgcaccgctgcgcgggccgacgacggggccgggcgcagccccaggttcggtgccccagtgttcagtcgcgctgtggagcggcggctgcagcggccctaggccgggcgaggcagccccggaaagggcctgcggtgaacaggctggggctccgggaagggaccgctgggtggcgggtccccgcgaaatgccgcgtccaagctctccgcgcatggaatggctgggagaggtctgatggtgggcgccgggaccgccctcagcgaggcgcctagactgcgcggagaggagcggcaccgtcccggctcctaccgagttggcgtccgagatcaattcaggttgttgaagttccccagggagccccgacgctaatcccaagattcggcgggaaagcggatcccgaacccaggcctaggcttcgcctgtcttccaggagggcttcagggaattgcgaaccctctcctacatcggggtggctgcgcctgaccacaggaattaaaggctggactcgcctgtcttaccaagttgtcaggtcgaggaacccgattgtatggtcttaagtcctatcgcccaaggttttctgtgcgtatgcgtgtccgcacacctgcatagcaggcatttttaaggtgtgtaggattaagatgatgcggattaccctgccccactgctcttagtaatacgtgactattgtagaaaattgcaaacatagaagactttagtgaagaaaataatattcactgaaccctttcacctacgatcattttctcttgtatgtgctagcttctacttgaactaagagtgtacatgtttaatcacttaacagtgtagttttccacttccatttaaaaactcttcctaaat

SEQ ID NO: 43324 - DNA, 461 bp, Homo sapiens
aatgtcaatattagcaattaattactttcttctaaatcagtgtattcctccttatatttttatcctctccaaagaacatcgcattaagtactctttcattgagtatttctagatcatcccactattgagtattatatcagatatattattcctagctgagagatttaaaattcttgatagcttgaagaatggccccaagtcttgtcaaactatgcagttcagagttcattcagtgattcatactacacaaatatctgcttgacaaataattctctctctctctctctctctctctgtgtgtgtgtgtgtgtgtgtgtgcgtgtgtgtatgcaagaatatgggtaagcaagcaagagagctgagcttctgtctcttagaaagcagtctgaggaaaatctaatacccattgggaagaaaactatccaaaagatgtttcagatccaaatatataacaaggagta

SEQ ID NO: 43325 - DNA, 793 bp, Homo sapiens
ctgacaatgtttttcagacataagattcctccaggatgccactaaccttccactacaagccaaagcagtaaccccatttaacagaagagaaaggcaaagaacagaaaggccaagtaattgctaaagcggagaaagtgactgacagataagatttccttttcactcctagtcctctctgctgattagatctactctaactgcctttataaatgtttcaatgaatcttatcttaatgcattggattagcaagaccaactccccaatgataatgcaaaataaccctgaaatgtttcatgcctcactcatgagtcagaaattgaacttacagtctccatttggactgtgatgatcttgatctttcacctctagcaaaaatctcatagctatactttgaaagttagtaatgagtgcttcatttgctttccaagcagatagaaaaccttttttaaatacactcagacttctatgaccttcatctatgacttaaagacttcaccacatgtgataattttctttgctcaggagacattcttaaattgtctttgaagagatttgagcaccagccccgttgatgaaagtaaacacacacacacacacacacacacacacacacacacacacacagaggcacatacacatacttgttatctttcttctataccccaaatcaaaatgtttctttaaaatgtatttggaattcagcatgactatcaaagttctaaaatccttcaacctgctaagtaaaataaaataaaaatgccagctaaatatgcttgcattaaaagaagtacac

SEQ ID NO: 43326 - DNA, 2436 bp, Homo sapiens
ctatccttatttgctccggttgcatgagttaggtattaaacctgtcaataagcttggaaactgacaaacaaggtcaaaaagacaagcgaattgaataaattcaattaatgtttatgaaaagtagtacaagattgtctaaaggtgttggggggggcataaaaaactaatatttctaatgttcccaccagtgcccatcatctcctgtacaaagctcccactattcagagatctaagtatgctttcagtccatccacatttccttgccaaaacacacactacactacactacacatagtctaacagtctgtatctgttagactgctagtatagcaactgaatcccggcagcacacggaagtatgctgtaatgaagtgtcctgtaatcaaagagtgcaacgtgtcagtcggcttgggagtttctggagcaccagcaactacagcaaatcatcactctccaacatgtgggccataaaatctgagttgggggcggaggtgtcccttttcttgtttttcctccacttttttttttaatgtgggggcggggaggactcgaaagtagactcgataatgaggtccactccaagatagatacggaactcttagcaacctagattcccttgggataggatgctactttgaaggcaagaggagtaagtttcattctctgtaacctcacttcttgacactcaggatagtcattgtttgtctacggaaaaggctacctgccctcaaattcctttgcctcgttcctaattacaagttccctctggggttggtaaattagaaaatcagcaaaagggccaaaggctggtcagtgccccctgaaattggcaagcgcttgcaatgagggttgccccacctttccaagactcacaaattagttctgaagtgggagccgcggtggagccggcagaggtgcagcacttacccccattcacccctatggacggctccagtttagctccagcgatcgccagcactattccgaccatgaaccagtctttcctcattctctccagcagcctcatatttgttagggtgggtgggttttgtttatttgtttggctttttttcttttcaagctccgatcacctaatccttggagcgtctccacactttccttggtccctccagacatgcagcagagcaagtcaaattgccgattgtaaagtaaagacctgggggttgctccggcggctttgaggagggttgggagtagtagtagccagtgacaggaaagtctcactgagcgccgccatcactaccacgcgcctcagaatacacgcgcacaaacgcccccagcgcctctggccgcgggctcgcaggtgcagatgctttgaaatgaagaactcggaccaggccgacaacgtgggcgatccggcaagggaggctggccgccggatggggctgacaagcgcaccgctgtcgagacctgcggaaccttctgaatgacgaggggtcggggagagcgtcgtaaggcgccacagccagcaagcctcactgactgtccttttctaacaaacctttaggcacagccacccacccttctggagcatatctccatggagagcctctcttttgctgtgccatgactccgcgggcagggctgacgtgtgcttggggcaagggatttctccgttgaagctgcggcagcggggtgcaagtttggagacgcgcttcttcgggacattacggcgcttccacgacgctagcgctgacgtatgcgcgggggggaggggaggccactctggatctccgagttcccagcctgagctgccggagttagaggtgtccgcgcgggaaagtggctcgctggtgggcggggagccttatctctggcggtgggttgaaaatccggcgccgggcagatgcccacgttcgctggacccctgcttgccggcgtccgctacaacccaaggaaggtgggcccgacctcgccaggtcgctcgcctgcgggtgggcatttggtccggatccccttccctctgcggcccacacctgtctccgggactggggagggctgcagggatcggggcagatctgcctttgcgggccgagagtgacagctgaagtctccccaccaactaagctactcgcgggcggagtggggtctgcgctggcaagcccctgggcgcgcgggtgcccgctctggctcgcccccagggctgacctacccaagccacaggaaaactctgggaagagggtcgcggattccaacgcggaagtggtgggggattgagtctgagaggttggggagtcctaccttccattgccacgagtgctagttctatctgccagtttcttccttgaaatgtcttgtggcaaccagtgacattgatggtttcatgaatggacttcctaccggtagaccctgcaagagcatgaactccactgtatcattcatccaaatgaagaaagaaagaaaatagtatgtgat

SEQ ID NO: 43327 - DNA, 2368 bp, Homo sapiens
agaggcccactatattcctactacacacaatataacaaatccaaaagccctcaagccagggcatgcttaaattagatataaggagaagaggatcacgtgagacctcatttccaattcgagggcctttaaaattttaaacgagatgaaagttttgaaactgagaaatgacaacatttgacttttgttgcaaaaagctagctatgttgacacagactgcaggagagagctcagttgagagccgactgcaacagccggcagatgactgaagctcgaaccagggtagtaaaggggaagatggtgagaactggtaagattctggacatatttcgaaggtgaagacggcaggattttcctctgggctggtcgtaggtgtgaataaacgaaagatgtcaaggttgaacagtaaacattaatagcaaacacccaaccaagcaccctagcccctccgccttttttcttttctttttttttacgaggacgttggatcggccagcaagtgagaaaaaagggccctaaatattaacagcaaccacccacccaggcaccctagcccctccgcttttttttttttctgtttttttttttttttttacgaggacgttggatctgccagcaagtgagaaaaaaggaccctcaccttcacgtcgtgtttcagctccggcgccaggctgagcacgaggaggtagtgggcataggcagtgccgaagtcctggacgcccagacagtgctctgcgctctgcaaggaccgcgacaccagctcgtcccggccggctgccccagcgccacccccggcgtctcggcgggacctgggccgcgagttcgacatggcagtcaccacttgtatggccaaagggaagatattttgtaaacgtaattagaaaactctctcgatgctacacttccagggaccagacaactgctcaaaaaacagcacagcaaagttaccctccgccgcgggtgaactcgccaaccccagcccaggcggaagctccgccccgtcctggccccgcgggcggcgcagaccgtgacgcataccccactattgcgcacctggccagcggcgcacgctacgcgaacgtcagcgcgcccgacgtgggcacgtcactgctgcccattcccgcaggagcgaccactgtgcgtgagcataggagaacgtctgtggcaggacctgtccggtcttgcgccctttttttttcccggctgaaagcagagctttctctccctcttgcactccgggagtgtgtggctttcgactgcaagaccctgttgtacagacccaggcagcgcgaagcgccacccgctcatgagggacggtcaagcatttgtgatgatgcttaagacattttggatcgtgatgcacaaaatttcaagacctgaaagaacctggagataacaaaagcatctcagacgtggtagaggaaatgctttcacaggcatttcaaatcattctcacaaaacctggctaggtggacctttggatcacactcgtcttaatgatggcaaacgtggtatcttgagaagtgacttgctggaggtcacacaaccagctagtggcataggcatggttcaaatccaagttctctgaccacctatctgttcagttataagatgagcttaggggttatttcactgttcgtgtcttatcactgtatagtgtttacattaatacaaagtttttccacattcaagtgtggcctctaagatacagattcgaaactcaaagggaggggagcatagttattacggctgaaaagttatttttgtccccattttcaaattcattaatggataatatcttaaatcgagcattttgcatatcacactaatacattttgagggctcctctaattctcaaaaacacgtcatgcatttttgccttctcttctgatccaattatctgaactacccttttttctgagcactcgcctgtgtaaatcctaatccgtttttcaggttccagctcactacattgtgagctattcttaatcacttttgtgacctttgcacctagcggattatgatgcaaagtaaggactttgattttttcttctttcttttctttcttttcttttttttcttttttttttttttttttttttttttttttttgagacagagcctcactctgtcgccaggctggagtgcagtggtgcgatctcggctcactgcaacctctacctcccaagttcaagcgattctcctgcctcagccttccgagtagctgggattacaggcatgcaccaccacgcccgggtaattttgtctttttagtagagacagggtttctccatgttggtcaggctggtctcaagctcctgacctcaggtgatccgcccgcctcagccccccaaagtgctgggattacagg

SEQ ID NO: 43328 - DNA, 1993 bp, Homo sapiens
gttacctggcatgttttccggtagttatttttagaataataaagatcgtcttcacctaccccagcaaatttaatgtgctgaacacaacagaaacaacttttctgtggtttagccagccctctctcttcaactaagttatttagtgcggatacgcagagaagtgtaataggagctgctgggccaccaagaaaacgctcttgccattgtaaggcttcgatctcaagcggagatttaccacgcatctcactttaaactgggaaaggaaccgggataaggaaaagagccccctgtgcgagttcgttcccagctcggggttgggggcgtcccaggataaatgagataaatgagttaatcatctcctgcaaggcagccacttcagagttatgtcgcccgcctgcggggactaacgactgcaattaagacgctccttctcggtcccggtcgggttccgtgcagcggggagccgactgtgagtcaccccggccccgggagcccaagcaaaggggaggggagagcgcccagggtggaggggagccgcggggcgaaattctagccccaggacgcctcggaaggaagaggaggggcagctgcgcgtggggaagagaaggaagaggcgtccagggaagggaagggaggaagaaggaaggcggaggaaagagaaggggacgagcgggagcgcgggcccggccgggtggcgcctcggggagtgtctgccgcgcgggggccgggcggggcggggccgcgggcgctcagagctcggcgggggctgccgggattggggcgccgcagctagcgctggtctcggtggcagctcctccgcgccgcaggactcggctctacgggacatgtccgtgccgcgctcgccgcgcgcccgggcctgctagctcctctgtgctccctgaacgcgcggcgccgcacctggcagcggcctcggagctcggctcgggcaggagcgcgcggccgtgcgcaccgcgcagcgaccgctgccgtcatggggctgcagcccctggagttcagcgactgctacctcgacagcccgtggttccgggagaggatccgcgctcacgaagcggaactcgagaggaccaacaagttcatcaaagagctcattaaggacgggaagaacctcatcgctgcgacgaaaagtaagcggggacgcgggcgcggacgggctgcggcgtggcgaggcggctgggggagcctctctcggcaggagacggagggtcttgtgtccggggccagcagccagaggaacggggaattcattccggaccagcccagctctctcggaaccccggggggtccctggaatcattcctcctcgaggcagcgcggcgagtccccattcccgcccctgcggctctgcggcggcgggaaccagctgccagcgggccccgcctgggccccgcctggccccggccgaacacccctcgctgaatgcgcgctccgctggaccgaccctaggcactcctggcccggagtcaggtttcattgctgcctaaagctactcacaatctcttacaaaaccgaggcatctgtttgcctagttttgttttgtgacttctcaaaagaaatttcttggggattctttgaaaccctgcgggagtgttgagttttccagagtccccttaagcttcaccttttccctctcattgtctgatcttccccgacagtcctgttccaggtccttcacgtgccaaaccagaaagtccacctggctttatgctgcttccgcacattcctcccctgccgtgctgaggagggttcaaagattggggtttggaagggtgagcggacagcctgccctctagcctaggcgggcactgcttgcaaatagggaattccaccccggttaggcttggtgccttcctcccctgaacttctgtctcttaaactcggaagaagacacgagatacaggagagataactgtattttagtgtagttgaggagagtctttctaggagagaaggggccaaaattcatgcagaaata

SEQ ID NO: 43329 - DNA, 515 bp, Homo sapiens
tgtttcagagaaatattcttttggggaaatttcttaagttgccattacattaaacccactgagatttggaagactaaaaataattttcctattttgtaaacttgagccttggtttcctttttttttgtaaaatgggactgatacagaaagccttgaggaataaataaaatggtgtgaaagtgttttgaaacacaaatgtaaaatggttgtgtagacactactgctggttcagccaacattccttttcccctctgacaatccagatttcattcaagtgtctgcatccttttcagatgactcaggggaaggcatttcagggtaattctgattaatctaactcagtggttctcaatcgtagctgctcaataaaatcacctgggggaactgttaaagcagtcagggttaagaaactataagtccgttatgataaacccattttctgggttggtaattattagaagaatgaggttgtatcccagttctgaccaaggagacgtgacaggaagtctgggtac

SEQ ID NO: 43330 - DNA, 1597 bp, Homo sapiens
gaaagcctaagctttgacttctcatttccaaaggatttgagactatagctggtttgtgttaatggaataggtttagtaggatttttagtgttacttactttgtatttaatattgcttgtgagttcttataggataagtacctaaggcattagatgccattaaaaagattatgcctttagtttcatcttattatatttacagtattttatatggcatgtgaagcttgttttaatcagttcttttacagtttatgtggatttctgttggcaggcacattcagaatggaggaaattcatcttgaacttatttgtgagaacatttctcagtttggtttaaaagttgtcagtgacctaattttatgaagactttttcctccttggaactgacctttacaattggacagcattgctttttcttacaattctctttttcccgtaagcctgttattcagtcagatagggatgtctttgtaaaacctgtttttcaggaatgtaccgtttgagagtttaatttactgactcagaatcctatagagatcacagtcaggaataactcaaatcaaaattctaaaatgagtgaagattatcttaggcaggaggcctgtctccttcttggacccctttccctgcaaggccttgccccatgactcagtgtcctctctgttggtgactcattatcatctgtggccttccagccttgtcatcatcagattctacttccctgttgaaacttacatttcctgaatttcatatccttagggtgtattctctgcttctgaggaatcggccaactctgctctcttcttccccctgactgccccgcccgacatacacacacccacccacacacacacaagggaccctagaatgtaaccagcccatttaattgtctaatccagaggagtgattcgattattgggaatgtgtgcagctgagtctgctgtttcactagggaaatatttcgggatgagccaaggtacctaggatcagcctttagaccatgtcatgaaaatattagatggtatagccttgaaaacaaagaactgaagagaacttagggagacatatttgaccacttaatttttttttttttttaaaaagaggagtccaggcacggtagctcacgcctgtaatcccagcactttgggaggccgaggtgggtggatcttgaggtcaggagttcaagaccatcctgaccaatgtggtgaaaccctgtctctgctaaaattacaaaaattagccagtcgtggtggcgggcacctgtaatcctagctacttaggaggctgaggcaggagaatcgcttgaacctggaaggcggaggttacaatgagctgaaatcgtgccactgcactccagcctgggtaacagagcaagactctgtctcaaaaaaaaaaaaaaaaaaggaaattggagctcattgagggtggagtttctacatcactaaataaggttgtgacagagatgaaaatagaatctttcacatcttctagtatcctaacgacattatgccttacctttttctctttgtaagacataatatttttccttccacctttgaacattagtgaaatggatatgtatcttatagttgctatcc

SEQ ID NO: 43331 - DNA, 496 bp, Homo sapiens
agagtaggagtcacaagctttttctgcaaagaaactgatagtaaatattttagacttctgtggaccataaagttcctgttgcacctgctcaattctgctgttgcagcaggaaagtagctgcagacaatacataaatgaattgtcgtacctgtgttgcaatactttatttacaaaatcaggcagcacaccgtattttggcccatggaccacagtgtgatgacctctgatgtagcgtttcacttttcaccatctccagtttgactaacctctgtgattttaacataggcagatatccaagtagagcagaaccggcaacacttctatgaactgtctctcgagtatgtgtgtaagctgcaggaaatccaagaaagaaagaagtttgagtttgtggaacctgtgagtattgccaagttgtttgctggtggatttttgcaatgtaagataagtatttattttcctagatctgatttatggtttatagttactagaggccata

SEQ ID NO: 43332 - DNA, 472 bp, Homo sapiens
aatgattaatatttttatgtgcataaaagcatgtttgtttgttgtataacccatagagaaatctgtctttacagtgctagagggatatgcaaacctatatttgcatttgtgcatacacatgtgtgtatatatatgcacatgtgcctcattaatgatgaaatgttagacttttgatgtaaatcctgtgaatgccagtatgaacattaatgaccttttgcccctgttgtcaacacacgtgagtgcaaataaatgattcagtccctccacaaatattgatgaagcatctcattccatgccaggcaatctgctggttactagatgagagctgaatgttagtttacagaaccatggaatttgagaatgtatttctgtagaatcatacggctgcaaaatcctttttaatcatttcatgcctgttaccatcaaaggtgtttatctttcactttgagcccttctcctttgttgttgtatc

SEQ ID NO: 43333 - DNA, 872 bp, Homo sapiens
tacaaagtatttaaataaaagggacaataacttataaaaatcgtttgatatttatcactctctgaatgatctattgcttaataatttgttatatgccagagccattaataaatctgagggtttggttgttgttgctgttcattcaaacatgggaactatatgtttcgtagagcaccaaactggctgcaagtacgtcttcactaactaccccggtcgatactctagaataaccagaccttatgtacaatgtaagtttccctatttaaaaaaaaaaaatcatttattttcagtatcaaaaaggcaatttctccaaatcctttttaaaattaactttgtgcttaaatctctttttcatttttaaagatccatttgttgtcctgctgcaagatttttttttttttttaagcagttgacaactgcccagcaacagcagcctgtgtttgcagtcactattttgggctacatcacatgtcacttacataaccttgtttaactgctcttgaactggttcgaacaacctgggaaacagattagagcagccccagcaaattcccgcattgcagattctgatgggcgatttcccttcccccatccctccccccgccccgcccccgttcttataatgtcgcatggtgagttaagacggtgtccaacaagaactggttattcattgttggagccaactaaaacattcgataattaacttcctctgctcagttaaaaccagtttggtctgcccataataaaccaatgaacaatgatcccctgctgctgaggtttatgagtgggcctggattaacatgttttaaaatgccagggggaaaaagaactgacttgagaagtaagtacaggttgcctttgccaccttgaag

SEQ ID NO: 43334 - DNA, 789 bp, Homo sapiens
cttgtcctaaaccaaacctcatccaactcccctttatcctaacaatggtttttttcccccatagccaatcaccttttcatatgttacataaataactcatttgttatgcttaatcttttcatcaccccctcactagaatgtaagctctaccaaggcagggatcgttgtccaagatgtctccagctatgcttagaaaggtacctggcatttagtaggtattgagtaaatgtttgctgagcaaatgaacctttcatcccttgccctcagagctgcccctgctccagtattccttatctcagtgaacggcgttagcagccaagcctggggagtcatcctagatctttgcttcttctcttccaatatagagctgtccatgctacttttcagatggtcttactatctgcccgccctctcaatccctgatagccctggtctaggtccatcctaggtcatttctagctcaagtgatgaaaacagccaccatttaaacaagtatacctcacaacagccagatcttaagtgcaaaactgagcttatcgttctgctgcatgaaaacattcagaggttctgttttgcttaaggatgaattcagaccttccttggagtccaggacctggtcccaatctgctcatttaacctcacttcctatcacttcacatatgaaagtttatacagtggtaacacaaaattgcttctggtgccctgtgcaacaacagtctgttcttaaggtccctcagcaaggccaagtctgatctctcaagattcagcatgggggtcaattgttggaga

SEQ ID NO: 43335 - DNA, 738 bp, Homo sapiens
atttcaaacctactatctgactttgagtggaattaccactcctcaaaatatttaaaatggtatgttaagatgacatcaaagaatgtgttcaaataaatcatcagtgaagtcttttggtattttttcattaagaattcccccagcagaaaacagtagaggctttaaataagagcaacaatagggcactagtcagtagatttggatgactgactctgcaaagaaattcagagccaccttttctagtctagccccaatatacttcaggactgatgaatcattgctgtactattccaaaaacggtttcctatgctcacttttaactgagctgccacaggaaatagttgtttcctacctgttttcaaatcctgattgcaaaatcaggaattccttatggttcattttaacacatttctgacctctggctttaatgataaaaccagattctgctataggatagcatttccaattagataaaaattattctttactattatgtgggcaatagtgctctactaagtatggtggtcataggtcttcaagcgcaaacattaaagtatggaggtgaagttggaaactgcttcttccactcccagacagtagagttctcttccatgatcacattctccacgaatttgagctgttatttttaaaattcttattgttgttattattttcatatgctttgcttttttttctgatccatttcactgtttccacttttcaagggaaaatgctcct

SEQ ID NO: 43336 - DNA, 1743 bp, Homo sapiens
ttaaaattcggcggtttcaaaagctcgtctgctatcaaaagttttcctaactcctatgtcataataaataattaaaactgatggtgccataaaccattattatttaaacctggtctttttaaattgagtaggcaaagccacgcacctaaaattcagtagcagagtaaggatgccaccaaaagaagcttcgtccccttctcccttgcccttaaaattccaactgatgccataggaagcgtagcctgtctcaagagtttcgcgaatgctagcgaacgggaaatgcacgaatttccagagccccttttatacaggatctattaggatctatatctccttcaactgcccttatgcgctacacctccggctgagatttgggagcgtccgcaattgataaaggaaagaaatattattcaaacgtcctttaaaaattgtacagggaaaatgatccgaaattcatctttgggtaaagggaagggtggtagacctcccactgccaaaggcagttaaaagctgctagttagagggcatttatccaaagtggccaaactttcccaaaatagtcctctggcggccaaagggggagaaaagtggaaaaccaaaacaaaacaacaagcacacagcaccatactgactgtgcctccggattacgcagccacttctccctgcaaagtgcacgctcccgcgccgcggccgcacgccgagcacggcaagcggtgccccgccgcgcgcccctacacacctgcctcggccggggtccgtctctcgccgtctacctgttgcagcgcttgccaccgccacgaaacccctgctgcggagcccccctaaatccaaccacatccaggccagcgagtgccgctctccctgcagcgggagagcccgaggcagcaacgctcttgcacccaggtgactgactgcacgggcttcctctgagcagcctgaagttggctcccgtctcccgggcccaatgacaccccgggcgcggaggggctgagaggagggggcaggggcaggggcagggccagggcgggcaaaaaagggagggagagagggcgggcgaaagcccggagggggagtgggccagctggagggctggcccttttaaaagcgggtcacatgtccagataaagttcaggttgctatcccgcccccctgaacccttcctattggcccgaagagaagcaaggctccacgccgcacgggtcaggcgggcttcttattggacaatccaggctgtcagtcaccaggcgggcgacatgactgatacaaagttgctgcgacacagcctggactcggcagcttccttaaagccgcagccgcggcgggagcttggggtgccgggcggtggctacatcaggcggcctccgcacgctgcccccacccccatcgctcggccgccccaaacttgcttacgtccaccctgctctccttctgaccgaccccaggatatctggagagatgtgaaaagtgtgctgacgcggaagaagtcggtttttccgcgagcaaagtgtcgtcccctcacgctctccacctgcagctccaggtgagctgcagcccagaccctggcgccgcccaacagcgtccgcgcgcggggaggactctgggtgggcttcacccgaccctcgaggttcctctcccagcccctttccactgtctccagagttacctctcagcagagcagcagcagccttcgctgccagcgagcaagacgatcacgttcactcgatttgaatttagttgttttaa

SEQ ID NO: 43337 - DNA, 2371 bp, Homo sapiens
accgccccctcctcgattctcctcccgcccacccaaatgctgcagttactaagcaaaaggatggggttcctaactttgatttctaaggacttttaggcttctcatgtaaggccccgttttaggctccccgctggcccggagtcagcatcagtgacgtatacacctaaatctggtcccccggccctcggcgacccgcagcccggcggcggcagctgtgcggcctcccgcctcaccctcgcttcgcgcccgccaaagcccgaggcgggggaccgggggacaccctgtgcccaaaggcccctcctctccttaacagttagttaagctccgggattccggacccctaacccagggctgagacttgaactctcagccgctccagtcaggaactccctggagataggggcgacagcggcagcgccgcgagctggtcctgaccccagactctaatgcccctcggtccccagcttggagctgcccccggcgtccccgcagccaggagtccccgccgagcgtcccaactttcccgcggggcccaccgtcacgcgcactctcccggcccagcgaactgggcatcgatctcacgtcggcagagcgcgggcggcgggcgggagcaaggggagtcccggacctagagcctgggcacgcgaggcggcggcggctccgcaagcgttgccgaattattcattattaaaggaatggacgtgtctcttttactaagtttttatctcctttgaggagggccggtcttgccctggatctcagcttcttgcaaaatctaggttagaaccgtgcaggggcagccgccgcgatcactcgcccgccacccagcacccttgccccagggccgccagcgggcaactcgtctcctgcccgcatcccacctccgctcgccaacccgcgccctctgccctgggcgcgcaacctgccttgcccggggccgcccctgcgctctccggaccccctctcgccgctgtcagcgcaaagtgactgtcgctgcactcaccttttctaggacatggtggggaggctggggcgggggaaggggaacggctagactcccgccgccgctgctgccgccgccaccagcaagtccaatattggctgatcggcggtgaggatggagaggatgataatcccggcagtggcagtcgccctgctgacggtgggtagagcaatagtgctgttaccctacaagaggcggcgaggcagcggcgccaaatcgcgcagagggggacgcgggcacccgcccgcccccagcggcggcggccgggcctctggcgggcccctctcccggggctgcgcgtccgctcggcgttgacagcggcgtccctgggagccgggaagtccggcaggaggatcccgcgcccgccgctccgcagcgccactctccgcgccccctccccgggccctgggtggccggtgacagctccggcggccgagcgcgtgtgtgagggggcggtcgcagggggagcctgcgcccccctccccgggtcacgccctcacgagcgggaggaggcggcaccgcgtccggccacccgcgggtgggaaacgggcaggggcgccggcagccgccctcccactacggccactgacaacctggaggccaaaggaaaactgagcccaaatgcacgcacccccttcagccctgcccgcagccctccaaagtccggccctgacctcgcgcccggcttcaggtgcagttcccacctgcggggggaggcgagggctggggacctcgcgcggggggcgggagggaaaagttttcttttcctgctcctcggctgcccaccccgccaggctgctcctctccccgcccctctcgggctcgccgcgcctctgccccacccccgccgtgggggggcgccgaggagggagcgggcgtctgtgcgcggaggcgtgcggggagctggctggggcgctgcggtcgcgaccggtcccctcgctctgacggcggctcagacgcccgcggaggcggctcggcggggcaagccgaggaaggggccgagagccgggacccctcctcctccgctcgcggcgcgccgcgcgcccccgcgtctcctggcgcgcccccgcgccctcgtgcccgctcgggcagacacctacgcagacgcgaaagtgaaaggggggcgactgggcccggcaggcgggcggccggcggcgcgcgggcacgcggcaggggacagaggatggatgggtgaacccggatcccgggattctcccgcgcccgctgcccctctgcggagcctccccggagtcccacgcccccaccccggccacggagatcaccacgtcaggagatatgtatgcgtgtgcatgtgtgtgcgcgcgtgttcacgcgcgtgtgcgaggtacgcttctgccccagactctt

SEQ ID NO: 43338 - DNA, 1457 bp, Homo sapiens
ctaatacccgtgatagctaatactcatgacacagcagctggtccctgagctccaggtacatattgggtacaaatgaggagattaggcaggcacagcaatgctttctggtgaggacacaggtactaacagttttcttagcacctacttttcttgagtaagaaatgactagcctgtcctgtgactcactggtgagctaggactttaagtggcttcaggtagaatctggtctttcctaggacttccaccaaatctgctatacttcatggtgacaataatagtgaatattcaccagttaccagtgtgccaggtgtggactctgggctttaaatatgtcaggccatttaatcctctctataaatcttaagatgggttctgtagttagcactgttttgaagatcagaaaactaaggcactgagagactaaataacctcccctaaagttacatagaaaggaaacagcagaattagcatcaaactcagtcagtctggctccaagcactttgtccttcactattctgagggacggaggcatggtgggacaggatgattctggcaacttgccttttctcaccgtctctttacaattctctggaataggaattgacttccaaagtggctttgtgaggacagctcttaggtaagggtggatgctggctccagcatactaaatgcaagctatttcgccacaggagttaatttgttcctgtgttgctgggatatataccaagtaatctaaggaagatgagtgtgtgactgaaaatctctgggcagagtatacttttcctgtgtgtgcagagcttctctcagtgtagacagccctggttaaatattaaggaaaggttatttgaggagagtggcacaatcttacttcatggaaactatatccatgtggtcatgtgcttaaggtgtggctagctactggaaagtgttgtaacttactttgtgggacacataaaaacaaactaacactttgagggagtaattgaatatatacaaagtattatattgtgacttattaaaaaagaaaatactagaaggagaggtggaataatacttatgtttgtcactaaaccatttgcaagtgaatttcacattatctcacctaatcttgtttatagacaaggaactggaccttacagagattaagtaacttccccaaggtcacaaatgtaataagggcagaactggatttgaaatcaagtttgtgaataccaaagtccttgatctttctatatcaccgtgtgtgtgtgtgtgtgtgtgtgtgtatgtgtgtgtgttggaaaaggagggagattggcaatgggggaggggagtgtactgaatagaattttaaaaacacaaagtggtttcccctaatagttccagtaaaagctcagtgatatcacttctatacataagtgctagaggtcattgacttaacaaatattattgagcattgctatgtgaaatatagtagt

SEQ ID NO: 43339 - DNA, 701 bp, Homo sapiens
catatttatcaaatttatataatattaacttttgggccatctctcagtctgtttttattttctttcaaaatatgctatttttcttcatgtgttttgtaatttttgaatgtgtacaggacattgtttgtcaaaatacagtagagactgaagtaagtaatatttttgcccaggatacctttttttctgtcagccatctgtataaactatagttgagctatgtgtgaagtttactgtcattttaattaggtttagttcaccaataggttaatgattcaagaatgagtcagtactttacctccaacagggcaagacctttttgtacaaacaatctttggcttcctgaaccaaggagaatctcattctgctttctaaactggcttctagatttttatgttgttaaagagtttgctttgttatacagttctgcctcctggctttctgtggttcaagggacctctttctgctctgctatgttctccttatccatggagtattgggcagtgaattttagtgaatgctaagagtgtccataaggggcttaggatggtatgtttctgagtggtggcaatgcagaagagctaaaaagaccttgagattttgggaacttgctccccaaagagatcttttaggtctcttgcccttcctccagctgtgagaaccctctgacaagtacttaatgaaggcctgtggcacttcataga

SEQ ID NO: 43340 - DNA, 668 bp, Homo sapiens
gcatttattaagtgcttaatatttgctaggcaccctgtcaagcaaaatggataaaaagatggatacacagagtaagacagaatttcttcccttaaagaactctcacctcttgggagcactaaagagacacatgttcttcgatacaccttgcaacattgttcagattcactcaggtatgtatccagatttatggagacagaactgagtagatagaggcaaccccagctgccacgcctttatcagacaaatcaacatagaaaatcaatcagtatagtggtgcaaatggccactatcaaagcatggatttagttaagacctccctagactctaaatgtttgacctttgacttctatttctaaactctgctagaaaatattaaccagatggaaactcacagaaaagtttctgggctcttgactctcaaacaagagtaccctgagagttcaaacgttatgtctgaataatctttactaaaaactttgcaatacacaagaggtggagatattatgaaaagtttcaatacatgaatacagagctagaagacaatatcagaaatgctctataggaaaggtggtgtttatttcttggagtgtaaaatacagaagtctagcagctggtgaaagctaaaggaacaaaattaaatcagatatggaacaaaaagtacagtt

SEQ ID NO: 43341 - DNA, 895 bp, Homo sapiens
acctagctgttcaacattttgtgtacacatcgcaacctttaacaaaattactttctgcaaatacttctattttccaaaccaggtaaagttacataaaatgatcaacaactctccataacactcttgaagatggtggaaatactgccccatgtcattctggaaaataaggatgggctccctaccagcagaggtcttgggctacttccaaggcctttggaaatgatccagtgagtgagaagccagatcagaaaatatttactgaagatgcacaaaaggtcagtcaagatggggcctcagatgttacaaatgactctaggatgggtgcaaggaagcatgtgtgaattgacagactgaaaggcttagcaggggttggactgtggcccatgccagtcatcctctagcccaggaattcatggcccacaccagaatggcctccactcagatattttggcactcccgatggctgcacgctgagtcataggatgtggcaaatagtccagcaattatcaatctggcatttcactaagtagaaatcacggggctgcttttgttctattttgtgaacgcccaactggcaaacaacaaaacaaaggatagcagaaaactttttgaagtttcttcaccaactccctttttgaagtcagttggaaatttgtgtggtgacatagggtgtaactgtttttataaataaaagagaaagaatagtgtgtgcaaacgcttctgaacagctctgaattctgcctaatgagctgggatgctgaaaatattcctgttctccctggtgtttcctccaccatttatgaagaccctccacactccctctctaaaagcagcaaaagcctcggtagtgaagcagtagcacagagaggataagcaggcagcagcaatagcctgt

SEQ ID NO: 43342 - DNA, 1271 bp, Homo sapiens
gggaagttggttaaccaggatcacccatgatccccaaatgcaactaactcatccagaaaatccagaatttttttctcaataccctcatattcaattggttaacaacctttaaatactttaaaatttaaatttttcttgccatctttaattttcttttttttccctcattgagaaaaaggggatctagaggagaaaataattttcttacaacaaaaacttaaatgaactttaatttgccttgaattaaaagaactatttttggtcaattaaagacaaaattaggatttttaaaataatattttaatctggacaacataattttatcattcttggaaaatgtgttaccaactgacatatttatcacaaatgttaattaagtactattagttcatccaagcaggtatagaaatgcttgttagcatatattatctccccaaaatatatatgttgaaattgcctctaactatgtggtttgagagcaatctcctgtgtttgcattaagtagccctgtgacttgcctgtctttctaaaggaagagaaggagggggattctaatggctcccagcaatcagtacttttacccttaggtgacctctgcagtctgagaatgtgtgcataataagagaatgattcaccttgctatggaccttgaaccattctgcaaacacacagaaaaataaattaagttaattcaagtgctgttgctgctgcaaacgctgtccttcactgaggagaaaaaaaaaataggtgggtgcgagtagttgggaggactacagggaaaggaatctggaaatgacaaaaaaaaaaaaaaatctatattctgccaagagcttgttggcatataaatttctgaagagcagaattataatcagacacaaaccatctcctttgtggtacaaaaattaggaagcatggttcaagcatgtggctctgtcaagatacaagtcttttcttttttttttttaagggtttttttgcactttccacttcacaatatataaaaactcttgtccaaacatagcctgatacgatacccacaataagattcagcctcctctgtatttttaattaactcaggcacagcagtcgtttttaacggctaacattttgtgtgagttacagtatgcacactgctgagacataaatgcaaagtaatcactctaataagtagatataaacatttacaacaattgcaacaagtctgtgcaacaaataagggaatataaagaaaaataaccagcagcaaccaaggaaacgtgtctcaatacaat

SEQ ID NO: 43343 - DNA, 625 bp, Homo sapiens
ctgttataaatatgtagaaatttcttggatgtaaactggcagccatcagtttttaaaattagttatatgtagcactagcacaactgagcccctcagaggagactgcatactagttaccattctgttttacttttattttaacaattagaataatgatctttttaatatttaaacattttctgtgattaaactgtccatttctcctgactcataacagacactggcctggtactgtttgttaactttcttatgaacatattgtttatagtaggtgtcttattaatgtaagtggtcattgaaggctcattcttggccacataagagggtagctttgcctgacacgagggccagctccactatcacctcatgtatctgaatcctaatcttatttaatcccctcccagctttcacttttgttgggtgactcatgcttggccggctctgcaagtgtgtcctaagttcacaacatcatagcagaaaataatgcaagtgttcctgtatagatacagtctcggtatacatgaaagttgttttcaccttagaaagctcaaaaacaatatacaaactaataaatataagagcagcaatatgtcttttacctagtatacaaaggcaatgctggtat

SEQ ID NO: 43344 - DNA, 790 bp, Homo sapiens
ggttcatccagataaaatgattcaaagtggctatattacacattcacttgctcacgtgttcactgtctacgcccacactccacacaggagacagcacagtggcagtgtctccaggaacatgaggctgaccctagagaccaacaataaggaagccttgtattcctcactcctacagaggtgtgagcgtttcatcttatttgaacactagctctctgttaacactttgttgttgctgactcatcaggcactgccttccatgtttgctcatctgtgtcatttgcagttttgaatccagtagtatcttagtctttgctcatttactctctcacactgcagtctcatagctactgaatcattgtccctgaaagtcctgcttccctctacttccatgccaggttctgtagctctgcatgtctttctggagcaagttttctggttgtccctgtaagagcagttctccgttctgaagctgcatactcagtgatctgtgccaggagttggcagttacagcccaaggccaaatccagcccactacctgtttttgtaaagttttattggaacacagccatcctctcttgtttacaagttgtctatggctgctttcaaaccacaacttcagagctgagtagttgtgatagaggtcttatggcctgcaaaatctgaaatatttactatgtgaaatattaagaaaaacattggtggcttttgctctatgattttatggctatcaaaagagggttttgacctttattccattggaagagacacttcctttctgtttagagtaaaa

SEQ ID NO: 43345 - DNA, 770 bp, Homo sapiens
gggtgtttttagtttttccttcttttatcctctgagcgacttattgtgcatagatttcaacatgctttagatcattgtctttccttaggatagattcccagaggtaggttacttgaagagactcttaagcattttgtgatttgagagatactatcaaagctgtagacaaaaagttgttctagttggtaaagtcatggatatatgccccagtatttctatacctgggaaaggcttacaaatggattagatatgaaccaggtacagtgcacgcacttcatttgttttatggaagaatacatagtctgtgaaattcctattgtgtaaattgaggcctgcattcctcttaccacctccacctctgctactttctgctctagaaactactttaatgaaaagagaaaaagctagttgactagcatgttgattttatgcccaatgcaaatacagaccaactgactcatcctgaaaatatttagcagggagaaaaaaaaaaagaagaaaattttttttagtgagtagcccacattatgatactttgtcactttaatcttgaactaaaagacctaccatttcattaaatgtttgctttataacatttgcctctatgccaaaagccctaaaagtgaattcaagtgactttttgctttgtgacatttgactcagaattgagttatagatgctttgaaaagttaattaatgtttttggtcatggctaacttctgaatttgttttattgtttttgtatcttattatgaatgcctgctgatagc

SEQ ID NO: 43346 - DNA, 521 bp, Homo sapiens
ttgataatgaggctatttggatcattcttaaattataataaataaaaaatacttgataatcctgtctcacttttaccataacaaaaaggtaactttactgcaaaatgttattctctacatccttgtaaaagtttacttaaaaaatgagtcatacttactgcctgggttatctccaatcccactgcattttccattccaataccacagcaaaagagttgcatcacgtgaccctgagagaatgtagcaatttcccccaatatatgactcagaacgagcaaggcaagtgacgacatcccaatggccaaacaccacttggatcaatcttcctgtaatgcaaaacaattttctttaaaaatgctattaaaaaaataaaaattctagtgaacagataacttgtaaaacaacgaagctatatgaactctgatggtcataattcagattttataataatttgacatggtccaacctaacagttttctttgcatgctaacaagaacaacaaaaaaacaattgaaaattgt

SEQ ID NO: 43347 - DNA, 457 bp, Homo sapiens
ctgcctcctactaaatattaagcttgtttagttggagtcagttataaatgaatagtacagatttgtattcacttccataatagagcatggaactaaatgctatgctcacatttgccttcagacgtaatcttccaaaaagccattttcttaaaggacctatatgtaatagaacattatgaataaaacttaaataagacttttggggttaacctcatttcattgcgtaactccatattgttgcacaatcctcactagattggagttcatactttaactggagttcttatgacactacatcactagtcttagtcatctttctattcacagtatctagcacaatactgaagagactgactgatggatggagggccaactcagcttcactaagtgtctacaatcaggccagatgtggtggctcacgtctgtaataccagcactttggtaggccaaggtggga

SEQ ID NO: 43348 - DNA, 850 bp, Homo sapiens
aaacctcaattctggcacttgtaacatcaaagaaaggcatacgaggcagaaaaagagacaggacatataaatgttacatgaaccaggactcaagaactctgatctttctacctgcttgcattcgatccgaagtatattaacttatcccaactctcttccatttcttcttattgcgtatgttaaattgatttaatgaatcatctgctttgagaagcttatttgatctgtgagcccttctgttctgtgaaatctgggacgacttgcctggtagtgtactaggaggcaacattgcattaggtaatttcccacagaacaggttcatagctaacctttatctcgccttaaactaccgttgaaaaaaattattctaggccactggggaaaaaataggaagctccataattcatttattaagccagcataatgttaatgctgaaaacttaaaaagagataaagagactatcaaaaaggaaaataatagagcatttttatcactgaataaagatacaacactcttaagtaatctgtaagcaaacagaatccagcaatgtctaatgagaacaatataacattaccaaggagggtattttcttggattgcaagagtggttcaataccaggaaatccacaacaggagatctactccttatatcaacaaattaaaaggaaaacattgcatcatcatttactagatgctgaaaagcatttgatcaaattcaggaaccaccactaaagaaaaaaagttagtaaaacaggagtggaaaatattacgtaaaataaagactttttaccagaaaccaacaacaaatattagctatgtgatctggggtcagtcatgtaggcttctcacc

SEQ ID NO: 43349 - DNA, 1244 bp, Homo sapiens
attaatagtatttgtataaagtagaattcccttatccactcagaggtatgtttcaagaccccttaggggacatctgacaccacagacagtaccaaactcaattgtcatcagttggaacatggttttcttcagactttccgcccacaaatgcaatgctttttccaccttaactaagcacttattatgcactgtgctggtaacttttgcagtttgaagtatgacagcaaaactagcacaaatttcttattccctcttcacaattttatagataaagatgcattcttactatggatcttagcaacctcaacatacgctatttcttctttcagttcgagaactttcaccatttcacttcgaggaatcattttacagcttctctttagcatatctcaattgccaacatcactacttttgaactttgggacgattagtaagtaaaataagggttacttgaacacaagaactgtgttaccacattagtggatctgataacctaagcaactaacagcaggtagtgtagacagtgtggatatgctagacaaaggaaagatccatgtcccaggcaggaaggtgcaagatttcatcatgctactcagaatggtgcacaatataaaacataaattgtttattttgggaattttttatttacaattttcagtctacgattcaccactgtaactaaaactatggaaagcaaaaccatggataaggggaggctactgtatggtcatgtaggatgaaagtcaacttatctttctttcctttcttttagtttccagagctcaacctgcttacctttttttccctactttaacgtttgcaaaattctttctataggtttttgagaattcttcgcctacaaccagcctcccttccttctcattgtccttaaaaataagaatacaaaccctttgaattttaaatgttttactcttgttttctatcaggcaccaaatattcaggtgactgatagaatgattcacagacctttgtgagtcattaagtgtgaaacatgattcagaagtagcaactggaaacaaacacagtcctctgttaacatctcagagttcaccaaacttttttcttacccatctctgatctccataggcctaatgtaacaacaagagtagaatactaattttctggggtactgtgggtttgtttgcttttttttcctgaggaccggtatccttaaatgcctatctctgtgacctctgccacaaacattaatagtcccacatttg

SEQ ID NO: 43350 - DNA, 1473 bp, Homo sapiens
cgtgagccttggatccctcaacgtattgcgagacgccggtgtatagcccggacctgtgccccaacatgatcgccgctcaggccaagctggtttaccagctcaataagtactacactgagcgctgtcaggcgcgcaaggcggccatcgccaaaaccatccgagaggtctgtaaggtggtctcggacgtgctcaaggaagtggaggtgcaggagcctcgcttcatcagctccttgagcgagatcgatgcccgctacgaggggctcgaggtcatttcgcccaccgaatttgaggtggtgctctacctaaaccagatgggcgtcttcaacttcgtggacgacggctcgctgcccggctgcgcagtgctcaaactgagcgatgggcggaagcggagcatgtctctctgggtcgagttcatcacggcgtcgggctatctctcagcgcgtaagatccgctcgcgtttccagacgctggtggcccaggcggtggacaagtgcagctatcgggatgtggtcaagatgatcgcggacaccagcgaggtcaagttgcgcatcagggagcgctatgtggtgcaaatcactccggcgttcaagtgcaccgggatctggcctcgcagcgcggcacagtggcctatgccccacatcccttggcccggccccaatcgggtggccgaggtcaaggccgaagggttcaacttgctctcgaaggagtgctactcgctgaccggcaagcagagctcggcagagagcgacgcctgggtgctacagttcggggaggcggagaaccgcctgctgatgggcggctgccgaaacaagtgcctctcagtgctgaagactctgcgggaccgccacctggagctacccggccagccgctcaacaactaccacatgaagacgctgctgctgtacgagtgcgagaaacacccacgagaaacggactgggacgagtcgtgcctgggcgaccggctcaacggcatcctgctgcagctcatctcctgcctgcagtgccgccgctgccctcactactttctgcccaacctcgacctctttcagggcaagccccattcggccctggagagcgctgccaagcagacctggaggttggccagggaaattctcaccaatcccaaaagcctggacaaactatagggtgctggggactgcttgaaaagcgacacaaacgggcgtgctctctcagacacacaactctgctataaacagcagaaactctggacacaaacttttatgtaagtcacctgaaataggaatccggcagaagaccttcattaattaagaagcaaacaaaaagagagcaacccaaccaaaacaaatcacattcttgcacaaaagtgatcgttttcttccaaacaatgtgaatttaaaaggtcacacaaaagaagcaatcgggctccgccaccacaaaatgaaacccaaggtacattttcaaatcaatgtatagtagttccccccccttttc

SEQ ID NO: 43351 - DNA, 621 bp, Homo sapiens
actgcactttggggaaggagagctcaacgactggagaactttacattggtctcagtgctgccctgtcagagcaaagaataaagctatgctgggctccttccatagagggagcatgaggaccagccctagccagaggggaatgacatatcccaggggacagaacatgagtttcttggcaagcctcgccacgcaggctaaagtacactgggttcctagataaacttgaaaggaagtctaggacacaaggacggcaatttctaggctcctcctagtgctgggttgggctcagggccagtgaactagggtggcacatgacctagagacacaccagcttgcgtggctaaggaagtgcttgcattagccgtgccctaaccccagggagtgaagctcatagcaatgaaagttactccttgcttctgcttaatgagaggagagcaaagagtaaagaggactttgacttgcattttggataccagctcagccacagtaggatagggcaccaggcagagtcatgaggccccgttccaggccttagctctcagatgatatttcatttctagacacaacctggaccaaaagtgaacccagtgccttgaaggtaaggatccagtcctggtagga

SEQ ID NO: 43352 - DNA, 2698 bp, Homo sapiens
gatcacgccactgcactccagcctgggcaacagaatgagactctgtctcaaaaaaaaaaaaaaaaaaaagttttttttttcaagagaggtagataatgagtgacttcaggttaaacatagtaaatctgagaataaagagggggcaacagtacatgagatacattaagaaatttattttacaacctggaaacacatgagttagtagtaataaatgcacttagaggaccaaagaaaacaaaactctacacaacaaagtagaggaatcaacatgaggaaggaaatcaatgcttgtcacaaaaactccagaaaagctaggaattgaaggcactgagtacatacgaaggtggctgagggaaagagatgcaagttggcataaaaagaaagttagaatcccacatcttctccctatgctgtgtagccatcctaccatggtaaacattggaagtttattttccagaaaagttataattaaggaaattattaaaaagctataatgaaaaaggcaagataaattgaaagtatacaaactggactatgacattgtgagtgatatttgaaaacttttctgagaaaattgagaagctaggataaaaggtaatcctctacaaataacaaagggaactcatgcatcaccagtggacaactcatacccagacatatagattttctctgtgttatgcttaggaatgagcaaattgccaaagttaaccagacatttgaggaaaccctcttctgtgatgacagacaccaaagcaaacaggcagaggagaaaaacgactcatagaaaacagacaatattgttaagagggtgaggaaaagaagattaaagaaaagtataattaaatatcataggaaaatttttttaaatttcatctaaaatatcaagatagggattttatcaagtgctgtctccttttttttttttttttttttttttttttgagacacagtctcactctgtcacccaggctggagagcagtggcgcaatctcggctcactgcaacctccgcctctgggttcaagcaactctcctgcgtcagctttccgagtagctaggactacaggtgtgcatcaccacactcagctaattttttattattattatttttagtagagatgggttttcaccatgttggctaggctggtctcgaactcctgacctcaagtaatccacccgcctcggcttcccaaagtgctgggattacaggagtgagccaccatgcccggcctatcaactgctatttctatgccccggtattaatcaggattcttcagagacacagaacgaatgggaagagagagagacagagagagacacagacagagagacacagagacagagagagaaagagagaagagattataaggaactgactcacacaattacattggctaacaagtgccaatatctacaggatgagtcagcaagaccaatggcacagtctgaaggtcagcagcctctagacccaggaagagacaaatttgaatccaaaagtgagaaaaaactaaagtcataattagaaggcagttaggcagaagaaattctctctactgggggaagagtcagccttttggttttattcaggcattcagctgattggataatgcccaacactaacagggagggcaatcttttttactcagtctaccaatttaaacttaaatttcatccagaaaagactctcacagatacagctagaataacatttgaccaaatatctaaacagcctgtgacccaaatgacacacaaattaaccatcacaagtccaccccttgtcagcttggcactcatatacatctcctcaaaccacatttcattaccaaatgaagattaataacaaggttataattctacctaacatgatacaactattctgtatacaaccaaaaccattctaaacctgtgacagtcaattttatgtgtcaacttgacaggactaacaaatgcccagggagctgataaaacatgatttctggttgtgtctgtgaggttgttccacaacagatcagcatttgaagtggtaaagaagatctaccttcaccggtgtgagtcagcatcaatcacccgatttgttgagggcccgaataaaatgaaaaggcagaggaagtgggagttcatctgtttctgttgggaaagacatcctcttcacttgccctcacattagcactccagggtctcaggacttcagactcagactgggacttacaccattggttttcccgggcctttaagttttagacagcagatcatgggacctctcagcctccataattgcatgagccaatccctcataataaatttctttgtctgtatctatatatatcctattggttctatttctctggagaaccctaatataaacccattccccaccttagctgatatgtatactttcctaatatcccacaatttacatatttacatactaggatgtacagttaacaatatgatctacagttaacaatacttaaatactatggtgttgatattataaactcaatacatcttaagttgcatggtgagggattaaaagaggaaagaaaacaaagattttatatatatatatatatacacacacacacacacacacacaaacacatatacacacacaaaataagaaagaaatgtaacaattacatttcttgttctgtaaatggtcatgtgatcacagttggtatctacaactaccttttttc

SEQ ID NO: 43353 - DNA, 2115 bp, Homo sapiens
ttactaaaggcaccccactactagccacccgcttctcccgggctcaaaaagctgggttctgggtgaaggcaggtccaagaggcccccgaacaggctcactcctcccccactctcgtgcaggttctaggcgcagggtaacctctcctcacaggtgcactagaaagagaaactgtcgcggggaaaggagggatcggaggaaagaaggggggcccacaagctatcacagaggtagaaagttcttcctcacccagatactccggactcgtcctcaccccccgcccaggagcagcgagaccgaggtggcggcggagatccagggcaggaaaaggcgggggaagggggcggtgattattctaaatgctcggcccagtgggaggagtgaagcacctctctcaggcacctgagattcgacgggaaggggtggggaggtgtgtgtggtggcaggaagggaggggagcggccagagaaacccagcggccaccgcagggagagaagggaggacagagaggtcagtgcacctggtcgcagcctccaagtttccctagtccgctccccgggagtccgcggctgcacagaactccatggcttcctggcccgccccgcccctgcgctcagcctttgcaaaagcagccgctgctggcgctacgggcgccgcggctgaggctgctgcgagtggtgaggatgctactgccacagctcgccccgccacgggtcgcgcggctgtcgtgtgcccactgaagctgctcccggccgccatgacagcgccgagtgctgccgggcgcggcgtgcgcgtgcgcgagcgcgagtgcgcggggcgggagggcgcgaaggcggaggcagccgcgcggcgggggcgcggtgacgacgcgcggacagccaagggggccccgagccagccggagtgctgggctggggcttccggctgcactaggcgcgctgctctggtagcaccaggtgtgtacccggcccggcgaggagagacccttccgtccgagggcctacactttcccctctcccactctcggacctcgggaggtgcttctgccaagtcctgaggcggggattttggcgctcctgctgttgttaagttaccgtagggtctcttggcgcggagggaacacgcgctgcgttgcctaggtgtctcattggacttggagaagaacacctgaggcacctctacgagccagagaggtgacggcgctggagccagtgaggctgctgtccctgcccaatgggagcgaggagtccccacccctggctgctttcagctgttgcccgcccgccgctctcggcggagacttggagatttccactgggatacctcggcagctgccgccattcgggaggggaggggaggggaccgagtcgacgaggaatgggaaagattccttgctttgcagctgccgcgccacgaaacctctcccacattcattctaggcagaggattcctgagacagctgctataaacagcgtggagacagggttccttgtgcctgtagacctccgaagggttttttcctctcgtgattttccaatgtgaagattaggctcgcgtcattctcagagtagatcaaaagataaattatattaggtagtacagataggtcctcatactcagtgtcccttctttccacccgctattaacagtaaaccattcttcctagtgagtgaaaaataaatttagaggaaggtggtttttcacccacgtgtatcctttgaggtcaaagggcctttttaaaaatacgcctagctcctaaaatgaaagtgaagcaaaaagtgggattaaacaaaggaagaattctagagaacttaggaaaaaattatagtggtttgagaaatagtttcctgaagaaaaagttatttgagatggccttgagaagtggacagaagccgggcgcggtggctcacgcctgtaatcccagcactttgggaggcccaagcagatggattgcctgaggtcaggagttcaagaccagcctgaccaatatggtgaaacccccgtctctactaaaaatacaaaaattagccaggcatggtggtaggcgcctgtaatcccagctactcgggaggctgaggcaggagaattgccactgcactccagcctgggtgacagag

SEQ ID NO: 43354 - DNA, 1920 bp, Homo sapiens
ttcagttgattcccctgcctcagcctcttaaagtgctgggattacaggtgtgagccaacgagttcggtctcactctattttaaaaaaaccttttaatcaatatataacagacatatagaaaaggacacaaataagcgtagagcttagtgaatgttcacaaagcaacaacacctgagatgaaccagcatccacatcaacaagcagaacgtcgctagcatctctggagtgatgctcatttagccctatgaaacctcatgaagccgaccgttttatcacccccatattacgcatgaggaaacaagcgtggagaggtcggtctcaagcaaagccctgttgaaaccggcatttgaatcagatccgctgactgactccaaagccaatgctctcaaaaagcaggtttgggggttagacggtgagttcagctttgaacgatgttgagtgggcgtctcgttttacagaaacttacttcccgacgtcacagccacagaaaccacaggtaaccagacgcctgcacgtcaggccaccgacgccttggtctacacagcgcagcctccagtgagcccgcggcatgccgcgcggcctccccacacacgatggcgatgtcgcaaccacagtagaaagagtggcgctctctactgtcccggaattcttgaggccggaagaataacagggcaaaggtcacgtagacggcgcgccccgcccccgtacgcctaagttctcgcgcgactcccacttccgcccttttggctctctgaccagcaccatggcggttggcaagaacaagcgccttacgaaaggcggcaaaaagggagccaagaagaaagtgtaagtcgcgactgtcgtggcgtcttgctttttgggggtctgctggaatcggcgggctggtcctagatcgcggcgtaggccggatggcgaggattccagtcggattgtgcgggccgtggcgggttggtgcacccaggaacgcggcctggagggtcggtgttgagtagcggcaggtcggctgcctttcccaggccttctggtccttgcgcgcgtcgcgtttgagccggcttgccggcgcgactcggctggaatgttagttttgtgggctcacgagctgcctcaattctgcgagtgtttgatggcactgcgacagcaggagttgaggaaagcacccttctatccattcaggacccgtcaatctcgcctttgcttggtcccgctggaatctgcgagctcctgctaagctttggggccatgcagtctcttagttaccagtacatgccattacgtgccagcaaagttaatgagattgcatgttactcgtgcctgtgtagtggaaggaccgatgcatgttattctaagtgcctgtgtagtggatggaccgatgagggtgggaagtggacataacctttcaaagtctgatgcatgcagtgaaacgtacagtgggaagagctagatttatgtttgttcccctcacctcactgtgagatatactttggtatcaaattgccggttagctttttaaaatattaatgggaaataccattaacagtgaaaaatacagtaagaattgatctgcaatggaacttaagcatcttcttaaaatccagggttgatccattttctaagaaagattggtatgatgtgaaagcacctgctatgttcaatataagaaatattggaaagacgctcgtcaccaggacccaaggaaccagtaagtagcttattcttggtttgtattttccttaagttggcgcttgtatattgtagcaggcatcttggtctgttgttggtcctgtggtgggagactttaaggaaatgtcagctcttggttgcagccttggcacctgtggtgatcatttttagtacagcacttggagagaagcaagatggtgctttttgaattaagaaaatgtgccatgggtagttctgagc

SEQ ID NO: 43355 - DNA, 1031 bp, Homo sapiens
caactgagttaaaaaccaaaaaaacaccagctacctcaaagcaaggtttttccctttgtttcatatcctccttcctctctctgctagggccctgtttcaccgttttctcttctttcatggctccagtctgatccctccactgattgcttccctgctgcctacaaatgtcttcatgcttcctcatcctaagcatagtcagatctcctctttccttaactctgcctccttctcaaattacagtccatatctctcctgttcaccaccaaatttcatagaagagtaggctaccctagccgccccaacttccacatattctattcattgttgaaattgaagtgtggcttccaacttcaatatttactgaaactgctctctcgtgggtctcaattgacctcctaagtgccagacacaataacctgttctcagcaccttttgcttggcctggtttagtattaagagctattggtgattcacctgttccttttaaaatcttctcctttgacctctaaaacacagctgtgtcctgttttttttttttttttttttttttttttaactctgaccattccttttaagcttttattgcccatgtcttcgctgagcaagatctatcttgggggatccatgggaagtcaggcacagattgtgattccctaacaaaaaagtcctgaaatccaagggaattaaggcaagaagccagggaacaaagtgcaggagcccacagatatgactcagtgaaaggaggcctttcacagcagggctgggttcattgggtcatgcatttttgccttatgcctcttgaaggcatagcttgtcctcagacgtcagcgtctccaagattctatcccttctcatctttcctatcctgtgtactttctccctacatgtttggctacttccaggattttgcttataacagtgattactctaagttatatctccagccaataaattcttgcctaagttctagatcctaattttgtatttaaattatctctctgcccgtcatcgcctgccacccacaacccaag

SEQ ID NO: 43356 - DNA, 504 bp, Homo sapiens
tccacccacctcagcctcccaaagtactgggattacaggcatgagccaagggtgcccggccaagtctgttctttacgcaaatagaaggccaaagagaagagggaagaggtgagcatacaaaggtatcctgggaatttgtacaaacaggaagtacagctgaactttgtgcagtgctgggaaacacggcggctttttgtgcaagctctcattcttcctttctctctgaaaccacatcatctctgcttcaatcttcacatcttctgctacacttgaagattgtttgctggcattcctgtctttgtacataaagcatctgtttgttttaggctatcagtgaattcttggagacacagagaatgtaggaccatccccctgatggttgtcagacagagcgtgaactgtgtgaggagtctgggggtctgacaagcccaatttcagctctgcctttactcactccatgagtataatcacatgtcagtttccttatctgtaacatgacattat

SEQ ID NO: 43357 - DNA, 976 bp, Homo sapiens
tttgttctgcttttttcatgctttgtatttttaaaatatcttttaaatttctacagtgagcctatattagttttatgattaggaaaacagcagtacacacttacaaaaatactggttaaagggaggggaggaaaataagtcacaaaaactaataaatgagagtaaaataatttttacgaaaatatatctgtcactgatgggaattcctaaaataaaacatgttttccaggtagtcaatagttttatgtgaaattttaattcagagaatgaataagatttcccttatgaagcttctctgaatgctacagaagattccaatagacagtaactctaaagaggacacttacattgcttccaaacaatacttttcaaataagaagctttatacagaattattagatactgtaaattcataccttgaagaacgatgttctggtttatttcgttcgttgcgatctgtagagaaagaagatggttacgtgtcaaaaggttctttaaaagctctggaaagaagtttttaaataccagctgccataccattagatttcacaaaggactgttcaaaggtagttgtgtcttcctaagtataaggctcttcatcacagttcgcctgacagaggcagaaaagacacaatgaaggacaggcataaaagcttacggtttgttaaaatcatctacttggaaaatgcatcattacatgcattatttcattttataagatctttcctgtgctaaatactttgctaacactagaagagatttagctaaggaaagaaagcaaggaaactgcaaagccacagattactcagctcaaaaaaatcattccatgaatcatggttggcagaagcttctaacagaatggggagggggaaaaatgagcagtcagctacaacatctgcaaatactaagaccaatacagcttcacccttaactatctaccacccagaacatttcagaagttggatttcaatgtttc

SEQ ID NO: 43358 - DNA, 739 bp, Homo sapiens
ccagctttattttcttaatttcttctatttttcctaatgagagtttaggaaaagtctagctatttctgaaatgaacaaagtgttttacccacagtgttcagaatttagtgcttagaattaagcacagctgattagaacaccagccaatatatttttagtttgcattgaatagagatttctctaattaggaagcattagtgttatttgatttctgattcttgcttcaaagttctctccataacacagcgaactttaagtataagattaaacttaatttaacaagaaaatatttttacatgttcaaacatgaataatccagtcagtagcatttttagatctaagagtattggaaaaattgctctcagcattgagaaattcttccactgataaaggtcaacagaaagcaaactcttggagaagtggaaggcgcatggactttgaagccatacacatgggttcaaatttcaggtccaacaaccactagataggtgtccaatatattcttcctcttacctctttctttccctcctccctgcctggcacccccttgtaaacaaaacaaaacaaaacaaaatgcaaacaacgcacttcaatggaaacatactcccaagatttccttagagtgaatttatactgattaatttttttttaaattcaggaactaaagtaactaagttaagtttttctcttgtcaactcaatatccttgttggccatctgttacttttcttcttctactc

SEQ ID NO: 43359 - DNA, 602 bp, Homo sapiens
ctgccccgcagtcacactattattttcttagttcattcatctccctcactgctacatgactagcacacttctccataagtcctcaatacctccattcccatcctctttctcaatggataatttctatgcttcactgaggaaacagaaacaataagcagaggaattccaccaccacacctgctgccaagtggcatctgtgcccattgcctttgttcctgtgtaggaaaatccgtctgtgttccaatctaagcattctcaccttccaattggtgagctgggatctgtcccctgctcaaggacaccattgcagcactatttgctttctcttctgtgtcatcaatttcctcctctttgctggataattccattagcacacaaacaggatgtaatttctctcatcttaaaacaacaagaacaaaagactgtgccacccagcctcttctgccagctgtttctctgttccctttacagcaaaactactttttctatctcaaagtactccccttttattctctcttgagcctgttccatgatgctaaatctgatggtcagttctcagccatttgcagcatttggcagcctatcactttcctccttgatac

SEQ ID NO: 43360 - DNA, 4184 bp, Homo sapiens
aaaaaaaaatgcagagttgcagctctacccaaaacctactacatcatatctgcatttgaacaagatctccaggtgatctgtaggcagaacaaagtctgagaagcactctttagagttcccattgctacagaggtgtaagaaataccaaaccacgttataaagttgaatacctcatgaaactttccatgaaggagaaatacgaaaggaacaaggtgagagataaaaagttacttgtgatataaaggaatgtcacattattaagcatctaattaagagtaatattcaaatagaagtctgcatattttatgtatttatttatttatttatttatttattttagagataaggtctcactctgtcacccaggctggagtgcagtggtgcaatcatgactcactgcagcctcaaacacctgggctcaagcgatcctcctccctcactctcctgagtagctgggactacaggcacacaccactgcgcccacctaacgtattttattttttataaagtcggggtcttgctttgttgcccaggctgtgcacattttaaaacctacaataacattccttattccaaatgaatcccacttccagacgcaccctccactggcaatagttacactttcactgagagtaaccaatctaccttgtaatctccaggtagctccagtagtctccactgagctagcctatatgttgaggggaatctttgtgaaggaatgaagaaacaaagggtgtggtagcaagataagacaggatcatttacatgggtgatatgctgggggccttcgagtgttatgtgaacacctctacactagtttcaaaggactatttggaaatagtgacatttattgccagaaaaactaattctccacatcttgtacaaacattttcttctgagccctttgttcttggccagctctcagagaaaaagcagttaactatcatccagtataatgattccttgattaacgtatcttctggaaacaaagctccagtataatgaaggcagccatattgaaaacaaatgaactctcagtcccatgcagcagccctggcatgcattctagggctcatcagcaatgcaattgttaatctactcaaatgcatcagagcagggacaacatcacctcccttcacagcttctatttatttattctgaatgaagttggcactaggcaaaataacaaaaccagaaaactatattcagattctaaaggcttccattttggtacccttccacttgcccaaggatggccacaaccacttcaaaaactacacatcacacatgaacacttgaagtttacaagcatgttccccataatgagcctgcagagtagttagggcatgaataattcctattccaaagatgtaaaaaaacggtggagtgggggcctcataaaacctaactaacatgtccaaggtcacactacagtaaagtacaaaatagcaacaagaatctaggtatcttataacaaaatgtattacagcttggtggtaagaggaaggaaacaataagatcaagttagaatctatcagttaggaactgccttcagctgccagctgaggcctatgataacagtggcttaaacaaggtagagtttcttattccttccttctaagtaaaggaggaggcaggcaatcaaaacccatgtggtgactctatctaatcagcagggactgcagggccatctatttttctgctccactattctcagtgcttcggttccaacctcaaagtaacctcatggcccagggtggctactgtgagctacacagccttgttcctggcaggaggtgggaggaagatggtaaggggaaaagggtattctgtgcagttgagtgaaccccctttaaagaactttcctggcaaccccattcaacaacttttacttgtatctcattaacaggctggaagaagtagcttcataggtgggtacattgccacatccagaaatacagggattccattcaccaaaaaaggaggaaatgaggaaaaaaggaggcaaccaggagtccatgctacagaatcctattctgtcactcccttgctgtgtgaccttgaggagattattcaccctttctaggcctcaggttcctcatctgttaaatgaaggaaacaatcacacctactgcataggattggtaccaggactaaatgagaaaaacacactgaaaacaactggaattgtctcggcacccagtgcacaataaatattaacttgttatttgattatcttagcccagtgctttccaaattcctttcctactctaacttcccctccatttccaaaattggaaaggaatttatattagtcatttgtacctgctgacagaggactctagtgtaaatgagtcttagtcataggtcacctcaatcagacaaatgtatttcatgcctttcctttctaattatacaatgaaattatctcccagacatccatacagatcagatattttggacagaattaggatggagaaattgagcttacattctccaacaggtggggcctagagacaatcctaatcagatctttggagagaccaaacaaactaagggagtattaaagaatttaggctggtgcagtggtgtgtggctgcaatcccatctacttgggaggcagaggcaagaagatccctcgagcccaggagtctgagtacagcctgaacaacacagcaagaccccatttctacaaaaaaaaaggtctctttcatgcaaaataatttctaaaaaagtatgtagatactttacccttaaagaggtatagcataattctttactccttaagtgtagcataactcttacttcatagtgacttccttcactttctacagtatggaaagagaggaaaaaggcttaactttttaaaaaaatttcttttgaaggactactgcaatggggtcttgcagttggggagggagagtggacgccaatgccaaaaagagtaactttcaagcagagaaacttcacaagcactacctctgccaggtaatcaaggtcagtagaaaagtcatgataataatatatacccttgaattgtgataaaaatggcactttacctctgtgatcttcctctcaaacacccgtaagccagtttgatcatgagaaaaacatcagacaaatctcaacaggggaacaacatacaaaaatgtgaccagtactcttcaaaaccgtcagggtcatcaaaaacaaggaaaatctaagaaactgtcatagccaaggggagcctcaggagatatgacaactaaatgtaatacagtctcctatacggaatactgcaacacaaaaaaggacactaagcaaaaactaaggaaatctgaatcaagcatggagtttaatcatacatcaatattagttcattaattgtgatgaatctaccatactaagatgctaataatcagggtgtggggtatatgggagctctttgtactatcttcacaatttttctgttactcaaaaaatattctaaaaaacatttaatttttttatttttttcttaattcattttttttcccttggtataacttggaacaaattttttttcccttggtataacttggaacaaattttatttttaaaaagaaaaaaaaggaaaataatggtccacagctcctaccctcacccccatgagcccatccccaccacaaggacaagcttacagttcctgaaggtgaggccaacagctgctgaggagcaaggactcgttccagctgcttctaaacaagggggccaggcctctgccagagccttctccttcctgccctgtgtcaagctatccaagcttcctcctcaacctttaccctgccctatgccctgaaactacctgacacgtattttcctcttgtacttaattgatagtagaatttccctcatacatgtcaagtactataaattcccctagaacacatcccatgtcttccactgatgaaggggaacactgccacattatcagtgaatgaagctgctatcttgaaaaggggtcggcatgacaagttatgctagacaacttatgccaatgtaactgccctcaccagggagacaccgtcttgagctttgcccctttggcttctcccacaccagtggagcagttcacaaggagcctgggagaaactctccaagatctaacttagtacatgggcaaactgctgtaaactatgtcggaagttatttttctgctcatctcc

SEQ ID NO: 43361 - DNA, 2885 bp, Homo sapiens
tcgtcctcacaccctttaatggaaaaagggcatataaatggttagaaaactacaaacaccaattactgaatgcaaaaagtacacaatgtcatgtctcagcaaaatattatcaaagaacctagaaaagcctttgtcaaccttgagaaattagggaactggtgaaaactaattacaaaatgtcatttccaccagctttggaataaatacacatattgcaactaaatgataaacacacatctggatcacatctagtctgaactccaaaacaggtcttcactgtacagtctcttgtgagaatgaagctttctgctgaaggtaacaggaatctaaggtggcctaccctgtttaaatccataggtcaggcatggcggtatatctttgtaaagttttttcattgtactcttgcaagaaatattcacttatatccagcaactattcattatttcacaaggtttgggtttacactgaacaaaattaccaattatgttcaaaactggtgttcatatagacagccaaatgccttattttgatgaaaagttgtaataatgagcatggagaattatttttatgttccaagattctaccaaaggcattaaattgactatttcttcaagatgttcttctcaagttttcctttcatcctactttctaccctccatttgttccgcacagatacaatatcttctctatttttccaactttctcttagtggttaagggagtcacacagaaaagcttctccacttcatggaatattcgctatattccactttataatgaggctctcagtgaatcgttctcctccgactctctcacttccctatctcccttttgttgccagtccccctaggtttgttcttccctcttgttttcagataactcggattacccagttggaaccaaaggccaaagaatgtcctctctattatgtttgattgaaaagccgcccggaagagggaaggggtgtggatctacacttattcactctttcactaatgtgccaaactatttgatccgtgccgcttttgtgtacccaaaacacagtatcataaaagtaattacaggcccgaaaatgattctcagcccaaatgaatggccttttggaatgctatattctggacttctctttgcgtgggggagggtctcacaactaacgaaaacaagtcctacagaaaactggtgagctcggcggctgggggagggagggaggggggtcacaggtccgaagtgcaagggacgccgaaacaggacttgcctcagttatgagcacgtgctctgacctggctgcggcggcgcaggcaaacccctcggaaggtgtcgttgtccaccgagacggccattgacctctgactcatccagagataagtcatcaaccaggccacaagtcccaagccagcagctcctggatttagtgtgcacggaaaatttgagtttcagctgtacgaccactagcagttaaagacgggtctgaatttcctcgggctcggccggaaagtgaggatggcgatggaaatgccaccctccccgagtctggcctctgagagttaaagaagccggtcccatcccggcgcgtgaaggagctgccgctgtgtggggcaggacccgagcggccccagagcgcgcagctctgggtccccgccgccccgtcccccgcgcctctcacctgcggccgagtggcccgagagcgcacggccccgggcgcggcgctggccaccaagttcgcggcgctcgcgtagctcttcctcctcgtcctcccgccgccggccctcagccatgggcgaggcgcggggcgcagccgcgggatggccagcgagctgcggccccggcgccccagaacgcctgcacccggcgccccacgccaccgccctcgggccggggggaaggcggctcccggagaggaggcgtcggcggcggctgtggaaatggccacctccgcgaactccacctgcagccggccgggcagcggcagggcgcgggccgagccgattccccgcctccttgcggcgtcccggcggcctcttaatccctggcctttcccactcccactcccgctctcttcccccttcctctttgccttccccgccccgtagagctccaccgcggatcgggcgggttcggggctggcctcgcctcctcagggaggggttatcggcccctaaggccgccccacagccacacacgctggaaacaccagctcgacccaaacaaacgtgtgcaaaataaataaacgggataggaagaggggaaagaggaggtggcctggcctcttcctgccttttcacgatattccagtgtcaacaggaaacccatttgtttgacacttaaacaaaaagaggaggaacccgaccggggccgaactgggagagatgggacagctgggagctgctgaactttggaacaaacttggcttggagttgggtcgagcctctgcaatgcacacttttttctttccctctcttttcgcccttaaaaacctagacttgcgggagcacagaggatttttagggcagtgaaactactatgcgtatgattctgtaatagcggatgcctttgtccaagcccaaagaatgtacaaaaccaagagtgaaccgcaatgtaaactatagactttgggtgattatgaggtgtcaatgtgggttcatcaattgtagcaactgtggcactctggtgggggatgttgataatgggggaggctatgcatgtgtgggagcagggggtacatgggaaatctctgtacctttagctcaattttgctgtgaacctaaaactgttcttaaaaatagtctagtaagactggaagcggtggctcatgcctgtaatcccagccctttgggaggtcgaggcgggcagatcacgaggtcaggatatcgagaccatcctggctaa

SEQ ID NO: 43362 - DNA, 1573 bp, Homo sapiens
ttaatgtcggccaaggccacatttcccctgcccactgcagggagtctgtcaggagaacaacaggcgaacgtttgcctcacttgactcagctctcttggggcggtatcagcattttaaaattcacacctaaaggaaggagtcagcaaaggaaagcagagctgggccggggcgccggtggccgccgtcaaacctttgggaagcaagaaatccgaaacgcccgtgacgtgcggcgttgtccgactccttccactaggcagaacccgagagacgagcctttggcgggacggtgaacgattgtgctgtgtacggcggtgtgcgtgcgtgagtaaagagtgtgtagctccggccaaacgctagcccccaagggcgcgagtgctacactgcgcccagctcaagtttctgtggaaactttccctcagaggctcctcctccttcaccttggaaaccggcgcgggccgtgcggcgcggcactgcctaagtccccggcgcacctggcggcggcgtgtcccagcggcagaggcggggccggcggcggcgggggcggggccggggcgcgctccccgaggcctccaggcaggttgggccccacccccgcccctgccccgccccggcccccgcccccgcccccgccccccccgcgctcactagggagaggctggggggaggcagtgacccacgcgcctcagcccgcggctgacgcaccttcgaaaagttgcgctccgaccttctcacgacctacattcttcccgggcactcctgagtttgagccgggcctggaggacctgggccaagactttcgagcggcggccgcccgaggtgcgaggagccagcccggctttcctcactgggtcccgcgcaggcgtccccgggaccgcagagcaaactttctggactatctgaggacacttgtccagcgagccccactgctcggggaggaggagccacggccggggacaggtaggtgctgtgctggccggagatttgcgcttgagggattcttttattttagagggttgaaggaggagggagagtcgaaatgtcccttctctgcatccgccaactgggcagggggtgcgggcattgggctgagggagcaggcattgggctgggggccggctggggatgttccaaacgaggtcgctgcgtcgggcgggggcgcaggggggaggaggtgacttctagggtttcgggctccgggacggggcgtaacgcggtgactgaccctgggagagagagagccagcttgttttgacgaaggaatatgtcattagggccctccatcccattccttggtcccagggtcctctgggaggcacaggaaaaggcaaagagatgtggagttcaggtttcccctgtaaatcaacttgcttacacaggagacagaggcggtgcccctctgaggtttgcagccctttcctggtgtaaggacttactggttaggtagctgttgctcaatttcgtaaattctgtgatgaaactgcgttcaagtcgtggttattattgatagtgtgtatgtgtttgtgtttcctctggctcaacaaaggtcccttgttaactccgcttctgctaggga

SEQ ID NO: 43363 - DNA, 2223 bp, Homo sapiens
gcaaaggaagacttggcttgtgaccagcctgattggttttgggaggggaccaatccgaggtactttcagatttttatctgtcatgcggaacaaggagatgggggttgcaaagggaatagcctctggtccttttgttacttgggtgtggaaagttggggttttccttttgatttagttctaggaagtcagcatgaatcagccttaggttccctgcctccagaccctgttcttctgcctcagtaggattacaggtgtgaaccaccacacctgaccatgtattagtcttgattattgcttattctctaacactaagtcactatttgataagttgaatttttaaatctctctaatttgtgtatactacaaaacatttgtacttttggcttattttaagcaagatgttgtagtttaactgcttgtaaaaaatctgccaggcccaatggctcatgcctgtaatcctgggcattttggcaggcagaggtaggaagattgcttgaggccagaagtttgacaccagcctgggagacatagtgagacccgtcttaacagcaataacaacaaaaaattaggcggtatggtgtctcaccccaggagtcccagctacttgggaggctgaggcaggaggatcacttcagctcaggagtttgaggctgcagtgacacaggatgatgtcactgcattccagccttggtgacagagtaggaacctatctctaaaaaaaaaaaaaaaaaaaaaaacaagagaaactctgacaacatgaattcattgactttgatctgtttcaggaaacaccaactgacttgatatttacctactgattaaacttaatggttaatgttaatttcttatcagcttgattaagtttgacctctgaattttctccttatacttcttcacagtgtttaggaccttgcatgtcctatttgaaaagtacaccctggagttgctatagatagtaagaaccagcttgcaacaattggagagtgttttttttgtccttaaagtaattctgcctcttgattatgtcttaggattggtttcacagagaagtggtcattccttcacagtgaatcacaaaatgagtagttttgacaggatttcctgactcagtctggctaactcaacctgctgttctgagtttctgtcaatattggcatgccaggagcaaactcttgacttggttgtcttgggtatacagataattcctaaatccataccctcattgctgacctttggaccataggcttgtttctaaccagttcctgctggataggtctatgtttagatcctgacatcaaagtaaaccataaggagttgagagtaactctgcatcttaattgcctaccagagcaccttatattgaatagaatcctataaatgtttgttgttaatgatctgcctcttattattatatggccaattataatatttttcattttgtttctctttccagtttttcttgctctaatctattttcattccatagtcaattgattttccaaactatagctgtgctcatgtcacctatcatggtctctgttgcctactgggtaatgactcaactcaaggcgtgatggttaattaattttatgtatcaacttgcctgggccacagggtgtccaggtatttagttaaacattctgggtatgtctgtgagaggatttctggatgagattaacattagaattggtaaactcagtaaagcagactgccctccccagtgtggatgggtcttattcagtctattgaaggcttcagtagtacaaaaagactgagtaagggagaattcactctcctctctctctctctgtttgactgttttcaacctgggacattggtcttctcctgccttcagattcagactcaaactataacttatgttattgtctctcttgggtctccagcttgctgactgcagatcttgagacttcttggcctctataattgcgtaagccacttccttataataagtctctttataaacacacacatacatctcctactggttctgtttctctggagaaccattggctgattctcagggcatttatgatctggtgctctgtgcaaatcctttgctttgactgccatgctggtctgttcctcattcttttttttttttttttttttttttttttttttttattatactctaagttttagggtacatgtgcacattgtgcaggctagttacatatgtatacatgtgccatgctggtgcgc

SEQ ID NO: 43364 - DNA, 713 bp, Homo sapiens
agatcagtatataaatataaggactcagcatattctaaatttacatattttttcttttctatgaaacttttctttgatagctttaggcaagtggtacatataatcacagagtgtaaaactatgtgaaaaatgatataacagggagagccaaattcaggagtaaatattttcacattgactccagttaactctgcctcttggtcaattattcattcccaggtgtatgaatcattgcagtaagaattggattttttttccccagtcattcataaatgttaccagttggctcatttggaaacttggagtttatattattagtgacatgggactaatcattggaatttgagctgatctaatctggtaatgattttagttccaatcagtgtatgcagatcttgcctcagaacactgtgtagtattagttggttgtttactattgagtaatgagtaggtcactggttaggtaaaaagaattgacctcctactgccaatcattccttgattctgttgtctaagaaaatatcttttctttttcacactatgcaaggaaacccttgctcttggtggccagatgaggaattggactcctttatgacacacatcttttaaaaaaattgatatgtaatagttttaggtattttgggggtaatgtgatattttgatacatgcatacaatatataatgattaaattggagtaattgggatatttata

SEQ ID NO: 43365 - DNA, 1661 bp, Homo sapiens
tattggtttcttccgaggaaatgatggtggatactaaaggtagcataacaaggaccacccaagtggaaaatgggtttgaagatggactctgaaagcttgaagacagtatgatgcaaaatgtgtatgatagtcctcaggagaggctgtcagtagaattcatctgttatgaaatttggttgtgttctcagaacagtgagacaaatagcaggtggatagaggcaattacagatattctgagctgttgagataattgtatatttgaatatgctatttcagggttaaaagtcgtctacatgagaaaagaagagcagttatggcagcattagaaggctctcctttctaatgtaatgccaggaatgtctgagtcatgcagaattggggtggtgagtgaggaatgtttctctgtggcttccctggctttgtgtggggagccagtgggaagccattttcaaaagtggttttgaataaaaatctagccccaaaactgttttagtaaataacacaaaaatatacctaaaaagtgacttgttagggtcaaataatcaaaccacctacataatgctgtaaatctgaaatttgttcattttgcacatatcttttcataattttatcaatttttaaattataatctgtgccttcttttgtaaatttagtctttttaattaattcatccattttggtctcttcacatattctatgacccttataatttctttcgagcatagtttggatcttttccagttttttttttttttttttttgtctgttctaattgaccagaatggcttaaaataaatatgtataatttatgtttggtcgtgttttccatttcatttttaacatcatttctgaaatacccttgtcttggtctttaagtgtatagtgccacactgaactgatgtactcagagaaaagtctctaacaactctagtctagactagaggttctcaaagtgcggtccccagatgaacagtgcaaacttcacctgggaacttgttggaaatgtaaattcttggactgaatcagaagcccagagggtggagctcagagtttttttttttttttttgagacaaatcctcactctggttgcccagactagagtgcagtggcacattcttggctcactgaagctttgacctcccgggctcaaacaatcctcccacctcagcttcctgagtagctggtatgacaggcacctgccaccatgcctggctaatttttttattttttgtagagacgggtttcaccatgttgccccaccttcttgaactcctgagttcaagcaatctgcccgccttagcctcccaaagtgtggggattacaggcgtgggccactgtgcctggctgaggtttatatttaacaagccctctaggtcagcagtctccaaccttttggcaccaaggactggttttgtggaagacaatttttccatggatgacggggatggcgtggcttgagaatgaaactgttccatctgagatcatcaggcgttagttagattctcataaggagtgtgcaacctagatccctcacatgtgcatttcacgataaggtttgcgcttctatgagaatctaatgccactgctgatctaacaggaggtggagctcaggaagtaaagctcacccactgcttacctcctgcttggtggcttggttcct

SEQ ID NO: 43366 - DNA, 904 bp, Homo sapiens
attgctctttagaagcgtataatcaaacacagaaatccttataaacaacatacataaaacataaaaagatgttcagtcaactgtatgaaacaaatacatattgatagaaagtagaggccaggcatggtggctcatgcctataatcccactttgcgaggtggaggcaggaggactccttgaacccaggagttagaaactagcctgagcaacatggtggggccctgtctctaaaaaaaataaaaataaaaatagtagaagcattattattaatatggttaggtttcaggtggggaatattgcatgcaaagctggtagagaggtagggaagtgaaaattgctgtgaagagagaggctttcaagaacccactgaaagttagaaaaagatctatggcagggaaggagtcaaatgcttcccacagggagggaggtgagatcatgctgcctcctgaacatgaaagtcatcattgtcatgagtcactgagttcatgggagacatccggttaactaagttataaggcaggtttagaccatcagcagagtaaaagctgaaaaggaacattccacatttgtgggtatgagctcacagacacatacctcctttagggtgacaagggtcactatacaaaacacctaatccctgcaacacctcactctcaaaagcatggaggataactatagaagtgatttgcagagtgactggcaagaagcaagtctgagtatacaacataattataaatctttcagattacattaaagcaaatcattgaaatggaaagaaatttcatagaaaatggtcacattttgtcttcttaaatagctaaacatcatctaagtgtgaatggacggagagataaatgtagatctgattataaatgtacgtatttaaagacttttccctaatgat

SEQ ID NO: 43367 - DNA, 1358 bp, Homo sapiens
gttcctccaactgaaagtaaaaataatgccaactagtctcaaagaataaacaaaatattagaaacttgccatatgtttctgtatttaaagagaaactatttaattcttacataatgaagcataaacagctgttcaggggatatctggccaaataagcaaaactctccatataaccagggggagtatctcttcttttggctgcgtcctcctaggtctagtcacacatattccaacataaaacgcctgcacagatagctagtgttttctgactaatgacaataacccaccactaccaagagcttgtaggtaaaggctccctttctacctttagaacgctgccagcccatactagcgctaaataaaatcagctaaatatgatcccgcttctcgtgtcaccgtccccactgctagtgctattagtaagatgaccgaatccactcttctgtctgtgcacccttcaagaaaatatttgctattttacactcgcgaattccccaactacatctatttgaaaacagtggtttatatatgggggcggagttgatagaaagtctgtttgtgcttttatttaggtttcggggctccaggttataactcaacgccctcccgtcagccaaaacgtctagaagctgggccgtaattgccattatttccccagtcctgcagttccacctcacagttaggtgggcagaaatgtatgaaacagaataccctttcctcgtcttctgggccgtgtggaggggctgctgagccactgagctctctcccctaatctggttggatgtggacccagtcggagcccctcttcggtggcaagaaccaccgtcaacccgggcgaaagcccaacgtcttccacggcagccccagcgcagcatgggcgccgccattgtaactccagggtcttggtcaggtgactcagcctcactatgccgcgaggctccctgggaagcgtagttctggaaatgcattaaaaacgccataggctcggaccggaagactactattcccggcgagcattgtgattcgaagcctgccggaaccccgcggagaggggagggaaggagaaatagaggagagggtgggagggtttctgggtggggaggtgtgactcctcctagcggggagttggagaggtttgtggctgtgagcgtgtgtataagttagagtgtgagcgcttgatgcttggtgctaaagcgtggccgggattttataacccagttaaccttgcaaggggaagtaaatgaccttgacagctcagcagagacttcctcagcccccaaacccaatccgttatattctctgtctactctcctgcttcactcagcaatttgtgcgttaatgcaacaaatacttatttg

SEQ ID NO: 43368 - DNA, 598 bp, Homo sapiens
tttctaaagcttaaacatatattacaatcagtactaaaaagtttaactcaactaaaaagtttataattagtggaaaatactatgaatactattagttcttttctttaccttgctaacatttaaaaatacacttccattttataatagtaggagaatgtgtttatattcctatgtcagtgattttattattatcatgacaacactttgtactctagaaaggactaggaaaccaccacagttagctgtcttgccctgagcacagaatttagattacagacagttcaaaattacagacagttcaaaatttcaacatcaatgaaaggaatgccaagcatgttgagactgaaatactttttgaaatttcactaactcactgtcattaactttctgggatgtgagtgcttattaaaaggtttgcttattaaaactggcaaactaataaacctgttctattacagatatcaactggaatagtatatatgcccagcatttacattttcactaacacaaataggtggcagtattggccaataagcaattttccatatttattcattcagtaagcatttgtttagcacctactttgtgttgggcacag

SEQ ID NO: 43369 - DNA, 405 bp, Homo sapiens
caagtgctgatggagaagttacagcaagttatctagaagatctaactaagatcactgatgaaggtggctacactaaacaacagattttcaattgagatgaaataactctctactggaagaagaagccatgtagtactttcctagctagaaacgataagtcaatacctggcttccaaacttcaaaggataggctgactcagcatgttaggagccaatgctactggtgacttccaagtggaacaatgatcacttatcattccaaaaattgtagggcccttaagaaataagctaaatctactctggcttgtgcagtacaaacagaacagagccttgatgaaagcacatctatttaacaacatggtttgccgaatattttaagtccactgttgagactgtagctcagaa

SEQ ID NO: 43370 - DNA, 1418 bp, Homo sapiens
aaactataagagctaagaccaacattctaaatatctagagaaaggaagatttttgtattagtaaaaataactttttaaaaaagagtaaaagaaaaacatatataacataaaacaacagtaaatacaacatatcagttagattaaacatactagttatgtcaagataagtaaataggcttaaccttcctattagaaaaagtttcaaattgcctatgtgaaaaatataattaaaataactataagcatagcgatctgactatataccttcactgggctatacgctataaataaaaaactgcatagaaatcttaaactttattgagattattattagtagtggtattgctatagtaattccaatgttatatcatgtataagacagagcaaatgaataaacatatattgatgttattggtaaactggatcttcattatggaagaggaatatgaaacaaggaaagaaaagaaccttggtgtcactaggaattcaaatatcactagtttttaaaagtatattttcttattctgtctaatgaaaagaaccaatagaagcaatgacacccagtaatgcatccatgatgttggcttccaaataccattccccactaagagaaacaagaacttttggtaaaatagccaagtccaggtctggggtaagaaaaccataaggtaaggagagaatgttttgttgtgccacaaagcaaactggtgctataaaaatgagggggcatgtcaaagaaacagaaaccagactgattgagttctcgctggctaaattttaacaatttgagtcaccaaaggatacacagtcatgcgtcacataaccacagggatatcttctgagaaatgtgtttgttaggctattccctcactgtgctaacatcacagagtgtatttacacaagcctacacggtatagcccattgctcctaggctacaaacctgtataccatattactgtactgaatactgcctggtaactgtaacatggtgcgtctgagaatatctagacatagaaaaggtacagtaaaaatacagtataaaagattttttaaaatcatatgcctatatagggcacttactatgaatggagcttacaggactggaagctgctctgggtgagttaatgattgagtgaagagtgaatgtgaaggcctaggtcgttactgcacacggctgtaggctttgtaaatatacactcaaaccacactacatctatttttaaacattttctttcttcaataataaaccttagctcatataaactttttagtttttaaacttttctgacttttgtaataacatttagcgtaaaactaacatattgtacagctgcacaaaaatattttctttccttttatctttattttacaagccttttctattttaaaaaattcctgttttacttttaaaactgttt

SEQ ID NO: 43371 - DNA, 844 bp, Homo sapiens
tggcagcacagtagatttgacttacactaacatcactacaaacatgtaatatgttggttgtgacgttagtcctaacatgttataacagctacaacgtcactatgcgatagaaatttttcagctccattataatctcatgggatcaatgtcgtatatgcagtgcatgactacataacaataatggattttagttcaccgaattaatgaagaaaccatgagcccttagtgaaaggacagaaactcctttacagaaagaagaatgccagctaataaatgtggaaagaataatagatgtagaaaatcattttgcaagcatcaatgtaaccaataattcaggcataaatcaataatggatgttaaaaacactgggtgaaaggctgttgagaaacaatgtttactcagtctcaaggcattaccccacagattaatgattaattatcaaggggaaaaggatacttttacaatagagaaatcaggtcacaccaccttaaccaagtaatcaaactaaacatcataaataatggaccaaactaataattcagaggataaaataaacaaactttaagtacatacaaatatcaacatgaataaatcttgatgtaaataaacactgagtgaaaaaagcaagttaaaaagttatgccaacagtatattattattcacattttaaaaggaaatcagtactgtttatctttttatacaaatatgtggtaaaaagtattgaaaacttacaggatacctttagaaaagtaattacctctgagaagagaggcaaaagaatgagattagtaatcttcaattatatttttaatttattttaaaaagttctgaaacagtgatagca

SEQ ID NO: 43372 - DNA, 3238 bp, Homo sapiens
tctcattcgggaacctatatgagagtacccccgaaacaaaaagtacaccgcacacacccacagtaccaggaaaaggttacagatacagatggcctctgtgcgcacatatgctctggcttcctcaatttccctttgccaactgctggccagaaaggtgcgagtattcactttggagaaaagactcctccgacagaaacctgcatacttgcattactcgtacaaagagctaaaaagttacaaaatacaggcctccctaacaccttcccccctccgtgaataaagctagactccctcattgatagactcccaacactactggagaacatcagcaaaactccaggaggaagcgccggcatcctcccactttctccccctcaattccctctcccggggccactcacacttttagaaaagagccgcggcgccgagaaagtgggttggttcccttcctccttcggactgaagcggcagctgcggaaggctccggcgcggtactgaggaagaagcggtgctcgtgtcgctaaaccaggcggcaacccgggtctcttccgcgctgccaggggaggggaggcggcggccccgcttacctcctcttttcctcttcctgggtcttttcaggctgcggcttctgcccgtccagggccacttctcccgggacagtcaggtttgggagactccggattttgtttttgtaaagtttcctctgggtggaggctgcggccggccccccgggtcccccccggccccgccgccctcgggactggggcgggggaggggggctctaggaactcctcccggagtccagccaaggagccggggggccggcgactggccaagggagaagacccccggagggggctgaggggagggggaaggtgaggaaaggacggcggcgtcggtcctgttctctccgccgccccagccgccgcttcacatcggggtccccgcccccccggccggggggtggttgccgagcttggttggggccccggttcatacactccggggcaagatgctacggccccgggcgggtggccgagtcggcggcaaggcgagggacccggccggctccgctcggcgccgcccccgctcccggctcccgcatgtgtcgctgcggctgggacccccctccctacaccttgggggtctcgccccacgccccacgggacgaggcagaagctctggcgcctcctcagcgttctctcaccgcggagcagctacccactcccggcccgtggtagccgcctccctgccccccaagccgccggctccggctcaggctcgggctccggctctggctccggctccggcgtgtgcagccgccgctgccggccgggaaggtgagggggggaaaggagtgcggccgcggctcccgctggcccaggtgagagcgaaggtctcggcggcggccagtgcagggggactggatctctcggatgctccttcgctctcagtctcagcggcggcggcggcggcagcggcagcggcagcgcccggagctcagctcgctgtctccctcgctctgtgcggggctctcgcctcactccagagagaggggcgggaggagagcggcgcctgccgatgacgcaagtcacctagcaaccgctctcttccccctccctcttctttccgctctgaggcttcctccgctggcctttttcccccttccagccaccccgccctgggcgcctctggcgcgctctgatgacgctccaagggaagaggaagtggggatcggcgagcgggtgggtgcgcctcgggccgcgggactcgcagccgccaccgccgctgccgcctctacggccgcgtcagaactgaagagaggaaggggaggagccgagtcgagcctaagctgccgcccgatcttacccctgacccgagggcggcctggagagcttggtctgtagcggtttccttcggggcaggtggggactgctcctttgggaggaaggaggaggcccaggccgcgtcttcaggcagctgcgcgcaccacccgaaggtgaggcatttggccccaaacagaccctcgaaaagccggactgatcgaggagttaccctacagcctgatctgcacctgctccagggagagagcgccccacccttcccgtggcgtggggtgagacccagcgttggataacgtgtggtcgggccgagcaaatgtttgatgaatgaatgaatgaatgaatgcctctctcacgtggcactcgtgaagctcagaggatatggtggaagtgcaagcgctttgtaaactgcagtgcattgtaaaaatgagttgtaatacattcctcccctccccctagccatgaaaggaaacaggggtgcggcttgagtacagagtcacaacctgagtctttagtggaaaaggagacgaaatgccgagcaagggaagggacccatcctcgcgcagattgttagggcggcgggaagggaggattggaagggagccatcctctgggagattgctgaaggatttttgactgtcaggggaagaatttaatagtccctcacttttacgaatggttctttcttacggtttggagctttcgagagcttctggtcttggttcatcagtgtacgttgtcatcaagaaatgttggcctgtttcaggtctgactcaaaggttattttctttctaaaataagtgttattactattatgcagcttttcctacagatgttatcctggaaaggaaagttaagtagaaactcatgaagtttaaagtgtagttctctaggaaaacaaatttaagataaaaggaccagaatcctcagaaatctgtcttcagtgaatagtatgagaaaaagattaaagcagcagcaatgatgaaagcagattccacaattctgtccctggaccctagtacactctacctccttgggaagcagtagtaatggattttacaagtctttccacctggaggagggggtaaggtaggagcaagtgtattatagacaaatgtgggaagctctgggtttctcccactactgccactaccatctgcaaacagtaaactaaggaaacttttaactgggtaaatccaagggctcgtgttcattaaaatgctgcgggaaaggtggtgagaggggcaaaggaggatgtggcaaaaccaaggagagactcacagactagcacctgaccctactgcccttgacctgaagttccaagagccaggttaaatatcctgcttaaattaccctggatttttctgtctttacgtgaccaatcccctgctacagcc

SEQ ID NO: 43373 - DNA, 550 bp, Homo sapiens
atggattgacatttttatagctcaaaaacagccgaatatcaggaacaccaatctgtacctttcctccccatgataggaggtgggatgtgcacttttgtattttactaggtctccgcctccgtcgctttgcctcattcacactgcacactgcatgtctgcatgtggattgtccgtttgcagtgccaacccccacatccagacatcatcttagctcagattgacccctgagcttcagcctgtgcagatactccgctctttggcccctgtccttgtgcaatctgcttgggagagagttttaactttagaaggatcctatccagataaaagtagggacaggatgttctttagggaattcccagcactgaacagggcccagagggtcacttagtatacatatacacgccaaagcgcagatgccctcacccctattacatactgcacactgacattttcttttcttttctttttggagacagagtctgtctctgtcgcccaggctggagtgtggtggtgcaatctgtcactgcaacctctgcctcccaggctcaaa

SEQ ID NO: 43374 - DNA, 809 bp, Homo sapiens
tttttttttttaagtttatgtcgtttctttagtatgctttctagtagtaaattttcacaccccagtttttccaggagattttggaatcagcagacttctcagcccacaccataaaaagcaaattaatcatgtctctgtttcagccaattgaagcttttgtttttttttacataaactgccaaaaagtttatggttttcttaatatgcccattaaagctggtaaattacagggacgcacacttcctggaagacaaagactgaaagagggttaaatgaagtgagagctgtagccagtttagacagctgcagcgaaagcgaagtcccctctccatcccaccccccaaaaaaaggagttctaattttctccacttctttcacagaaaggattagattttctgggtgtcaccctccccggcagagttctgtagcctcgggcaccctaccagcttttgcgatcctccttcccaggagtaggaagtggaggcggcttaccccggccgacgggaacgagcgcgatcaccagggcgaagactagggctgcgcggggagcctgcatgtccgctcgcctcggcagaggcgcgctcaggatgctgcgccgggctgcagcctctctgaaacgtgaacatttcctgtttcctgcttgtttgggtcggtgctgacttgaaggagaggtgtgtgcctgttttttaggaagtgatgtaattctgcaggagcctgtcagaccagcaaggattgcaaaagagaagttgctgttgaagcactggttctattatcacgcctctccagccctttggagtcccggcctccag

SEQ ID NO: 43375 - DNA, 1548 bp, Homo sapiens
agcaaaaagcaaaaagcgatcacaaatccagagcaagtaagagctcagggatgccgggcccgggggtctagcctttctgaagggagagggctccccaggcacgggggcagcgcgaggcagcgcccgcattccgtctgctgccttatcttcgcattctccctaccacccccaccttccccccgggactggaataaccttcttcgtgctctccggtggctgagaaagcagctttcgctcttctgtggtagcgtggaggtgaggtacatctacctccaccctcccggcaccagctcacggtctgttgggggggtcctcctaacgtgtgaggctagggtgtgtgaatgaaaaagagggaggcggaggcctcctggagaccttcgacctctcaagaccaggcaggggcgcccttccgcaagctcccagctctagccggtgcctctggccccgcgcgcattaggtcgctgccagaaaattacccgggcaacgacaccgccggagtcccggatgtggttgctagggcagcagagggaggggcgtagcccgcctcccggagaagggcggagggatcctcgtgggaggtgcgctgacaccaccgagacgtggccgggcaaggccggattgagggagagagaggccgtccagggccagggacaacgctacttccggtctcctcacttccggcttcgctgctcttggttctggttctggaggctgggttgagaggtcgccggtccgactgtcctcggcggttggtcagtgtgaatttgtgacagctgcagttgctccccgcccccgagcagccgaggtgcgtgggggaaggggaagaaggaaaaggtccgggtcgcgtttccgctcagtttttgccagggttgaggcgattccagagagcggcggaaaggataagcctcgacttagaagctaccgagttaccctaagaaaggtgagggcggagctggctcgcctgggaaaaggcgggggaaagatggtttgaggtggctggtggggcgggcacgttgcctacgggttcaccgttccgaactttcacagggcacgcctctccttagtctgtgccgtatctgcccaagtgttatgcctttggtttcttctgtccttcattccttctgtccctctgagtgtgcccccgaaacagtcgagtgaaggtgtaggaccggcccttgcagggaggcactctcttggctttgcatacattgggtgggaaaaggagttgcaggatccagaatccggacctttcttgacaaagtgtcggagtgggccaccttcaggcttgctgtccaaccctcatttctcccctcttctccctgcatccccagcttcctctctcccgcagtgggaggaagggagatagtgacagtccctctgagagattcatctggcagtggtgcagagaggagtcttgcctgtgaaatgtcccaagcctgactaaggaatgctggagttttggaaagggagttgttcgattgtcttctgctccgttcctgtttgccaagttactactgtttacgtgtctaggaaaaggaaataattttt

SEQ ID NO: 43376 - DNA, 386 bp, Homo sapiens
ctactatatgatagtgtgctgctgcgtatctctttctactgtatgatagtgtgctgtgcttatctctactatatgatgttgtgctgcagcgtatctctttctactgtatgatggtgtgctattgcatgtctctttttcctgcctctggattcagtgaggtcacgttcgaagcttgaaattggccactgtagaagtattggcaacatggaaatcgacaacagccacatgctaaggttaagccttttttttttttttttttttttcagtttggaaaactggttgttaaacatttactagcacacccactctggagacattgttctttattcaatgaatgccttctgtgtgccggctacccttcataagtgctttgaataaatctttac

SEQ ID NO: 43377 - DNA, 2138 bp, Homo sapiens
ttgaatgaatgggagagagggagaaaagaagattgaaattgtgtgtctgtggcaggcaggtgtgtgtgtgtatggtggtaaatggaaaaaaatcaataaaaatgttagatttactctcttgattagatggaataagatacaggaggatattgtgatcataaagtgagttattaaacttatttaaagtgagaatctagaagtgttgcttccgaagtgatgacaaggtctaagagtggcaatttgagtttaggttgcctgagtggaatatggggtatgaaagatgaaaggcattagaaatgaagatgttaatgaaatctgagactaaggtgtagattgggttatactaagtctaaaatgtcttttatctgccctgacacttttttggcatgttgtccaactacagattcccaaacctgatccagattaccaattttacgcatttctgcaagtatacggagggaaaataaaatcacatacctttacatatcattattactatcccctgtcattctgcatcagcataggtaggcaggctcatggaacagattttaagtgttttacaatttatattttaaaatatagcaacttactacctaccataacattagtggactgtatttttaatgatcggtgaaaactttcagcctagacagcgaatatatcagcttggaaggaattgctaactgaacatctataatcatttcctgaaaatgtgcccaccaacatgcaaaaggttagaaacacccagtttaatggtgagagttagggataaagcagaagccctagatgtgccaaagtcttcaataaatatttgaaattgactggaaagaaggtagatgacaatgttgaggtggggacgagggcagtgaggaaggtgacacacaggaaacgggggggttgggtaggggcagagttgcacaagaatggaaagcagttctctacaacagttcctcaaaatagactaaggatcgcctgcatcagaatcacctgatttccttgttttgaaattcggatttctgggcttcacattccaactcagtgagaatcaccacacagctaagagcaatctgcatttttaacaggatcctcaggtgattcctactgaaattaaggtttgagaactggttgtttagaagtaccaatagagagtttagaaaatgctgaccctgccttctaacaatagaatattgataagtagaatgttggaagataatcagttttataaaactcaagataattgtggagaagcagagaggccacttaaggggggttaatagtgttacagaactggggatgtggaggctgttgtaataatagctttgcttctggcagatactttttatagacagctaactgttaaactaacaaaggagattttaaattaacagaattcatcaaacatttaacataagtgttttagtttgtttctttaaaaaatttattatgtagatgctttggaaggttttgtcccttttgaagcatgagatgttactgagaaaatttcttgccaaatgaagtaatagacactctgctagatgtcaagaatacaagtggtgaacaagatagataagcttcctgatcttagcatatggtcttcggaatgggaagagaggatatagacaaattaattttaataccatgtgaaaaatgttgtgctaggccaagtatagcatggtctgagtactggtgggagcatggaaagattacctgagtgattactatataagctgaggtctgaaggatgacctagccagataaagggtgaaaaatattctcatcagaagcaactgtaacaacccgaaggaagtgtgagaccatagaactggaaattcatgttgttggaatggagaatgtgagggcaggtgtgtgagaaatgaggctagagagataagtagatagtagatcctgcaaaaccttgaaaaccatattgaagagtttagtctttacctaaaaggcaatggagagccactaaatgctataaaaatgggagtgtctcagttgggttcacattttagaaaactgtctctgtctagtttgaagaattgattgcgggactgacagtactagagacatgggaaacaagttcagtcatcaagggcaaaagaggagtgagacttaggacattctcaaggatatat

SEQ ID NO: 43378 - DNA, 1104 bp, Homo sapiens
ccgctccctgactgctgcccactgtaaggacaaacttttttgtgtcccctggcaccagtcagacccagggccaaccctggagtctttgggtctctggatggaggttggaggatgcggaagaggccaaggaggagacagggccaaataagagaggtttaggaatgtggcagaaatatgctaataaattcgtaagtggacacattaccacgtggctctcagcctatgtgtaacgctctgtgctcatttttagcacaagtaaggactaaacctttattgagtgcccccatgtaccaggcactgactggacagggcagaatgaagtgactgagcctagtgcctggcacataaaaaaatcaatcatagctatgattcttttgtgtatttttcatttaatccttgcagcaatgttttaagacactccttgttttacaaatgagaaactgaggctcacacaggttagttataccttgtctggtgtcacatgattgctgagtgatacagcagcggggtggacttgagccctgattccgctgagcccagtgtggttctgctgcactccactgcctgccttggaggaaggaagggcaaaggttgtcaaaaccccgcctcgcgctgctggcctgccagccttttcatcacctctgctatcacaaagtactggtgtgaataagtgtcacttgaataatactgtaatcttatcagcatgctgaaagatataaacggaaacagcccttttctctcctgccttctcagctgacaagccgaccaaagccaaggttaattcgttgttgagaatttctctgccctctaccacaaatcttttatctggcatgtttgttcatctttcctctaatagaggttcacacttgcagaggaagaaggtgggcccagaaatgaaactctgggagtgtgttcttgtccagcacggagttcccaagccagggaacacccccaccacgcctgaccagcccttcctctgttgtgggctggtgctagacgtggtagaaactttctgttctcctgaagcagtttgagttgcctctgctggacatttgtagtatctctttcccaccttcttggttgactctgctgctgggaagggaa

SEQ ID NO: 43379 - DNA, 826 bp, Homo sapiens
agaaaaagaaatgggttagtgcctcccaagtcttagatccctagtgaaaggcctataaaaatgcaaagccccaacccagccagaactcctccccacacagaaataacaagctggagtcttgaggacctcccagacctgatttcctgctctgcggccctctggagggggcctaaaagggaggcatataccccagcagctaagggaaggcaaacattgagtccaagcaaaggatctcagtcctttgcactatgtatggtgcagagaaggccttccagtcactgtgctgcaccacttgagtgtgccactctgtaaactcagcaaaggcatgagtcactttgagttccaaaggtccccccatcccccaattctttccttctcagtttggtttgctatttcagtgggaggttcagaggataagctggaaagacagcaagcagcacaggagagtgacaggatggcctgtgactaatagagaccaggttattgtcccctgaccttttatttttcacaagagactaacattgcttttttttttatcataaaaatgatgtattacttattggaaaaaaattccaatactgaaagtattaaaaagaaagccgaactctaccactctgagataaccactgttccaatttggtgaatatttttccagatatctgtgtaggtatgtgtattagtttgctagggctactatgacaaagtaccaaaaacggggtggcttagacagcagaaacttgctctctcacagttctagagggtagaggtctgaggtcaaggtgtcagcgggtctggtttcttctgatgcctctctccttggcttgta

SEQ ID NO: 43380 - DNA, 1520 bp, Homo sapiens
ttcaccacaataacaaacgaggctttgaagctcctgacgttatcgtctctgaaactgtgaggatttttttttaactgggtagtttgctttgcctggaactcttccctcctctgaggcgttggtgagtcagctggggctcgtagatataagcaatggacaccaagctctgggtgttacaagtagaaaaaatggactgaaagagtactgggtagctcacagggccactgggaagactgaaaaactgcgggactaaagggagccctgaggtcagccccaaccaaaaccataccctagaacctgtgcacaccagactctggacgtcatcactgcctgctgccatcgttgtcactgcctgaaaaacagcctcctcctctcatccctgactctgcttcactagggtcggtgcctgtgccctggcttcccaggagggggaaaggcaatgggccattttgactgcacccttaagacttatcaggtgtcactctgggtggctgcagaggtgacggccgcccatggtgctcatcctgagggtccgcagctctcattgctgttcagcaagacaacactggacctgttggctgttacagactctggggctttgggaagggaacgtgaatggagcaggggagggaggcagggtggcacaatgtttaattatgccattccaaagttctggccaccagtctgtcctgtctgtctgtcctgctagcaagttctgcatgtggcatgtcagcggccatcttcatgttcctgctgggcctcttctttgatgtcataactatgaatatgttgcccacattttgtcccctttttatagaaaggctccaagcactttgcaaacattagtaagtgattagtcatcagtacacagttgttaataaatcagggactttctcagctggattcctcctgtttttctccctctgcccatcaagatgggaggtggggtggtaggggggagaaagactggactcctttttcttaagcactgccttaccatttctctaccaaccctggcacttgcagtggaaacttgccgcttccgtttttagccacagaggtaatctactttcattttggcgactaggctggtatttttttccacgaagctgggtgatgagccttgccctggtttctgaggtttcatgttcaccagcagtaagccaggcctcctttttcccctggtttcttttcttttctttttttttttaaagaagaggaaaccaaggcaagtatttagtgaaggtggccaagacgctggagctgctgttctcagagcgcagtctgcaggccagcacattagcaacatctgaagtgcacattaaaataactccatcgccacctcccaaatcagcccacctcccccacttccctccaccccacctccatccaccccacctccatccaccaaatcagtgtctttggcattaaaaccaaagaaattgcagttttattaagttcgcagatgacactctaatttaaaaaccactagttcagagtagacgtaggcatcagagcag

SEQ ID NO: 43381 - DNA, 1421 bp, Homo sapiens
aataaataaaataaataaataaataaataaataaataaaaattttttaaaaaaattacaaatgaaagtgatttgcacaaaatacaaaaggaaattgaaaccaggctggcctataagagaaaggtagtttattgacttaatggtaactaaaactctaaaggtaataatttcaggtgacatttgatccagcagctcaaaaaatgtcaccaacagcctgccttctgtcctcaatctgctttatatggtgttggctttatccacagattccacaaggtggccccagaggctgctccaggatctcgattactggaaaaaggctgtagctgctccaaaattcaccattcgggtaaaaagggtggtctctttttcagagctactataaaataggtttattcttcccaaaagccccggcaaatgtcctcctggcttgttgcctctgatttggtagtgccagtctccaaaccagtccatttggcttggggccatggtgggtgtgcccattggtttaagccagccagaaaccactccaggcacttggggagggttcagtcccactcaagccaaattcactcttgaaatctgtgttcttgtatccaggagagaatatagatgcagggtatcaaatagccaatgtgtactacattacattttaagagaagccaccaaatttatacaatttgtgcttacagatttctatacaaagacaagagaaatgcctgattcttgtgtgtgtgttttgttgttgttattttttgttttgtttttttcctgttgatcgatcacaataaccaggaaggattttggcatttggcatttttgcaccttggttctgacctggaaaggaggagggtgtggcatttatagataagtaactgaagaccaaggtcaaatgaatggatgatgtaattcattccctaaacagagaaacgtctggtgccttcctggcctcagtcctctccgaaggggctgttggctccagcccaaaggcctctgcattctttggcttccattgatttctcacctgattccaatcacattgccctctgactaatactatgttttaatgcttagacgaattatgtatgcattaaaaggaaaaccttggatttaagccttgaggtgaaataggatgcttagtctgtggtaacaaaagaagactggaaatggaaggagatcagcgaggtcagacacagcagcccacagacgcagcccttggctgctgaatgtcctccatctcagcccatatggtgacactcttgagtgcacactgggcatgcagcccagataaatgcagccaggataagtggtttctataacataatggggttaaatgaaagatttctaactctcccactttcatttgtggctcagaaaagattttagtaatgaaatcgaaggtaatcagagatcagctggaggaaa

SEQ ID NO: 43382 - DNA, 1627 bp, Homo sapiens
taacattcacttgaaggaaacgcagagattttttttcttcgctcacattcaggagctgtgcttgcttataatgaactgtcatgatggaggccggcccgtttcagctctctcagccccgtcaagctgaactcacttcccctgaaaggacagtgtttgcatttgtgtttacgggactggggaagaggatgcgttttcaggagacctgaaaaccgagccaacccccttttcctgccccgctgtgctgcgattggcccatcttggaggctggctgcaggagcctttagtcatcgcacagggaaatctttctggaaccgggcaccaacttgcgtgtttgttttcatgctctttgtgcggggattagctgtcgtgccgggcctgaaaatgctgcgagcgccgggcgacatctaatccaggatttgcctctgcctcgcggttgatggaaaacagatgtcttactgctctgggcctgagcacagaatggaaatgaccgaccagagagccatttggagccgaggacacccggtgaaagccattcagagtccagccaggaggccgactttcctcctctggtctgtttttactacttgagccgctcgctcagaaaacggccttagataaagcagtttcaccttcagatcgcctgaggctgcagaagggcggctgcgggggaggaaggaggaggcggagaggagcgggtgcgaagtcctgggtcgcctgcccgctgcctgatgtcgtgagctagggcacctcggccctggctgggcgcgcagcgaggcccaggcccgaggggtgaggcccaggccactccggagcgcgcgctgttcccgcgaagcgagtcgccgtctcgtagtaagtcgtggctcgggctgtgccctgggaaccctcccgcccgggcaaggtccggtggccggagcgtgcgggaagcctgcccagagtccatttccggacgggcgctgcggggctggcagccggcctggagcgggtgcagtgggtcggcgcggcgcagagctgtcagcaacagggccgctgagcagcagaacctggacgccgcgcggctcccaggccctgcccgcggagctctcccgggagtcgcggacctctgccgtcctcagtcacccgcgtcatgcaggatagctttcaaagtcattttgcagagaaaaaaagatactgagcaatctgaaagcaggactgtagtaattttgaaaagatcggcttcctctttttctttaaaaacatgtttggtcattttcctaaaactactttccttcctttagcctcctcttttattctttgccccagctcgtactacagttcgggcttattagagcagggagatggtgacttttgagggtttgcagggctctttctggttggtgtatgtattctgaaaatacttgcccggtgttgaaagctgcatgccgctgacaaagtagataaaaagctgggagtgtggaggacggttcgtctcactaaatgcctgtcagatccaaagcattctgtgaaccccaaattcgttccgacctgtaatccaaccccatggagcaactgatgccttccaccaggcccctttgctttcccgggaaatcaccagctttaatttatggaacagagacagctttagattcaa

SEQ ID NO: 43383 - DNA, 674 bp, Homo sapiens
tgttaaagaggaaagggttgaaggagtgaggcgtggaggtggtagggaggcaggtgggccactgagaatgcttcaattttggtgggaaggaacatttcctctcttcctatgaagtagaaggaaggatggatgcatacattcagggtctatgatatctttttatggttaattccaaaactcctgccagcaaaaccatttcctgctgagagagatgttaaatgttgcattgcataatttctgccacggaggtatgatttcctgttgcaatcactgtttgcaggaattacatgcaaggggagtacaggcaccgggctgctttgctttgggatatgtgcccaaatcctgctctaatgtaataccatagcaattttagaactaacaactttaaaattcttcaaagttaagtgcatctgcatcttttcctgcaccatacagtgagaaagcttggcagcaataatggcttcaatccccataaatactcctgacaggtgtaaatgagtcactgcggaagagctagcttccacagacatgtccttggggcattatttggcagaagagattgaattctcatcattttatgctcaagactcacaaccactcagaagtgcagttttctccttgacatctatgatgttgcttgcatctccctttatccttgcagtcacactgtgatt

SEQ ID NO: 43384 - DNA, 688 bp, Homo sapiens
gagctgtggaccccggacacgggaaaaggccacagtcgggagaactcctgttgctggagggccaggcgggggcgatccccagggctcccagcttttaatgctgtcaccgcgggccttactccctcctcttccccacatcgccaccacttgaatcagttcttttacaaagtggttctatttcctggtgagacaaaaaggttagaaaaggaaacctagagggggtgggggaaagacagaggttcggaataccggcgcgcaatcgccatctgggtggaggggacccgccttcttttcttccgcctgagcgcagctcggctcccgcctcggggcggggcctgttgctatggagcccgggccccggcagagcctgcggggtgaaagcccctagggctccgcctggcatgcgtggccggggctgtctgagatttccccaggtcggtggttatgaccgcaggatggaatcgtagaggtcgggtgatttggtcagtagagaggaacatttgcgaggttctctctgaattacatgttggtctaaaagtaatccactatctgggaccgagaggaaagcatgtgtggaagaggcaggcattattagcagcgcgtccgcctcggccacctccctgctcccgcctcggccacctccctgctcccgccccggccctgggggcctctgttcagcctccaccag

SEQ ID NO: 43385 - DNA, 474 bp, Homo sapiens
atccttatatcaaagtgacatattttgatgtgacacagtccaacctcttcaactacgatagttggaaaaacatattcaatttcaataagaatatgaaaggtaaatatatgtttaaatatagtcatggctaaaggcataagcagacatagctatataaagtatttatccccttagttaccactgctttgaagcccagcgagcatacctctttgtacaacatgccctcttttaatttgttttgtttgcctggcgaacatgtgaggattttattgatttacaaaataaacaacagggagctgactgtacttgtacagcaataagggttggcttattggtcattttgaggtcactggcattgacttctacctttatttatttattttttattttattttttatttttttgagatggagtctcactgcactcacccaggctggagtgcagtggcgcgatctcagctcactgcaacctct

SEQ ID NO: 43386 - DNA, 974 bp, Homo sapiens
tgggaagaaatataattttgggagcctgatgcttgtagccacacctgtgatatgaatataatattccagaaagagaagaggtctcatgatgaatggaaccttgattaactcaaaactgtattgactcagaaaagacagagcagacaggagaaccatgtgagtgtggtgtcataaagtcaagggaagagaaatttttcaataaaaaggaaggtgagcagagcaataatcaagcttaatgatacttcccagaagtctagtaagataaaattgaaaaacatctgctggattcagacgtcgttaatgaccttagcaaaagctgtttcatgtctggtattggttcagggctagctacctctgtgacatagacaagatcagtgaatgtctctgatgtcaggtctattcatctgcaaaataaggggaatggggctaggttggtgtgttttgaattgtttggctaggtactggaaaaaattgtatagtctaattattgagagcttagattatggtgccaaactgcctgtgtttgaatttgtactttgtactctgctcctgaccagctaagtatcttggacaagtacgctggcctgtctctgtctgttgcatcacgtgtctcaaggaatcataacagtacctatctcataggctcattggaagtactttgaattcaatgagcagcatatgtgtgagtcattattagtgacacacttctttaactaaatgagttaagttgatacctgttgagtagagacaaggagaagagatggtgtggctctgactctgggtgtcccattcttgcttcaagcaaatatttccactttgatgtgttttttatatctcattatgattttgtacgtaagaagaattttattgctaacaaaaatatttgatgtgtttctttcaatttcaaagtccacacatttatgagcccactgctagatattgtgggccagtgcttctcaaactttaacatgtat

SEQ ID NO: 43387 - DNA, 1833 bp, Homo sapiens
agattagaagacgagaaaggaatccagtccgccccagacaggacaagtccggaaggatggaggcagcgtttccttcctcaacagcctaaacgcctctattttttacatccaaacttaggccatatttctgcggcgccaagaaaacgcagtaaaagcaaaggcaagatgtccttaaaaaaaaaaaaggtcacattcacagaataccgaggagacggaggcagctctgcaacccgtccactgagacgcggacacgctccccacagccccggccccaggcccgcgccccttcccccgccggcggctcggatgggtcgctaggggtcgctgcgcgccgcgcgggcgaggaccggcctctttcccccacctccaccgtctcgctgctccgcccccgcggcgtagtcggcgccaaaatcaaacgcgtcctggcctgtcccgcccctctccccaagcgcgggcccggccagcggaagcccctgcgcccgcgccatggtaaggactgaggctacggtcccgcgtcttcttcctccctagtgtgtgggcttcgccgcccctcggctgcatgtggatcccggcctggcgttgaccgccattccgggccgcgggagcggtcgcccggctctcggcctcaccgtgtaggggcccagcccggccccgccgcagccactccgcactctgcggcgttccccgccgctcctgtccggagtcccgaggcgcgggggcatccgcggcctccccgccggctgcaccccgcgtctgtccccagggcccgttcgggcgggttaggttagaacgcgggaagcgttcgcgaacgtgacccgagaacttcaccaacctggatttatctaaaagaccacggggcccttgagaacctgggctccctacgcctccagcttcggccccgcgtggtgtagccccccccattaagaacggggagagaaagcgcaagtgggcgggagggactgcggggagcgaacgtcttgatcccaaagcgcactcctggtttgtcaccattgagtggttttctgtattgtaatatgtagagcacattccagaactgctcagtttcgagttacctaatggatcttcactgtgtgccaattagtcgatttctgtgaaaacgccccggtttctgccaaagggcaggagtcgctgctcttgtgccgggtgctgctggttgtgtagggcgctgttgcttttttaaggacgctctgcactgaattaggcttcctcgtgggtcatgatcagttaagtcctggtaagatcggctttgtgagcttaacgtctttctgctcatcaaatcattttcataaaccttcaaagtttcatgccgttttttctgcttcagttggcgaagaatcaacatctggttaaatggatctaagattttaatatcttcatttacttacgtggccgttaaatgttgccgagctaaggggggcagggtgggacaccaggatccagttgtatggtatttatttgaagatatttgtccagatgtagttataaatgataacggcttctttgtggttaaactaacaacccagccacctgggcgtgaagtgctctaaggagccaaacaggactacagttaaaacaaatctgttagcagtgcccttctgtgttacaatttttctctgcagagttgctggcctcgtataactgacttggagaactgtgcagctcaaacgcgcgttgtccttttacctaatctatctctctacacatgaatcacctgctaatactaaatgtgttaactctttagaagcttacctccgataatagagaatccttttaaaaaattaaagcttttgataagatgtggacttcctattt

SEQ ID NO: 43388 - DNA, 1516 bp, Homo sapiens
gatctgcatacctcggcctcccaaagtgctggaatttttttatgtttttatttttatttatttttatttttttgagccagcatctcactctttcacccaggctggaatgctgtggcactggcatggctcactgcagcctccaactcctgggctcaagggatccttccacctcagcctcccaagtacataggactacaggccagctgcaccatgcctggctaattaaaaaaaaaaaaattatagagacagaatctcactaggttgaccgggctggtcttgaactcctggcctcaagcaattctcctgactcagcctcctgggtagctgggattacaggtatgagccacaggattggaatttttgacaggaatttttgaaggccctaatgaggtttttggcttcagaggtaacttacgcaataaagctctatttcatttttacttttcgaaaagccaccgttgaggtgaaatggggacccgtagctccagagaaacagcgggaggcacaacctcctctgtgaaattcctctgtgagtagccagagagcgccagagaactctggtggtggagagcaaatgaaagcagccagaagggaaaccggaaattctcgcccaaggtctgtggtgtgaaaaagtgccaagaatgaccaatgagaactgcaaatatgaagagtaatactgaaagtagagcattgtgtttggtataaagacagcctgccaatgccttttttgaaatggaactcaagacatgaagacagccaagcatggcgtgcctgtagtcccagctacttgggaggttgaggtaggaggactgcttgagcccaggagtttgaggccaccttgggcaacacagtgagatcttgcctctaaaaaataaacaaatgaaaaataaagatgtgaaggcagagaaagtagcagtagcaggtagacaaacccaggagaggtgtcggggagaaatgaaagggaaatgacagggaaggaagaggagaaagcattactcccacgtggggatttcttatgggaggggaagtgaaaaccacagaaattgaaagaggaacttggggaccagaaggctttatttcccagtgtgctccccaacaccccttccccaaaagaaaccatcatgtttggggaaaggtacaaaggaaatgtcctatttgtgcttagactctgattttgagactgggtaagttgccctttccttgataggggattgcctaggttgaaacggtaggagggagtgttcccagagtggaatgcagcccgactgtgttcagaagaagcatgaaggtcccattctactttgatactaatacttgaaaaaggagaaaaaattacaaactgccgctttttatgtggtattcatgagggaaggaaagggggtgggaaagcaggaggaaagcaccatgtaaatcaagtcttccaagaacttattttatcaagcatttaatcagctcttgctcaaggctaatcataaaaataaactgcgcatttttacctgctgcaggcagcttgcaa

SEQ ID NO: 43389 - DNA, 2433 bp, Homo sapiens
attttggacttgttagttataggcatcaaaacctggaactaggaaatgtatttccacgtattacttccattatcctactaatgttagaaacaggcaactaaccacatcctcgaccccaaccatatttcaggagaggctggctgaattttgcaatatgattccaaaagggagtatttgcagggtctttgaagctataaatcccctaggaagagtcttccccacctgtcaggacctggacagtgtccacagagggtgccgggcgcactaccgccacgcggcgctgaggtctgcctctcgggttttgggagagctctttttattctaaattacagactttgcagccaccggatatcctcgctgcataactggcagtggccatgtggctgcactcgcgtttcctgacaaccactgcattatttccactaatatcctgtgtccaaggcctctcgcttggcgactcctcgttcccacctccaccgccacctcttccctcgagggtaatctctcgaccgtggcccaagcgcctcgacaaagcggcaaccacccaaaagttcatgaaaatgcacttggcaaaagtgggccgctagtccccgcggacagctctaagcgaccccgtcccagccgaggaaagcgcccgggccccgcagagtgcgcgctgcggggcgggcccgcggccatgtgctccgcgccggggcggggcacccgcgggttcgcattgtccactttcccccgcaccccgccgcgttccgtccctccctatctgcggcgcacacgcgctcagagcaagcggcgcgcccgggtctggagctgcagcagctgcggcagcggcgggggtggtgcggcgcggggcggggcggggcggggcggggcggggcggggcggcacgggggcgggcccggggcgaggcagctggggcgccagcgagctagcggcgagcgcggcgagcaacggagaggagcgcgagcagcagcatggcggggctccgacgcccgcagcccggctgctactgccgcaccgcggcggccgtgaacctcctgctgggcgtcttccaggtcctgctgccctgctgtcgcccgggaggggctcagggacaaggtcagccttgcgccgctgggctcgctctgcctctccaccccgcccccgctctttcttttagggaactgctgaaatctataagagggcgaggggaggaaagggaaaggggcaggaggaggaaggaaagctgttgcgattctccgctgataacattttctgaccacagcgtcccgtcccgcgcctctctgccccgtacagctggagagcggggcagtcgcggggcttggggaccgctagccgctcgcgccctggagcctttgtgcgcgggcccctgcgccccgggcgcagcccccgctttgtgtggcgcgcgcgggtgccccgcagcggcccggcttcctgcagctttgttcccccgagcctggccgcccagggtccacactccagatgctcgggctgcggagcccggagtgcctcgtggggtgtcttcactcccacttcgtccccccacccccagcacgagcaccccgagcctgcctgcacgctgtcgccttcgcgtccgaggggccgccggctcacaccccacccattgtatttttatccttggctcgcccctgggatggcctctgttcccaggaggaaaaagagacgtgttttggtgaggcggggggcacggagggacggtaggggaaacaggaagcgtttctttagcgtgcattaaaaacgtggtgtattttttggtgttcctgcagcgattgagccgttgccgaacgtggtggagctgtggcaggcagaagaaggggaactcctgctgcccactcaggtgaggacgaccaggtgacagggcggctgtgggtgtacgagggaggagaggcggggaggcccccggtcctccccaccccctgtccaagcggcacaggcgttcgggccactttgcaaggcaaataaacgttaggggccgagcctgaacacctggcaacggtggccttcccggctcctcccacgccatgtgacagggcctgaggcaggccggccccaagttcagaaggtgggaacccaggccacctcagcagggaagcggccagcggtctgttcggccgtgggtgtcctgggtgcacactgttccctaagtgagctggtgctgtgtggatggcaagtggctaagaggttgaggacaacaggagtattgatttcataaatgttagagtggtatttgccattagcgttaagtagctttgggatggagatgtgactctcaaggattgtcatcttggattttctccaagtgcccttaattcctgttaaaatacacccacttaagaacttgaatttctggtttttttctctgtatgatgatatgatgattgcgtgtagaaaaataattactgacgttttattggg

SEQ ID NO: 43390 - DNA, 1123 bp, Homo sapiens
tttttgtgtttttagtagagactgggtttcactatgttggtcaggctgatcttgaactcctgaccttgtgatctgcctgcctcagcctcccaaagtgctgagattacaggtgtgagtcaccgtgcccggcccatgtcttcgtttttctcctttgtcttgtgcatgtcttgttgccttaactgggttctcctttgaggggctgggctgctaagggttggtgccctgctgtggccacagtgtcctgcatacagtagacattcagtactgcccatgaagtcgtcctagtgcgggagaggcagttgtcagtgtcttgccgagttcccctatttatgaggttggctaagtctgcaggtaacaggtggaatgccttaaatggttatttcctagtattgtttgacaatcacatttttaaaaatcagttctagctgcaagaagggcagtctagaatctgttctttcaatccatccagacttctttgagaagagaaggctcactcctgatgccccttggttagcaggtttgggaaccagggacaggtgctgagtaggagcagccgttacctgatacagaatcatgttggtgctaggcagggctgggcaggctcagtgctccactgccgttacttgttcatttagcaaagatggacctttggggcgggcccagttaggtctccagagatacagtgatgaataagaaagaatctgcctttaaaaatatcaagtttattttcccgcatcttaagtcagagggtgtagataacggaaattggtagaaagtgaaacaggaaatgatacacagagtttttgttatcacaggtactgtgttatgtaatagcatcttgctccagtgaatcattgaccagtatttggtaatctttttgtcatagagatttatttttggtttaatcaacttccatcaacattaaaaaaaaataactaacatgggttgggcacttctggcatcatttaaatgctttatgagtattaactcattaacacactaaacactatgaagtttacagatgatgaaattgaggcacagaacagcgaaattacttggctcaaggtaataagaaagtgacagtcctaggagagtaagtgtttaactatagagcccaagtttt

SEQ ID NO: 43391 - DNA, 1326 bp, Homo sapiens
gctatgaagtgacagaacatgtgcgtgatcctaggtgtcctctctctgtaagtgcatacttgtctgctttggagtggaaagccactttcccaattagatgtacagctgtctgtcgaaggagactaagtccgagattaacggatggaagcaactgaatactttcttaggccctagtattatatggttcctagcaaatccctgaaaaaaaaagagcatgactcgtgtaagatagacccagggttggtccttcagtaatattttactgtatgctagataacttctttagttttatgctaattctaagtgtggattatccacagatattcagctacatagcttttgaaatgtggaaaatttaaatctgaaatattgggattagtttgtggaacacatgccattgtaatgtgtgctgagaggttgcctttagaggagctgtcctgtcagcttgctttgctttgggattattttcagcagcaagtaacaaaaccctgactcaaccagctcaaacaataaagaatgcatgatgtcacttaacaagaagcctggaggcagggtggttctgggttggtttactcagcaggttagtgtcagcacctgggagcctggttcttcggacctgtctgttctgttggactctgtgtgccgtgcagctcccctcacgtttgcaggaggtctgtgtgcttcacagcctcccagcctcccacctgaacatccaaaggcaggttaaaagaacccctggctactttctcagaagtactccccagcagacttccccttcacatcttacaggtgggtctgcactcaccttgaaccactcacccacccacgcctgtggagtggtggaaccacgtgatcagctctgtcctgcagggtttagtcatagggagcacaacccggctttgcctaagtgggaggaagggaatgggcagtgggaaggccgacagcagtgtgtgctatgctgagtgctatgctgggccacctgagctcagcgagaaatgagcggtctagggcagtgtttctcgaagcctggtccagggacctaaatcagcatcgcttgggaactcgctagactggccggttctcagaccccaccccagacctggtgtgaatcagaagctctaggggaggagcccagagatctgttttaacaagccctccaggtggctctgatgcacgctcaagtttgaaaaccattggcccagggtgaggcagctcagggaccatgttacaaaatatactttttgtggaggattaaataatgagaggtagaaatagtcttgtaggtaaaacagtgggtggaaattgggagatggttgcttttcagcc

SEQ ID NO: 43392 - DNA, 603 bp, Homo sapiens
cagcttcctgaggtgttgggattactggcatgagccagcacacctggccaagattttcgaagggaatgtttttgaggactttggggaaagtttgtctcccctctgaaggatgcccgtgagtgtgtgctgctgagaggatggcagaatggcaaggtgggagcattctgcaagcatcatgacatcattgagctactgaatcaaccttccctagaactggcttccaggactttgggtcatatgagtcatgtgagaaaaatattctcctctacctttttctgagttaggcctcatgctgcttgaagctgaaaacatcctgttacacctcggttttaagcaccctcccctggcctctgagataagcctctcaggaacctgtggctctctaacccagtttgaaacgttttgctctccatagaattgtgtaccaggagagttatattgattaaattaggtcttacattttatgttatatattcagagacatatatttgtagtctgcatttcaggtaaagcgttttccatgttggaggtcaaatcccacgaggttcacgtatctattgctgctgctttaccctgttctggaaaagaaagttatttgcctgc

SEQ ID NO: 43393 - DNA, 1704 bp, Homo sapiens
atccgccgacctcagcctcccaaagtactgggattacaggcatgagccaccgtgcccagccctttattttttaaggtgttattttacatgtgcaggctatctgcatgatcagtagccattaatgaagttttaaatcaccagtctgtcatgcccaggtactatacccttcatcttttattaattttcttttttcatctgctggttttagttatcaaggcgtctagagaggttggggaggcataaggcagtcagtagagctctggaggtagggggtcagggtattctgtggtctaatctggttctgttctagcaggctgtttgaatttactgtcatgctggcctaatggaaaaataaagtttggcgtttgccttttttgttgccttcgccagagcacatttattaatatatacttaccagagaaaactgtgaggcttgactatgtaagaagcttatttgtgttggctcaggttctctactcagtaggataggagctctattctgatttattttggacagttttgaagagatagaaccaaaagacatttatcaaatgagtaaactgaagactgaactggggcagaaggggttcagttttcttttcaaatttttgagcactttaggtatcaggcagcataggtgttcttgttttcttacttactctttgagttccagttctgaggttgcacagagctgcagaagctgtcatagcatgaaaatatttaataataaatgtaatactaataaaattgctctccattcgaacatgtcttcctgcttaaaactggcttttgttgctcccatttcccatctggtctgtagccagtgtctttgtgttggcaattgacaaggataatgtgtttgatgcttcaaaagaggatggtttaaatgtcaaaacattaaaagatggccttgtgtaaattaatgtggttctcagatgttttagcaaaaatcacctctttatgaccctctctatgtcattatcatgctacaattttgtcaagaattacactaaaaattcttgactcttgactcattctttgtcatgctgagacttaggtcatggttgggattataacaaaattgattaaatatgaaacacttattttcataacattttttaggaaaatctcagataagtctcattttttttctctgtctcataattgtggattttaagtggattcctttgagtagctttcttttgaggtaccagtttccctcagatactgcatagcacagctttggaatcataaaccttggtttgaattctggctcaccctcttgccctgggtgaccgtagccaattaatctttgcagctttgattttctcctctgtaaaacaagactaatggtaccttttctagaggattgttgagaaggcttagtggtgcagttcacataaagatcattgtgtgaggtctacacaatgcacatgctctgtagcaggaccagaggctatcgtgaattattgcccatgtttctcttggatctcaattgcttttcacttggcatttgtctcggctgagtagagaattgctttttaaatgatgagaaatgagtcaacaatgcatggtgatgtaaataggagggcatgttttggttttcaaagtggaaatagccacttctattataaaagttacaatagctgattattgagggcttactttgtcctagattctctttaaagccctctacaaatggca

SEQ ID NO: 43394 - DNA, 1718 bp, Homo sapiens
ccaaatagcctctctcctaactctttggttcaccttgtttaaagcctttagactgagtaagaatcttttggaccctgtttttttggcttgaaaatttgcccaatttgagtggtgggtgatatatttactagttttctttattccttgaacttacgatgagtgtgtgttttataatggggtgaaaaaaaaaacagtaacctttttgttgaacagacagaaaatttccaacttgcttttagtgagagctgagacctgacaatgggagtgaacatgccgggcttgattccagccaggttcctgtttagaattgaggccgaggtcagtcagcaggtgcttgcgttctcacacagtccttggaaccaagcatgctgtgcactgtgattgtaggactgaacacttgcacattaaaaactcctcctcatttcccgagcacttcttgtgggatgctgctgcgcatttcgaaagacagtgtttttgctataatagaaagctgtgtccaccaggggtagaagggaacacacgagagcaggtccagagagaaaaaagaatcagaagaggctgaacctagtattgaggcctatgaaaataagatgcagacatcatacttgagaaactgttaatggaatagaaaagcttgaaaacatagtgaatacattcaattttttggtctcagcacaaaatcactggagagaaaaatgtacgtaacaagtgtgatgtgtttggtgctacagggaagggatatagaatagtgatactcttaagcatcatagaagcgatgggaacatcaggccaattactgagaaatttcctattgactgaaatcatgtgtgacagtttcagaaataatgataggctctcgtatatgttggtacgagtttactgtaaaaatcaatagcccgacttggtgctcaggctctgttttctccttcggtgatatcgaaactgactttcagccctttcattgcacttgtgactccgggggacacgtgctgatttcctggttctatcctaacggtgcctgcccttttctgtttactccatgtcagtgcaggcattgataagaattctagtcggtggggtggtgaagacatcaagagaccttaacctggggtttccttgctgtatcttaaacttttgaccaccattcttacatttgctgtgatcagtttgtagtctttatgtgtaatactttttctccccaccttcctggggggaaaattccacatgtaaaggatttgtcaaattggtgataagaccaaacagccttaggggacatgagaagtcttatgagcattgtagacctgctggtgagctagggggtgtaggctgtgtggggtactttctgttctttacttagagatttggtagggaaagttctctggaatttcagcagttgttctgatgtcatgtgtaaatattatctttctgtgttgcagcttggggccaagcttttcatggaaactgctgaaaattatttagtggcatagtagttgtttttgaagttgaagactttatacccaaatccagatggacgaatctttcactttcttgctacagattttgtgaagaagtgttactcaaactttaggtgacattaacaccataagtgtgttaggggaagagctgggataaagggatggagatgctttgagctgctacagtagtttgcacattcttacctgtctgactctatttgccatcacatatagaatgtggag

SEQ ID NO: 43395 - DNA, 1376 bp, Homo sapiens
tttaaggccataggattacctgtatttttaacttttgtgcccttagaattttatgttagaataaaatctgaaatatagtttcttgtgactataattcccaaatgttatgtcaggcattggcaagccatgttatttaaaactgccagaagtatgttgccttttaagtggaagtatttgtgaaacgtatgaatttcctagtatccctctaggctgctgtgtgttgaatggaattccttctataagacgtgagattaggcagtttgccttaagctagcagaggggactagctattcattttaggaatgaatggaggccagagagaagcataataagccaaaacttaaaattcagaagggaaatagcactacattgtttaggaggaaactaaatctgtggcataagtctgaaggtaagacttggtaaaaagaaggggaagtctttgaggaagaagaattgaggctttagaaaatgcaaaggctgacatttgcagagctggtcggctagttgttttgaagagggtgctaatgggaagcactcaggaggttgtgtgcttctaattggcctcaagttttatagttgaattttcatggatcgttatcatattattattgatgggattatggagaaaagtctgcggttagtgttaaaagaaaattaaaatatttccaaatcaaggccacacccagaaaagatctcacctttactcctgcagtcaggctgatagattacatagcaagttgtattttgttttgtaccccatactcagggtgatacccaaggttttacctaatcagaggaggcctcagccttccataaagggagcatgttctgtttgattatcagccctgcccttacttcatgacatagttttctcattagaaaattcatgtttattgtaggaagattaagtaactcagaaaagaacaaagagaataaaagtcgtcatcacccaatctcctggctgagaactgatttaccagcacgtctcactttaggttttctgtctttcccatgtttcacttctgttttttttttttttttttttcctgtcttagctgcaaagtctagtggggaatttggcccctggctgctctggattgccattctcagagctttgcattctcaggagttcccttccagggcatgtagcccaaggactctgatggacctgccctaggtctctcagcagaaggaggggcagcagctaagttgtgtgtgtcggttgaggccataagcgagggctactccctgctggcagtccaggtcttctcccacaacactttgtaaattttaaaaaggccaaaaagaaaaatagttgctaatatcaaggacacagatatatgttttaatgactgacattgtttgcaggtaaatat

SEQ ID NO: 43396 - DNA, 854 bp, Homo sapiens
tatagtggactctttatttagaaatagatactgctactttggaagggagtggattgaaagagttgaaaaactaaagagaagagaaaactgaatccttggggggaaaatcttaatgcaagcacaaatataacaccaaattaaatctaggaggaaaagtagtttgagcacaagggaaaataaattttaaaatttaagggtatgtgtacgttttatgtcacgctgtggtatactctctggtctgaatccttgtgataggaatgatttcatttgcttcaaacacctccctttttctcccctacccccttcacataacctgtgggagattttctgtatttggcttatgcccatgttttgaagtcacacagtgtattaagtaagatctgattgcaaaaatggtctctgttaaaacaggctgttacacaagatgttaccatatgttcatttcacgagacctcacacatgctttaaggaccatcattatttcaaatctaagtagtttatagttcatatttgtgtcaaatattccatttgcagcctctaaaattcttgccatctctgttgtcctttttttttttttttaggtctgtgctgcttcctggagaatacaaactccttgtagtcagggtctgtgttttatacttttatccattcactacacctaatgctgtgttggatataaggtccgggaaatactgtgtaaaaattgctggttgaattttggcagatcttggtaacgtgattatcaggatattccaggggaagtggcattagtatacttaaactgatagtttaagtgtcattaatttggtggatggtggcattttggggaaaagagccggtttattggatgataa

SEQ ID NO: 43397 - DNA, 622 bp, Homo sapiens
tacatggaatcctgacagaatgattgaattaggagtctggcgtgtgtgcttacttgctattagtgctttttttttaaaaaaaaaaaaagctttattgagatacaattcacatggcatacaatttgcccacttaaagagtgcaactcaatattttttagtgtatttgtggggttttgcaaccagcagcacactctaattttagaacacttttatccctcctaaaataacctgttggttcttttataaagaaaatgtagtttgtacttttcgacggacactttttcttttttttttaagtgggaatttcagatcatcttcagccttttgcaaaattatactgtttctcggaaagcatttgtttttataaatagtcataaaatgtttcttaacgttccaaaggttacctgctgacttttggacacaatctcatgaattatgttttagttgctgggttcatgtacctactagttggaatcttttcagcttcaagtgacagatttcactcagctagctgacgcattaaaggaactcattggccctggtaacctggaagaagcaggggtattagcttcaggcacaggtggatttagggattctctctctttctcaattcttttttttt

SEQ ID NO: 43398 - DNA, 1406 bp, Homo sapiens
agatcatcttattgcactccagcctgggagacgagcaaaactccgtctcaaaaaaaaaaaaaaaaaaaaaaaaaaaggcccaagggagcttgtatgccccttctgccatttgaggacatagatggcacatagcaggtgccatctaggaggaaccagccctcactagaatctcttggtaccttgatcctggacttcccagaactgtgagcaataaatttctgttgtttataaactacctagtttgaggcattttttaatggttgaccatgtggaccaagataataggaaaacatggagttaagattgcttttttaaaccttgtcatttggtccttcttttttattgttttgaccttcatgcagagagaattcctagtgatgaaagtcactgtcgtggtgggtctgaatgacaggctgaggctctcctccttttgttgcattcttcttgttgtttgtcacttggttttcttccagtcattctctttctgctccagttcacatgtcactctgctgctggtgatgtcatgttacacaaaactgtttgttaattccctggccactggattagctgagccctctcttgtttacaggataaagtccaagctcctttgcttggcatacaaggtccttgataacctgggaccagcttctccctccaggctcagagcttctacccctcttttctgaactctggcctcacagacctttcatcattcccggaacatgccatcccttttccacaagctctcttagcctcataagcttttatcccattctaattattcttctaattccatccttcaagacccagttcagatatcgcctctctggcacctctccaggttcccaggcagcctgtgctcgaggtctgcatgccgcttggtccacaccctgccttaatgcttagagtcttggatgtctctctcctgctcttccatgaagctctgcaggagggacagggcctgctttttcattattataatctctatcaatttcgtgtttagtgcattgaggactcccagagtttttaatagataaatgagtcaatgggcatctgagttgagatccccaaatagcatatctactagtcataacatctaagatttgtataacttcaccttttcaccacatcaaccagtttgaccttcagcagatttactaccggggcaggtggtattattcttattttagaaattatagaatggacttagagtttaagttacttggtgaaggttgagagtagagccagtgaatgattattaactttttgtaatttttgtaataagggcacattttggtccttggcagtgccagctcagtatgctttaaatttttcccaaatttagtaaatgctatattgattttcatatctattgctttagtaatccatgatccagaaaagataaa

SEQ ID NO: 43399 - DNA, 1685 bp, Homo sapiens
tatgttgtgttaggctcatgagaaggcaagaaattttattatttaaatgttttctccagtaatgtattggattcaagccattgagatttggggagtgtttcagtgacttatttgggcaaaacagaatatttgaaattggcattgtctcagaatctggcatttaggatcattagccatatactttgtctgaaagattgaaaagaacttaaattattattattggaatcattgtaaataatgttgttgttaaaaatgtgattataagacaatgtgggaaactttttttttttttttgagacaagagtctcactctgtcgcccaggctggagtgcagtggcgcaatctcggctcactgcaagctccgcctcccaggttcacgccattctcctgcctcagcctcccgagtagctgggaccacaggcgcccgcaagcacgcccagataattttttgtatttttagtagagacggggtttcaccatgttagccaggatggtcttgatctcctgacctcgtgatccgcccgcctcagcctctcaaagtgccgggattacaggcatgagccactgtgtccggctgaaacttggttttaaagttagaggaaaaccctgacacagagttctgccaaataaaggtagttttgtctttgtgtgtgagtgtgagtgtgtgtgtgtgtgtgtgtgtgtgtgtgtgtgtctcaacatagtatcaaattattgaattgtctaagagattttctcttaaggatattttgggattatcagaaggtataatgtgattataagaaaacatgggaaacccagagaaatgaaacattagaaataaaccttaagaccacagtcatacttggcaatgatcatcacaattaatagttggttgtctccttgcagtgttttttctaagtttatgtgtggatgagagattttctcccctgccatggcaacatgttgctggattgtgtacaggagagattatctctggatattctgtgtgatatctaatacatttcagaccaggaattcctaaccttttaaaactggcacagcccttgctttcagcgtgtggtgtcaaaccctcgtgcccgcctgccagggacaggtgctgggcaaaggttgcggtcccgggctgcctacagcgtggtgcctgctagatttggcctggggtgggtgcctcaagttgttacctgctacttgccttctaaggtgctgatccctgtcaattaacgtggcaatctagaagggaagctgtaaaatcagggtaaggaggagaacgtggaaagcctttcaatcacagtttgatgaggaaatggaaaggggcacatttctccctaacaagttacaaaatacctgatctaggatttgaagatggaaaaagagataacagagaaaggttaagggtctttagagctgtcccattttcctgatagtcttacataattagttaaatggaataaacagtattgtgatagctgagaattcctacaaatacctgtgtaaacataatgtatttagtaacattttgttgtagttttagcagtacaccaagatgtaactgttttttgttgtttgagagaacacctggagttttttgtcctacctccaagaggattaaggagcaccacatgaaggtgaggttagagtgaaagtttagtaagtgaagcaagaaagctagattttttttttccccc

SEQ ID NO: 43400 - DNA, 1705 bp, Homo sapiens
aaagtttaatctacattctttctgcttctccttttctaccaacactgtgttcaactgcataacaatagtaccaatgagcacgagaaagatagtttttagtttaaagactatttcagttttagtcagactacttcagacctcagactccagacttcagactccagactttagacaacagactccacatgccacacaacagactttcagactccagcttcagactccagactccagatcgcacacttcagacaacagactctagacaacacactccagtctccacattccacacgacagactacagactccacactccagacaacagactccacactccagacaagagactccacaatccagacaagagactccacactccagacaacaggagacttttagactccagatcagacttcgaacttcagattcactccagacttcagactccagaccagacttcagactccagacccagatttcagattttagacttcagactccagaccagatttcatatttcagactccagaccagacttctgacttcagacttcagactcctgaccctggatttcagactccaggcttcagagtttggactttggactacttcagctttagtcagacagacaacttcagtcacaccacttttcacctctgccatctaatctcgtcttttgaacaaccccctaaaaaggtaacattcccaagaaacccagacccagaaacactgaatgacatactcaagactacccaactagtaagggggaggccacagtttcccttaccctggcaacatgcacatggcaggcccttcacttagctggtagaaggaacacaggcttgggaaggagatgtctgatgttcactccctgacgacactcttacttgcttcaatgatctctctgagccttgggtggcccatctgctaaacaaggatgagttatttcctggggatgctaagagacttctgcctcatgcctgcagtgctgctcatgttgcccccttggaattacttgttcaacttctttcttccccactagactgtgagcttcttcaggtcaaagaccaggactttcttgccattaaccccagcaactagcatcatgcctgaccaaagggcatgctgatgacaataaacattgattgtccgaaatcacatgcctggtccccagtaggcgcttgctggttactgctttcttcccatcctccctctgccaccccttcctctctgagtctggaggggatggccatgtactagccaggggcagtgtccacaggaaattcaggtcctttgcagcagtcagtttcatttcctatgattaaaatttctgtgaaacatattatgcaagagcagaattttaatgtagttattccctggacggtctgggcaagacagacctaccctgtaccagttcctggcacagctggtgttggcccagttacgcaagtttctgaggtttaaaacagaacaacaaccttccagtgtttctttcaatgccaaagcaaactttctcagcagagcggtccctcattcttggaaaagagaggaatgtccttttcttttccctgtctcctcttctctgatagaaaagtgataatttattattgagattgcagattgggcctcgacccctcctttgacaaagaggcaaaacactcctagaaataaagttttcattaatgcattcctctctcccctttct

SEQ ID NO: 43401 - DNA, 449 bp, Homo sapiens
gcacattatatgcataacctcatttaaacaggaaagaaaatcaactgtcctttgagtggtatccggtacttgagccattactcaatcatcgtttgacttccttcttggacttaaaatagtatatggcattgtttcaggcaagatttgttattgcttaaaattctcatatgaggcaatcgtacctgaattgtgcaatgcatttgggcaatatttgtatgaagaaaccatgtgacaaaatgggaacatgcacacacacatacaaaacaaacaacaataaaataaataaaaataaagaattcagccttttcaggagaatcgcttaaacccaggatgcagaggttgcaatgagtcgagatcatgctactgcactccagtctgagtgacacagcgagactctgtcttaaaaacaacaacaaaaaaattcagccttttgtattatttgagtgttt

SEQ ID NO: 43402 - DNA, 896 bp, Homo sapiens
catgcttcatgacaggcagattgtggggaggggcatcgtggatgtggaaatctgattctcttagtctattccaggctttttcacttgtctgtggccccaggaactgactcatcctcatctttgagttctgggatattgctggtgataatatctgcactgtctatttgttttgagttttctgtggacagggaaatgaagccagtatgccaccattttggaactgaaattctccaaagtatacactttaagtcgctatgataagcgactctcataggccaaattcttttaaacatgacaagtcttaaaaaatcaagtatccaccaattctttaacacaaaatattaatataaatactaattatacatcttccagaggttgcacctagaaactttttggagtaagtaagactgtccatctaagtgcccaataggacaaaaaccttgcaggctttgaaagattcttacacacccataggaaacgattacatcattgtatgtaatttggggaattccttcttagatacttggccagcaatattggctgagaagctgacagtagtcttgtctgtgaccctgaccagtacacactgagctctagttatacttaataatagaaactgaatgaaaagaaaacagtggttacacagcttatattcctgactttgaatcatatcatgactcattgtttttccaactacatggaagttggcaacccctacacagactggcataccacaaagttggactcagcagttatttggctaagatatatatatagatatatagatatatatctatattatatatatagagagagagagattgagagagatggagtctcaactctgtcttgcccaggctggagtgcagtggcatgatctcagctcactgcagcct

SEQ ID NO: 43403 - DNA, 1009 bp, Homo sapiens
ccctgtggttgccaatcccacgcaggccgcctctagcgtctcgattcgcttttctctgacctggaacctccgccaagcccccagctctcttcttcgacccagccttgcacggggcagctgtcggggcaggacccgcctctggcctgtcgcagcctagctcacggtcaagggcgggagcctgctgggaagcacggccgcgggggctcgctcggggccacctgcctggaactcagcgcgaggtccagagttccctccggctgcgcagcggcgcacgtgccccgtggaaggggcggttcccgcaccccagaaggagggggcgcccggccgcgcggactttcccttttgcttacttcctagtcccgggcaggccggctcggaggcagcgagaaagcgcagccaggcggctgctcggcgttctctcaggtgactgctcggagttctcccaggtacgtcgtgcgctccccactcgtgtggtctctctgcaccccttcctggggtcgggtcgggcaggggcggaggggagccgcagcccggtcacgggctctggggaacccgggctcccgttcggctgcacctgggcccctagctcctgtccgggcggggatagcgggaagcgcaccaggcccccgggacgccggtgcttctttgcacggcccagcgcgggaatgtggacaccagcgaagccggctcaggtcggccctcgggagaagcaggggctacacggaaagggagcccgagggtcctgcagagcccgaggtcgggaccccgcgcgtgcagtgccaatgggctgcggctgggctgagcgcccttccaaccttgcaggccccgggggggttgccgcggagagcttccgctggggctccgggcctctggccgccacctccctcgggaggccgaggggggcggtggccccggcccggccctcccgcttccctcacggcctggccctcccgcttccctgattcccggtagggtcgctctccccgcctcctggcccctcttggctcgg

SEQ ID NO: 43404 - DNA, 688 bp, Homo sapiens
gttatcctaatccaaaaatgaacttatcaaggggctgctgggtagttcacagaagggtgggaaggccagcaaaactgactcagaaatggaaaaggaagctcagagggatgcaagtagagatgggctggtcagaagccacagccactgctggaggacactagactccaccccgtggccaggaccctggaggccactgctctaccaaatggaattctgcaactgcccttgtttgtttgcttgtttgttttatcacttcttcaaatgtaaagtcctgggctagataaccaattggcgctttttcaaatcctgtgtctgcatagtagttgccagatgttaggaagagcaaagactggcttttccacttctgattcagaggttgggcaatcaaaaaaagcatgaccgctgcacaccacatagttattgatctatctgccgggaacctaagtggtcacatttaatcttgagtaaattctgctggataaatagttccattctctaactgtgaactacagttagggaggtagaacttaaccaattttacacaattcctaatgtcagacctaccttttgcaatttgctcctcagctcaagaaacactggcttaggcaggaggagttgtgcttttattcatagattgcttgggtggaaccttacctgttctctccatggaactaagaaacagacagcc

SEQ ID NO: 43405 - DNA, 700 bp, Homo sapiens
taagcaaccaacttggtaccacagaagaggaactggggaaaatcaaactgaataaaaacacttataaataagctagtttccccctgtgtaacagcacggtttccccggtgctgcttgtttaaatctccgagctggcggcgccaggcaggaaagtgtctgctccagctcctcgctgcaccttcctcacataatcttggcgaacgttcacatttccagtcagcgtggctcattttatttcccagatgtttttacactccgaggccaaaactaacacgaaatcgctcctttcctgtcacccccggcctctgtctgtccccgtcactcccgtcctcccattaccctctcccagctgcagggatcacggacgccaagcggcactattttactaggagctgcaactacaaccacaggatcgcggcggggtcgccctctgtgagaagccacacaaacgcgaatcacatggctaaaaccacacaaaaaccacctgtcaccacctcaggccggtcccgagtgtgtgtgtgtgtgtgtgtgtgtgtgtgtgtgtgtgtgtgtgtgtgagagagagagagagagagagagagagagagagagagagagagagagaccagtcaggggaactgggagtcattcttcccgtttacagtgcagactcccaagtgcactgtgagcacatttttgacagtttaatgttcaggattag

SEQ ID NO: 43406 - DNA, 1650 bp, Homo sapiens
aacagcctatattttgttctagcaacatagggtcagtaaagggttttaaacaagaaaggtatgaacaacttacgttttaaacagaacaacttatagaacaaaatggaagcaaggaaaccaaccaacggggagctaatgcaccagtccaggtgaaagatgatgttggtctcaattaaggtggactgcagcggatatggagaagagtgaatggaatcaataaacatgtggggtaagatggacaagaccagctaacagcgttggctgttcatgccagggaaagatgtaaagaacggcaagtttttctgggggtagaggtgaaataagagacgacctgaacgcaagatagagaagactaccaatcttttagggcacagactcactgacactgccccgagggcggcaagtaccagtggtcgatcaccaacagaggccccgcctccgaggacactttccagctcccaagagtcaaacgaggactggacgaattatctcaggcttcgcgcccaggctgaacctccgactcgggttctcatccggcttctaccccttccccgaaaacccgaagaagagaccactcggccttggccaaatagctcccctcgtagcctcttttctctctggactccaagtactctcaatcccccacgcgcactgccaaaaaaaacagtccagagacaaacgactcttgagagccccagtgtcactttacctcgaccatgatgctaccgtgtatcccacctccggcagggaagaaactctaatcactaacgcagtacccgccgccacagctgtgcagcaccttccggaattgggcgcccaggcggcggatgtgatgcaagctctgcgcacgcgcgctagtctccctcggccatctaggatcaggaggcgggtctccctcctcgggaccgcctctagggcggagtctcgaggctgaaagccggagactcctggaagggcctgggtggagggtttcactcgtccctctgaagaaatcttagaattatgttttctgccttagttggggtcctggttgttcgtgctgtattccccggaagcttaacgctttttattcagagaacctaagcgtctggagagcaaactcccgtgggctctatctaaggcatttccactaccttgatctctttggaggtcgcctgcgtgctttgtgtctcctggttctaatcctggcgagaagcacttggacacttgtaggcttaacacctgaaaacaatttcgcttaaacagtccagtaaacacttgttaagtgaacgttgaggaatagctgttttaatttggaaaattttgacatgtagttataacaaaaccccatatttattttctgctaatagatttttttttttaatttctcaaaactgcatagctcttgtccatttcctagttgcctgctgattattgtggcttcaacaatgccagggtacagcttttcaaagctggtagaagacacaattggagactttagccatttttatttatacatatccttgtgccaagtattggtatttttgctttctaccctggtaaaatctgtggtttgtgatcaaccctacccaattatttttctatgtaaaaaaaaaaatggatggacttaggcatttacaaacttaaatagacaaacattttactggccct

SEQ ID NO: 43407 - DNA, 7099 bp, Homo sapiens
tctgtctacccctagcttggtcacctgtggttagagggtcagggtgttgtagtactgacaggaccactggagcttcatacctccattttaggggtcattccaggagaagggagcagcactcccagaggtgttcattacacccttaatggttgtgggtctcaatgtgacaaaagcagaagagcatctctatcttttcttagctcttgtgatctccatcctgttgtaggagaaaatgtcctattatcccttattaccatgctctatgtcagctcccataagaaatggaaactgacatctaagccagtagagggagacattccacaagagatggcgtcatctcctatttcttccccaccatatgctttcccactaaagatgaccaacaaattgcaggtgtcaccactgcactgctctcaggcttgccccaagagctctggtccagcctggcctccaactcgtcagtgttaatcaaggtaacacaaggaaaatatatacagagactaacaacttattacagtacctcaaaacctatgcatatttagacaacgagaatcagtattccttttagtcattcgttcatttatatattcatgaatttgctcaaccgatatttattaaatactggctatgtgccaggtgcatgacataaactgtacagtcattcaaaccaagtttcaagtctaaaagcccttttcctttgaagttcgtttccccctgaagaaagttagatccttaagttaccagtcccaaagcctcacctcccccaatcttaggctcaacactaattattgtaagtagttttcattttctgtctttccttttagacttaaggcttcgccaaggtctccccggcccccagcaaactacctgctatgaagtagatgctctgtaaatagttgttaagcacaaattgccttgtgctatggagactgggcctgacatgagttgtaaaagtatcaacaagtgtattgacaatgggtatcggcaagtctttgcccttcaagccagagagctgctgggcaggacagattatctctgttttctctgtcactgatttactacccttgacttatgcaatgacatcagctaatatgaagaacactgcactgatgacctcaaaataactgaacaaatagtactccctttcccctccaccaatggcatcaacattctaaaaaaatttaagcatcttaataagcggtgtctctgcaaatatatttcttccctgaaaacatgataatattctttgtaatattaggcaatttagagtcccagtgtaactgtacataactctacagaaaaaagacatatctaacaagaactagaattacaaaaactcattatcactgcattgcacatgcttcacacagacatgaatactatacccacatatgagggtaaaaagataagtgaaagtaaaagctatgagtgagtgtgtcagcctgatacattatggtcccaagatgacaggctggccaaaatactccaaaagaacaaacacacaaaaagaaggtagaggtaaatttttataatgtttgtatcctgttgggaaatataatgtaatgggcacagagtgtggactgtagagtcagacagtcaggggtcaagtcctcataccagcacctactacctatacactctggggtagtttacttaacctctctgaacctgtttcaccatctgtagaacatagtggtttcaagaattaaatacgataaatgactaccataatttggcatctgaggcatgtaccaatgacagccagttcactcattcatcccgtaattatgtattgaacgcctactatgtctgtcttgctcaccaatgcattcccagcccctatcacactacccgtcactgaggagactctcaagaactatttgtaagatgaatgttaagtctgtgctgttatggtgcatgcatgctggattgaatccatcctccttctgaccatgggaagaatgccaatcagagtagaacaaagtaggaaagtaaaggaaccttcactttagtgttgaacaagagtctattatatactagaaaaaactttacaaatttacagacttctgaaagttaaatgatgattctattgttagttgatcaaacatcagtcattgaaaatgtagtaatacgttacctcaaaagaaaaaaaaaaggttagagttttcttaacagataattctttttaaatctgtaagaatctgtacgtcactaaaataaaatcctgtctagattattaaaataaactttgttatcagttatattttcatggaaaatattcctgtatatattttaattaatagccacatagatatttgctttttctgtcagatcatgtatccctttaaaaaccattaaagctaaagaaaaaaatcttaaaatataatatttactcattgctaataaagggaacacaaatttggaaagactcaagtgaatattttttcttaatttaaactgagtactttgtctctattaagctaagttaaaagaatttgggaggacaacctatgctaccaagagaataatttgtttctaggaatctgagttaaaagaatttgggaatgcaatctctgctacctggagaagaaagaaatgtcgtgggtcccacaccattctcaagactctgtttcaaagcattgtttcaatacgctgatccaaaccctgataacctgccatctttttaataaaataatttataaatttaatgagaatgtttcactttccatacaaaaaacagaaaaatgctttgaatcaatgcacttactgggatttggattactgactggtgttcctattgattcttgtaggagttattaatcctgattgcaacacacaagtgaacagacaagagagataaattttgtggcttgtgggaaatgaaggaaaatgggcctcatttagtctgtgagcatactaattgaaatagatgtatgaagacttcaccagtgttaaaataacattgtttttataaatcatatgatataaactatataacaataaaatagaatgttaaacatgtatttaatcatcatcataattttgattcagaaatctataatttattagttatcttaataatgtttagaatttgttgaacattttaccttatgtgaattaaggacaaaatattaaagctattcagcacaaaaaaagggtctttctgatgtgtatttttcatagaatagggtatgaatttgttattttgttattttgattaatgtctaaaacaaaagataaacacattatgatataacattactattgattttaatggccccttttgaaatagaattatgtcattgtcagaaaacataagcatttatggtatatcattaatgagtcacgattttagtggttgccttgtgagtaggtcaaatttactaagcttagatttgttttctcacatattctttcggagcttgtgtagtttccacattaatttaccagaaacaagatacacatctctctttgaggagtgccctaacttcccatcattttgtccaattaaatgaattgaagaaatttaatgtttctaaactagaccaacaaagaataatagttgtatgacaagtaaataagctttgctgggaagatgttgcttaaatgataaaatggttcagccaacaagtgaaccaaaaattaaatattaactaaggaaaggtaaccatttctgaagtcattcctagcagaggactcagatatatataggattgaagatctctcagttaagtctacatgaaaaggatggtttcttggagcttccacaaacttaaaaccatgaaacatctattattgctactattgtgtgtttttctagttaagtcccaaggtgtcaacgacaatgaggaggtgaattttttaaagcattattatattattagtagtattattaatataagatgtaacataatcatattatgtgcttattttaatgaaattagcattgcttatagttatgaaatggaattgttaacctctgacttattgtatttaaagaatgtttcatagtatttcttatataaaaacaaagtaatttcttgttttctagtttatcacctttgttttcttaagatgaggatggcttagctaatgtaagatgtgtttttctcacttgctattctgagtactgtgattttcatttacttctagcaatacaggattacaattaagaggacaagatctgaaaatctcacaaactataaaataataaaagagcagaattttaagataaaagaaactggtggtaggtagattgttctttggtgaaggaaggtaatatatattgttactgagattactatttataaaaattataactaagcctaaaagcaaaatacatcaagtgtaatgatagaaaatgaaatattgcttttttcagatgaaaagttcaaattagagttagtgtgtattgttattattaatagttatgaaacacggttcagtctaatttatttatttgtagaacagtttgtcctcaactattatttttgctgacttattgctgttaatttgcagttactaaaaatacagaaatgcatttaggacaatggatatttaagaaatttaaattttatcatcaaacgtatcatggccaaatttcttacatatagcatagtatcattaaactagaaataagaatacacaataatatttaaatgaagtgattcatttcggatcattattgagtttcaagggaacttgagtgttgtacttatcagactctacatgtaagaacatatagttaatctggttgtgtgtgtaaaaacatatggttaatctggttaagtctggttaatcatattaggtaagaaaaatgtaaagaatgtgtaagacgaaatttttgtaaagtactctgcaaagcactttcacatttctgcttatcaactaaacctcacagagatagtttaatagtttaggctttaaaatggattttgattattcaacaagtggccttcataatttctttaagtgtttttctttaagtatatactttctttaaatattttttaaaatttccttttctctagtaaagccagaccatccatgctacctctctagtggcactctgaaataaaaagaaaatagttttctctgttataattgtatttgtaataagcagatgaatcacatttcttaaaatttgttttagagagggtaagctctgactaggaccatgacttcaatgtgaaatatgtatatatcctccgaatctttacatattaagaatgtatatagtcaactggttaaacaggaaaatctggaaccagcctggctgggttttaatcttagcaccatcctactaaatgttaaataatattataatctaatgaataaatgacaatgcaattccaaatagagttcatctgatgacttctagactcacaaaattgcaagagagctcagttgttgctcagttgttccaaatcatgtcgtttgttaatttgtaattaagctccaaaggatgtatagctactgacaaaaaaaaaaatgagaatgtagttaatccaaatcaaaactttcctattgcaatgcgtattttctgcttcattatcctttaatataatattttaagttagcaagtaattttaattacaatgcacaagccttgagaattattttaaatataagaaaatcataatgtttgataaagaaatcatgtaagaaatttcaagataatggtttaacaaataattttgttgatagaagataagactaaaagtgaaattcgaagtggagaggacacttaaactgtagtacttgttatgtgtgattccagtaaaaatagtaatgagcacttattattgccaagtactgttctgagggtaccatatgcaataagttatttaatccttacaataatcttgtaaggcagattcaaactatcattacacttattttacagatgagaaaactggggcacagataaagcaacttgcccaaggtctcatagctgtaagtcaaccctacggtcaagacctacaagtagccgagctccagagtacattatgagggtcaaagattgtcttattacaaataaattccaagtagaatcaacctttaataagtctttaatgtctcttaaatatgtttatataggagtctaatcaccaattcacaaaaatgaaagtagggaaatgattaacaataatcataggaatctaacaatccaagtggcttgagaatattcattcttcttgacagtatagattctttacaatttcgtaagttccaatgtatgttttaggaatatgaggtcattactattcataatctgatacagctttatcctaaggcctctctttaaaaactacactgcatcatagcttttttgtgcagttggtctttctactgttactgaacagtaagcaacctacagattcactatcaccaaccagccagttgatggatcttaagcaaattatcaagcttgtgataacctaaattataaaatgagggtgttggaatagttacattccaaatcttctataacactctgtattatatttctgcctcattccttgtagggtttcttcagtgcccgtggtcatcgaccccttgacaagaagagagaagaggctcccagcctgaggcctgccccaccgcccatcagtggaggtggctatcgggctcgtccagccaaagcagctgccactcaaaagaaagtagaaagaaaagcccctgatgctggaggctgtcttcacgctgacccagacctggtgggtgcactgatgtttcttgcagtggtggctctctcatgcagagaaagcctgtagtcatggcagtctgctaatgtttcactgacccacattaccatcactgttattttgtttgtttattttggaaataaaattcaaaacataaacatattgggcctttggtttaggctttctttcttgttttctttggtctgggcccaaaatttcaaattaggatatgtgggtgccacctttccatttgtattttgccactgcctttgtttagttggtaaaattttcatagcccaattatattttttctggggtaagtaatattttaaatctctatgagagtatgatgatgactttcgaatttctggtcttacagaaaaccaaataat

SEQ ID NO: 43408 - DNA, 916 bp, Homo sapiens
gccaggaaacaagacttagctctaacatctaacatagctgacaaagagtaatttgatgtggaattcaacctgatatttaaaaagttataaaatatctataattcacaatttggggtaagataaagcacttgcagtttccaaagattttacaagtttacctctcatatttatttccttattgtgtctattttagagcaccaaatatatactaaatggaatggacaggggattcagatattattttcaaagtgacattatttgctgttggttaatatatgctctttttgtttctgtcaaccaaaggatggacagtgattcagaaccgtcaagacggtagtgttgactttggcaggaaatgggatccatataaacagggatttggaaatgttgcaaccaacacagatgggaagaattactgtggcctaccaggtaacgaacaggcatgcaaaataaaatcattctatttgaaatgggattttttttaattaaaaaacattcattgttggaagcctgttttaggcagttaagaggagtttcctgacaaaaatgtggaagctaaagataagggaagaaaggcagtttttagtttcccaaaattttatttttggtgagattttattttgtttttcttttaggtgaatattggcttggaaatgataaaattagccagcttaccaggatgggacccacagaacttttgatagaaatggaggactggaaaggagacaaagtaaaggctcactatggaggattcactgtacagaatgaagccaacaaataccagatctcagtgaacaaatacagaggaacagccggtaatgccctcatggatggagcatctcagctgatgggagaaaacaggaccatgaccattcacaacggcatgttcttcagcacgtatgacagagacaatgac

SEQ ID NO: 43409 - DNA, 1580 bp, Homo sapiens
atgatatcactggcacagtcaagatattaaatatatccatcacctccaaaagtttccttgtgttcatttattttagtttttcatggtaagaacatttaatatgaaatattatcaacaaatttttaagtgcacaatactgtattattaattttaggcattatgttgtacagtagatctctagaacatattcatctactaaaaatgaaattttatctccatttccccctacctcccatcccctggcaactaccattctattttccactttgactgtttcagatacctcatataagtgaaatcacacagtatcctttcgcactgttgtggggatgtaaaacggtgcagctaccatgggaagaaatgtggaggcccctaaaaaattttttaaaaaattctgattatcatatgatccagcaatctcacttttaggcatatatccaaaagaactgatatcaggatctggaagcaatatttgtgcatctgtggtcattgcaacattattcacaatgttcaggtccttttatatgatgccctcattgcagcaatgtcttcctcccaacaccatctgacaaactgctatttgtttttaaacctcactttaactgtcaccgcccagagaagactttctaaaacctttgggcaaattttattactttttgacaatgaatgcctgaggcttatccagctttgattccagaaacatcagcctgtcagaatggctaattttcatgcatttgtgaatgctggatggctaaatccagtgattttcaaagtctcgaacatcctctttttaaatgtagaacccattttccaataaagccacaaacagaaactcaacatgcaaagttcttgaatatggaacttttggggcaatactgagagtcgcaaaagttcactgaatgaaaaatgcgggttgggaagactgcagtcatcagacctttgctcactccttacgtgttcacagaggatcaaatgaatccctagagcttgaagtaatgccatagaagaaaaaccactaaagtagataatctgatggtcaattcttagttaatgtacaaatagaaaaaacacagagaccactcccaggtaatatgtaagtctatctagaaagaaatgcactttcttggctgggcacagtggctcccatctgcaaacccagcactttgctgggatgaggtgggaagattgcttcagaccaggagttagaggccagcttggcaacatagtgagaccctggctctactataaaacttgtaaaaacaaacgaaaatacagtaacgaaaaaagaaatgcactttcttaaggtgtcatttggtaagaaatgttatgtgtctgattttgcccatgcacaattttgaatataataaaaaaggtagcttcccctatttagaatatataaaacagtaacaacaagattgtataactcatgattttaagatgataatagaaagattagttgaaagtttttaatcccacactgtggtatgagaactattttatttatatatatatatacatatatatatatacacatatataattatatatatgtatatataattatacaattaggactgaaa

SEQ ID NO: 43410 - DNA, 1376 bp, Homo sapiens
tcagactcctggactaaagcgatctgccctccctgacctcccaaagtgctgggattgtaagcatgagccactgcgcctggccctttcctcaattttccattagcaaagtcatcttttatatgaattactcatttcataatatgtaggatagcaatcagaaacatggtattttcctctatacaaatattttaatttgtaagtaattacactgggagtcatatacttatgcaaataatcttaactggtacggatattcaccatcagacactttcttttcttctcccagccaagatgtgatgaacaggcaatacatctttttgtttgttttttgattcaattatatttatttctgccccaaactttttattttgaacagtttatactctacagagaaattgcaagaattttaataaatacctctctgtccttctcctagcttcaccctttgtttgttgaaaggagatactttagtgcagtattgcaacagcttatgtagacatgcaaccttgaggtcacagacctatgagggattgagacaaaggcaaatttagcaaatattttccagagtactctgctgcaataaccacgtacccaccttcagcaatgacctggtgaacagggagactactgcttagtaacggagcaattctcagctcaaatctggcaggttctaagttttcttgcctctgtggttttgaatggttgctcttactatgtgaaaatggaagacatcatgtcctgttcatgtttaagaattaattgagatttccccaggggcaaatacttcacgatactgctttcctcagtgatatttaatgcacttcctgccctcatccccaattaattaagcattttcctctatacaggagatttatgaagtacttggaattccattaaaaagaggtaatatgtgacttaaatgaatgcataaatacatcaaatataagatatctcagaaatggtttctgtgtgaattttgttatccacaagcaacttgtattattttcatggctacaagaaatttcaatgtggctgcttcccaagctgtttcccaagcaagtaataaatgttgtattactttatttgaatataacaaagctttaatttatgattgcatgtgcttacattgacaccttggcatttcccttcaggcttttctggacatgaaaaagatgagtgaatttggctggatgggtctttctgttctgattcaccagctgcaccccaagcatcagctaactaacttggaaatatattttgttttggtggggaatctatgacaaaatataattagatcagtgataccactgggccaataatgaaaagcaaatgctatgtacaatagtgtcatgtttatttatgaagtgtagtatcat

SEQ ID NO: 43411 - DNA, 7190 bp, Homo sapiens
cacactttgaatagtgaaagaatttgactaaataagctcaaatagagtttcagaggaattcattcatccatttaacatgtatttattgagtcatggctctgtactgttaggcatttgggaatacagagatgagacagacaaaggccctgcccccaaggaacttacagtctagcacaaaaacagaccaaaaaagtgtagtttcaatgacgtgtaacagagagttaagaaggaaatgcaaggggccatgggaacactgtgcagaaatatttaacttagtctagggggacagggaaggcttccccaaaggagaagtgtggatacctctgacagggcgagatttagcatggcctctcttggtgctatgtgttccttcatgatcggcttcacttccggcctcatctgccattttatagctcttgctttcaaatgtggagtctcctctgttgtaactcgtgctactagtaaattgtttgctgtaacttgaagatttaccacgggaagggaattcagctatcccagggtgatgagaactggattcctttgtatttgtgaagatgccagattctgagcccctagactcagtctcactgacaaactctcctaacataggtgagaagaaacctgggaatgtttttccagttgaggcagtgtcgaagaaggcagcttcatcagggtgcctatggcggaacccatccagagtacctatgccagacaatgtgcctaaatccattgcctcgggacagtcagaaccatcttcggaggtcaccacttctttggtaacttctttgtgaccatcaggaccaataacagtcttagtaacggttttagagcatgaacgacgcgtggtggttgtgctaccagaggtgaccttctctttaccagtcctgagctctttatctcctttagaagtgaccagtttttctgtgtggtactctctccttgtccctggacttacatttcctgacacctcttcaaatgtgccccagtctgggttgttaggcctcgcgttcccagagcctgggctatctggcctaaaacttccagattcagagtgccattgtccagtactaccagatacagagctctcagaggtccagtgcccagcacttccgcgttcagagctgccaggattccaggttccggtactaccaggtctagggctcccagggttttggtttccagtacttccagttccagagctcccagagttccagcttccagtacttccaggtccagagctcccaggtttccaggttgcagtccctccagtcccagagctcccagggtttcggtttccagtacttccaggtccagagctcccagagttccagcttccagcactgctagggttcctggggctttccgtctctgatccggttccataagaggtggagcctcctcgagtaatctcatttccaccaggtctctctaactccattctcatctgcggcatgtctgttaatgccttccactctgggggtaccttctgaagctggctcttaaaatttccgggaaccaagtctggaactggtttcatttttatcagtggtaagtgttgcctatctctagagggaagtaagtctttggcaatgacctgttcaagttgcttctgctgatcttcatagtccttcagatctacttcacgagctaaagccctactgcatgaccctcgacaagatcggatcttaatatcaatgtccacctagagagaggggagaaaaataaagagaaaatgtagatacaaatacataaactacgtctattgagttcctggtagttaattttccttctggaaactggtttcattttttttgactcggagacctaccacttaatattctctgttttctgcctatcgagcaccctcagtggaagagatgttgggtattgcagggctagccaggataagcaatggatgctgtttaattcatcttagcctcagaatggatcaagagtaaggtgctattccctctcaaaggaaacgctaattaaatgatccttggtgaaactcaggctgagggctcagaggtgtggtgatgtaatgggctttggaattagacagggactgaacatttgcttttgaaatttactatctatgtaccgttggaaaatttacttaatatctctgaattttttttcttcaactgtggagtgaggaaaataatacctacttttaggtagatgatggatataacacttttctctgcatatagtagacactcagtgcataactatcgccttccttttccctctactcagaaacaaggacatctgggaccacagccacatacttacctccagtcgtttcatatcaaccaactgagctctaacatttttctgcagaagctggatatgctgtactttttctatgactttgcgcttcaggacttcaattctgcttctcagatcctctgacactcggttgtaggtattatcacggtctgaaatcgaaaatatggttattgaagtagctgctgagtgatttgtctgtaattgccagcaaaaaagaaaggaagaaaggaaggaaggagaaagaaagaaagaaagaaagaaagaaagaaagaaagaaagaaagaaagaaagaaagagaaaaaagaaagaaagaaactagcttgtaaatatgcctaattttattttggttacagtttaatctgtgagttcaaaacctatggggcatttgacttttggataatgttatgccctgcagccttccatgaatgccagttaagatgtcctaatagcaattagtaatcccaaagaaatatagaagaagaactttctttggaattttaaaggtgtaatttggagttaaaatagttggtttgattgcatttcaattattttataacatccttaatcaagggacttgaacatattggattttcttactgatgagcttttctttttaatctatagatttgaaatggttcctaagctgttttgggtcaacaggatcactcacttgccagctagtgttgcatcactgattttaaatgtcaagtgtttgtgaaggtgtaaaaaggcaaagcaaaacttgagaaactgaggactccctagactcgctgtccatgcccagagtgaatgcaatgtttcctaaccctaatgagtagactgtgagaatgacgtagcttgaccctatattttaaatttaaaaatctacctaatcagctcagtggagtctgggagttgaattcccagctctgtgtctttgaacaagttccttgacctctcagttttcacctttacaaagcagaaacaaaaatatcaactcaaagagtctgacccatcctactttcagtatatactgttgaaaagaacacatttaaattcttgtttttaatccaaaattctgacttattttgtgaccttaaacaatctcagttaacatcttttactttgaaaaaataacgaaaacaaaagctccctcttaaaattttcagggatattatgaaggtatgtgtttctacactaagtactttgggatgaaattgtcatagatataagcggatatcatatttatttaggatttttgttgtttctgttataaagtcaaagcagtaaatatgtaatacttactattggctgaggaaaaatcgcctctcaaaatttccattatattagtggtcaacgaatgagaatccttattgttcttctgatattcaaatagtgaatttttgagcttatttattctgtttgtaaaatcttgattgacttcatcaatcaaccctttcatcctgcagccagaagggcatttgtagttctgaaagtgaagggagaaaattacagtaaggatctatctctcagattcagaataattttgcatgtttccatgcagcccccatttcttcctaccctatctcttccagataagttggcttaaaagtaggtaagaggactagttagaggtcgcagagaaactctggaatgagggtccacttagccataaattaggtgccaggaaattgaggccacaatactcaggagcctggttttgcctgagcatgcaactgaaatcctgtctgttcacccactaatgatccagagttggggaggtaaataaacagtgctcttgggagtaggttccttttctttatttgctatgtaggtaactattcaattattttctatttaaaaaagtttctgggaccaatcaggtcagcctgtgagcccctctagcatcagagggaaggaatctcctgcttcccccgctgactgcttacccagtcttcatcagagcagaagggccagtctgaatctttgcaggcagattgatgtctttccacaacccttgggccacgcacgcctcctccttcagctagaaagtcaccttcaccactatctgcagtctttaaagattcattcacatacacaaaagagagcaacagcaatgttagccagaagaggagacagtggcatgcctacaagtccccaggaagagatggcactctcacagagattaaggagagcagacacagggcttcggcaagcttcaggtttcttatcttcaaatggaaatcctaggacccattttatggagttgttatgagaattaaaggagacaaggtgtacaaatttcttaactgtgtgtgacacttaaataagcatttgataaatattaggagttttaaagaatccatcctaaaaggaaaattatttgaatctataaaatcagttaaattttaccttttcatttttactaatgactgcagacagaaagttgaaaactactgtagagctctttctcctgtaattgctgcttcagtagaaaaacctagactatcttaactgaatgttcctctctccttcaagtttctatgtaacctttagagatggattcataatttaaaagaataccattactgcggaaaagcgtattgccttactaactaatctcttctgatactgcaaagatatttccaaagataattcgtttgctttttcttctgtcttgacaaacacaacaataacctttcagcaaaactgtactaacactaaaagttctgcttattatggacaagtagcaagaaattaataactaaagaaaacaaatcttaccataaaatgttttattccattaactagcattataatgcaccaaggctttataggtacaaggatggcaaataattcttgccctttttaaaacaaaacaaaacaaaatgtggtaagactgaatgacagatgctaaagtttcccttgtgagtttgtacactctcatccatctaagatcttcctcttggtgtcatattaccctgtattcttgaggtgtcaagcccacccaggaaatttcctcccaggcctggggtcataaagctaagagtgtgtcaggacatagagcaggtagactctgacctccaggctctttgtggaataaacaccagagagaaagcaagaagaaaaaatgaaaagggccatacccatgctgtgcccaccacacttaggaccaggcagacgatcctcatggaaaacatcttttctaagggtggggctggctcctgaggagcactccagctgaaagaaaggattgctgccactcctagttcccatcctatttaaatctgcaagaggtttggttaatcattggctttgtcctgtgtagacagtcaaccctccctctacgtcctttgttcctcctatgctgttggtatcccagaaattcttgctcaattcccctcagcttgtttgcttccgataagctgttgcaaaggtagcatttgattctccagtcaacaattaggagatctcacattccaggaacagggtggctttgagaatgaaaagaggagcataggagggtatatccatatttctaaacgtgaaagaatatagaaggtgcttaggtaagctagctgtagcccccagtagtagtgatttagcaaacaatatttcactttatgcagaaattagggttgggtgatctggcttataaaaaaaataactttggggataagctggccctgaaggctttctataagtttatttagaacatattacttttctctatttaaaatattaagatgacagcagccccaggaacaaaacatcttgggttcataatccaagctgcaccacttccctgctctatgttcttggacaagttactttacctctttatacttcagtttcctcatttataaaataaggatgctgataagctaccccatgcttttatgaagaataaatgagttaattcttgtaaatctctcagaacagtgactgtcacataggaaatactcagtgaattatgggagatcataaagtgccatgaaaaataccatttatttcctgtttctgtgctagcaatctcatttctgagtgtatttccaaaggaaatgaaatcaggatcttgaagagacacctgcattcccatgttcattgtagctatattgacaatagccgagatatgaaaacaacctgtttccactgatggatgagtagataaagaaaatgtgtatatatatatatacacaatggagtattactcagccttgaaaaagaaggaaattctgtcatttgcagtaacattgatgaacctagagggcattatcctaagtgaaatgagcagatatagacagacaaatactgcttagctggtcgtggtgacaggcacctgtaatcccagctactcaggaggctgaggcagggagaatcacttgaacgcgggaggtggaggaggttgcagtgagccgagattgcatcattgcactccagcctgggccacagagtgagactccttctcaaaaaaaaaaaaaaaaacggaaaagaaagacaaatactgtatgatctttcttacatgtgaaatctaaaatagtcaaactcacggaagaaaagtgtagaatggtggtggccagggcctgaggcataggagaaatgggggagatgttggttagagggcacaaagtttgagctatgcaatataaataagttctggagtccaatgtgcagcatggtgactatagttgataatattatgctgtatatttgaaatttgctaaaaaggtagatcttaagtcttctcaccacacaaaaagataactatatgaggtgttttaagtgctaattagattaatagtggtaatcatttcacaatgtttatgtgtatcaaaacaccaatcagagagaagttcccctttaaaggaaaataaaaaaacaaacatccagctgtacaacctaaattatgcaatttttat

SEQ ID NO: 43412 - DNA, 692 bp, Homo sapiens
gtaatgaattcactggacaacattggcaaagctatttaactttctgtagtttttttatttttcttttttttttttttttttttttttagagacagggtcttgctctgttgcccaagctggagtgtagtggcacaatcatggcttactgcagcctgaactccttgggctcaagggatcatctcacctcagctgcctgagtagctgggattaccagcttgtgtatcttattttctctatttgtcttgtgcacctcaagggtattgcaaaagtttgtctttaccaagctgcttactgtgaaaggtaaatgaactggtaggatgacctatgtaagtgtgactaatggagtgtttaatgtttattttcagaactcatcaattttctgacctcaaatggtttccccagaagttacagctgcaaagataaaataggaatttccttaatacccagaagtgattctgagttgcacttaagaaagtgaggaggaaaaaaaaagagctttttgtgatcgtgatttattctatcacactgttatttctctttaatctctttcttcaggaaagacacccattttattttttgtagttgaactgactttagattaatgaccacttaattgaataactttttatcatttttgagattaaaatctattctgttccaataatataataataattctgtttttatcctta

SEQ ID NO: 43413 - DNA, 2207 bp, Homo sapiens
gctagttttgaaaagtaaaaccattatacagataatcaattgatgtattaatatcaacaacatggattcattctcacatcatatctattaaatccatggtattcagtgcattgctggatggtctcactgtggttcttctagtaaagactggcaaacaaaatctaccggttggtgttggtttaacagtgacatgttaaaaattggagaaatatcatctgcaaggcatgtggaatttccacaaacaaggaattatatgaaaaaaaggggtaagtcaattaccaagatccatataattatctgtggtatttattgggccctatattaatggaagattttacataaaaattttacttagataaaatttgacaaaaagttaccaagaaaaacagtagagaaacctaaactgagggacattttacgaaattcatgactggcacaccagaacagacttccttaatttgtgaaggttgtgaaacgacaaagaaagactaagaaacagggaaccagaggtgactaaggagatgtgacaactaaaggtaatgtggtatttggatgggatcctggacagaaaagggacagtagtgtaaaaattgttgaaatctgaataaagtgtgaaggttacgcagtagcaaggtacctgagttggtttcttagttttgacgaatgtactatagtaatgtaagacactaacgttaaagaaaactggggcagggcgcggtggctcaccccgtaactggggccaggtgcagtggctcacgcctgttggggccagggatggtggctcacacctgtaatcccagcaatttaggaggccaaggtgggcacatcacctgaggtcaggagttcaaggtcagcttggccaacatggtgaaaccttgtctctactaaaaacacaaaacttagccgggtgtggtagcgggcgcctgtaataccagctactcgggaggctgaggcaggaaaatcacttgagcctgggaggtggaggttgcagtaagccgagatcatagcactgcactccagcctgggcaacagagtgagactcagaaagaaaagaaagggaaagaaggaaaggaaagaagaggagaggagaggagaggaggagaggaggagaggaagaaagagaaagagagaaagagagaaagaaagaaagggaactaggtgatagtctagtgaactctgcatagtacctttacacattttctgcaaataaaaacatgattccaaaattaaagctttatttgaaagcaaaagcaagcaaatattaaagttataaaattttatttccaaacttaacataattcaaaccccacacagcaataccaatcttaagagtaaaaaacaagagtaaaaaaaaaaattttgttttattgtctctgaaacagttacacatattatctcacttgacccttatcacagctttgtgatgtaaggaggacaaattatgaaggaaaacatttccagtccaaggtctcttaaatgttaggtcatattgtcttaatgtcacattttaactattcgtcccgaaatatttcaaagaagccactttcataacagagtggaatctgccctcctatgtttatctaagtagagtcaacatttagatttatttagtgaggattctctacttgcctcagttcacctcatgctttaaagttgccagtagaagaaaatctgggtgaggatctgagaaataggagtgagggccaaggatacggattttggatttgggaaacacatttttgacccagctgtagacatgattaaatgtcatgatcctgaatttaccacgatttcttccttcaaatatttcccaatgaaattgaggtgagcaagagcttaaaattgtgccagctacccttcccagaaagctttccaggttgctacagagcagtgttctataagccatggttgagtctaccatcaatgcccagaatgagccaatggcaacaataccatttgggccaaagctcatgtttatgataaccgttagtctatcttttaactaattttttttttgagacagagtctcactgtgtcgcccaggctggagtgcagtggcgtgatttcagctcactgcaacctcccaggttcaagcgattctcctgcctcagcatcctgagtagctgggacaggcacgtgccaccatgcctggctaattcttgtattttttaatagaaatggggtttcaccatattgcctggctaatt

SEQ ID NO: 43414 - DNA, 2687 bp, Homo sapiens
ccacgttttccctctaccttgtcttaggcaatttctgtacaataacctccttcaacttcaatgatggacaataataatgcaagtaataataataacaataataacaagggccctctgatagcaaaaagaggagaaatctttcctgggccacttctccctagctactatttatctcaatttctcaagctgctttgagaaaaattcagaaaaaaaaattggggaaaaatattaaaactgtatctgagaccttatgttcagaaagtttatgagtccctgagaagctttaacagagacattcacttccaaatgaagggaagagactatgcaggttcattctgcaatgatcaatatgagctttgcaatatttgccacacttagtctctcaagacatgtttcttcctgctccacattcaatataatttactttaggagccaaaatccttactatgcctctgcttgctaatttttttaaccaccaatttgtcagcatttttataaagaggattttattttcaacacccaaattcctatgagattgattttatgttgtaagataaatgggggatggggaaaaaatttttgataaatatggtcaaactagcatttgaagacatctagaacatctttcttcaatgtgattattaataagcaattataacccagtataatttatattgcactaaaaacttctatctctactatgctcaacataatcaggcataatgtcactgggatattataaatggggaaaacacattaaaaattactttcactcaagtatagaatattaaataaaaactaaatcagtcttgcagagcaaattaaaacaaaaatccttaccgaatacttgagtcatgtgttaaaatcgatgcttcatatttcataatttcttctaacattttcctggacttcaaagtagcagcgtctatcatatctgtaatataggatcagagacataaaaatccttaagcaaatagaacaactaaaacaacagcaaaagaacttcacagattattattattattttttggtcagtagtctttattttctcacttggttttgatgattcatcaggattataagtgagttggattgcttttatcagctgtttgacttctgatgttttgttttcaacttgatgtaagatgtcttccaaagactgtagatccttgtctactttggtttgataagtagacaggaaatctgcaatgccacaggtagttggacaataactaccctgaaaatataacagtgattaaaaatgtagacagatgctactcttaaaatctattaagaaaaataggtaaaacctagactatgtttttaaaaagttacaagtgccagatgatatttatgagggaattatttctattcctctgcccctctccagttcacacacaaagggagaaacataaaaactacttacgaatctttcatctaagatgcagcagttgtctctggtagcaacatactaaaagagaaaaaatacagaaatttcactagtttattatctgttttattttccagctttccattttaaacaacgttttgtgaagagcacacttactgctacacatgttgaagagagaaataaaagagcatagaagtagagaattaaattccgggggtgcaaggaccaactcatgatgtctgagtgcccggagctccgagccttgtagtgtcagcactgtcacctctcaggctccaattgtccctttatgtaagctcctgggatagccaggactgcaaatggctggagctgatcacggggcctccttaccagaagggtgggcaggtctttcccgttcctttttcctcatcctggcccccaacctatactgtcaggttcccagattttgcacacaggttgaagctcctcctttttggcccagctcaaggttttttctctgatccaaaattatctgcaaaggctagtgaagcattatccattgctgtgaggaggagggcagtcctggaggctgtgtgatgcaacttcttccagtacatggctgagagcaaacagatatgacctcgaactaagcaaacctagtctatccttaagatgggtcctgctgccatcacctgaattaccaaaagaactttcttagcttagggatcagttaacactattattttagcctagggatcagttaacattattatttttaatctgtggctgtggcaggaggagactgacttcccccatgtcccagttcactattcccaggaatgaatgaccctggaaatacattcctgtccctctgtgtcaaccatgttcataggctctcacttctcagggagcttttgagctcaatcttccctttgtctgaaggtgggcatggcaccccatctgccacagagaaaagagccaggagcccacttcattgttcctgtggttccatcaagctatctcagagaagagaaaaatccacctcccttgtatctaaggagagtagaggcatagctgaaggaaggggcaaaatgaggtgctggggaggggccatcatttctgtttggcccttacagcatccttgtgtttgggaaaacatgtctgtcatcactgcctattgagatttatcactgggcgttacactattattaatgtctctatttttggttatccctcatttcttcctctggaaccaagcttattataagttttgatgaaatatgttagtgggagaaat

SEQ ID NO: 43415 - DNA, 1824 bp, Homo sapiens
taaatatgattagcaggagatttacaagagcaaatgagtttggggggaaaaataaaccaccaccaaccaaggggccaagttatattcacaagaatgtgctccggaaagaagaaactttttaagcctttgagtagaaatactggcctatgttgaaagtggacaggcccctgtttgagaaaaactgtagttattttgtcatataaactatctttggaggaatatatatatatttctaaagaaggagagaaaataagaagaacagagaatgctatcagatcatcaaagcaattcagtcatcttatctagcttaacgcacacatttgctttaacctgcaattttgaatgaggacaaacaaaacatttataagatttagatctttgttttaaattctaactacttgggttagtttattgtcttagtgtaattgcactatagtcctttcaaagttaaatccatataggatttgctgtgtacaaaggctaactttctattgacattttgaaggactttgcttcatccatgaaaggtgacatatctctgtcttcttcaagtgtagatttctgtgtatactttaccttgagtggtggagcagtgacctctactaagtaaacaaagatacgatttgcaaaaccagattaagtcaaagacccaaatatttattgaatgttgtgcaagaaagcctagagtgtaaatcacactcttgatggataacactatggctgcaagttaccgaagaatggtctggcttcagggctgaccagagcaagctcattcacaaagaaacaaggttaggtcaaaatttagaacactgcattttaccttttataaacagcagagaggaaattctgttgaccaagatccaggaaaccgattgcttaattatgcatccttctgcgtcggaaaactacctgatatttacatatcaatacttcctgtggatctcactatgctttataaggttaatttcctcattagtactttattgatatttaatactacatcatctaattatggctatggaaggccccatacccctcctcatattaacctgatatgttaagccatttctagctctgaccgagaaactttatagaatttatctaggataatatctaaaataatgctgaatcaaatatgcaccacaaaatttggctgccgggtaactgcacactgtcccatggtgttcctctgctggatgctcagatcaaagtggtcattcacttagtaaatacatattgggcatatactatttgccaggccctgttctacacaatgaaccaaagtcgctgctgataagtttacattctagtggagagaaagaggatataaacaaaatattatataatgtcagttggtgacacgggctgtgaacaaaaatgaagaaggattaaggaaatgaaagactagaggaggtgctgttttagatatggtggtcgggcagcactctaggttaaggtgacatttgctgggtttctggtgaggctagttacaaagctcatggctggctcactattgccacctgcaggccccaatacatctggaggatgaatgatttaaagccaacagacacatattttttcatttagagctgtcagagatttgacaagtgtaggtaagtaatagaatgagaagtatactaagagaggaacactgcgcaagttagccagaaaataccacaatgaccatctacacattactattgagcttgcgagttatgccattctcttcatcaaaatcctctgaggaattcccatttcctgtctaattaaatataaacttctcagccttgtatttaagcttctccaaaaaaaaaaggccaatat

SEQ ID NO: 43416 - DNA, 576 bp, Homo sapiens
aaagggaataatattattacccatcttatagggttgttttgtctaatgtgttaataaatgtaaacatttaaaacattacataagagctgattttactattattataaaaaagctcttaaaacagtttctggtcagcattaagaactcaataattgttaatggttaatattagtcatgtaactacccagataatccataaactgtattagtcatcctgttaagaagcaaggcctggtttgtcttcttccttttattatacaattttactgcttctaatttaaactcttgcctccctaagttcaatccaggaagagagtcaggattaaaggactagaaggaaagacaagagtgctgatggaaacaaaactactcaaatataggtgttaaagagagagaaagagacagagagggagacagagagagagagagagagagagagagagactttgtcagctaaaaattaactagactgtcagctcctgcgtcttctgcatccctctcagaacctggaaaaaaatatttgcagtggtcctgatgtccgcagcaggccttgctccgatggttttgcagagtagc

SEQ ID NO: 43417 - DNA, 1272 bp, Homo sapiens
agggtctttaaattatttggcacaaactccgaaaaagtggagaggctgtgagccagccaccctccgactaggttttgtggtgatggttgctgaaatcacttgcgcacaggatgacaggagctgggaacctcaaggtaggtgagcctgccaagacgcgggtccgggactcggctggggcgcagatggagcccgcccggtagggggtgtgcggagccctgttttctgggctccggcccccagcccagcccagccgccgcaggagcgctcggccagtaggtgtctctgctcctcgggcggccttgagcagtgcctaacgttgagcgtgaggctcgtgctccgggtctcgcgggcggccgcctcgggcgtcgagtcccggagattggacagacaccagagcctggggaccgcggagtgaccgggtggggctggagggcggcgccgcgccttctggggagacgcggaggtatcaggtaatcccccggcggcctgcgccaggcagtcatgcccacccgagccctgggacctttttcacctcctctttccagggaggaaaggcggcaagggaggcgcgaggagttagttgcagccctggaggcagacactgaactccaagataatgccacttggactctgaaagtgggctcttctctaccacgcgatccagcttagcttttaccttttctctagaggtagagagggccgggtgccaactccttgctcaacttctcactggaaaagtggctgccttcctccgtctccctcccctgggctccggccaggggagcaaggcctgctgtggacatgaggaactccctgccctgtcctggtaactttcctattctgcaccttcgctttgctagcttgtctacctccttcttttcgctagcttatctacctccttctcttcttcgctcttcctcccactggaaatcttcacttcctagtccgcaaaaccgtccagcggaggtttgcaacagagtcggctcttggaatcatagccctcttaggttggtggtggttgtggattagagggcagcagtagggacgattaaaagtagtttttaatacttaaatggtttagggctttcctgtgcctttgttctgcctaaacattagtttgatttactaaaatcctctcctaccccatttctggcatttggtaaagaaaccaagtgaaggtaatcaggcctcgggtatttatgtatgtagaaatcatctagcaaaatagaacgaatagatcatttcttttgaggggccgtaaacttttttgta

SEQ ID NO: 43418 - DNA, 741 bp, Homo sapiens
ctgaatggctgctgtccacaaccaatcagactggttgcctgccgagtcttcatttgcatagaagtataactttgtaacttcaccctagcatctgattggttgcttggcgcaaccaatcagatgcttgcgcaggagtgtgacctttgtaacttcacttcagcctctgattggctgctttctgcaaccaatcagactgactgctagctaccgcttcatgtacgtgaagtgagcatgaagtggccaatgggaaatttgtagggggtatttgaacccaagaagattctgtatccgggcacttgagctgctgctcaggttggctcccacgctatggagtgtactttcgtttttcaataaatccctgtgttccttcttttgttgcttcattctttctttgctttgctgggagttttgttcaattctttgttcaaaacgccaggaacctggccaacttgcagtcatgactctctatcggtgacaaaattcctctggtccatggtgacttcagactgattccagggcttactgcattggcggtcagattgatccccactctcttcttactgcttgcagtaaaaggaagattgttatgaacccaagctggcaggacttagcctcagctttcaaatacccactgtgatgtaccagtactttatagaaagaaaatatttttaatctttgaagccagaaattatcccctaaatgtatatatgtgttcactattattttccttgaaaaatattc

SEQ ID NO: 43419 - DNA, 1205 bp, Homo sapiens
ggtttaggttttttcttaatgattcagtgatttattccaaataagacatatttctcctggctgcctacttctactataaacatcccacaaatattgtaccttaaatagcattcttagcaactgcgaattaaaaatcatctctattcagctaaatagtaagatgatatccacttattatttctgatgtttcctcttttttctatgtctctatatttctgcatttaaatgtgtggtttaaataaaatatgcaatacaaaatgtaaaatatgacaactgttttactttaaataatatctagaacaaccaagacttatctataattttttcactaaggatagtcccaaggaatagtatctttatcatcttctgtagggtccttttaattgtaattatgcatagcacatggccttttaaaacttgtaatttttatttatgatgtttaaaaatgcagtggtcataatataaaatagcttcaattagtatatttattctttctccactgcagtctttaaaaacgaataataaactcccagtgaacttttaccctgtaaatgacctgatatgacacatttgaacttgcagtgaacttacacatgaactttcagttatcctctgagaaatacagcagatggaaaataggcagatttttcaaatattttcagaagcaggactttgacatgctcaacagagggaacaaggccagttatctcttggcagtgtttactttgctggctttgttgcactgcaggctgtttagttacattatatgcctgaacagagagtttcagttatatttgtgtttgactgacaccttgattttaaaccagctcttgtgtatatatttaaagacaaaattaactttgggaggccgaggcgggtgaatcatgaggtgaggagttcaagaccagcctggccaagatggtgaaaccctgtctctactaaaaatacaaaaattagccaggcgcggtggcaggcacctgtcgtcacagctactggggaggctgaggcaggagaactgcttgaagctggtggggcagaggttgcagtgagccaagatcgcaccactgcactccagcctgagtgacagagtgagactctatctcaaaaaaaaagaaagacaaaactaattgggtcataaaatacaacaaattctaagagaactttattgaatcaattgaaataatattgtttctaatcatttaaat

SEQ ID NO: 43420 - DNA, 837 bp, Homo sapiens
cttggtttaacagttttctaccttctcccattttggttgaagggaagtatcactcaaaaaaagttttttgtcttctgaatttagagaaatagaataatttaaaacatgtagctgaactcaacagaaccaagattagaaggttaatactgtggatggaaattactactttgtggagaaccctaagcttcagattcctgtagtttgataatacgatagatacttctctatattaactttaggtaatgagttgccaatagtatatatattctctgtctctctctatatatatgtatagaatacattattaaaatgtgtttttaccacttctttttctgcaacagaacatgttaggacaaggcaatttctcagggatcaaaggtacatcatggcaaactcattcctgcactttggtctcacggtctttcaaaaggtgtgttcctatcaagcctcaactctttaaaattatcttggctttactactgaaatttaaatcaagttactttttatcataaacattttataatagttacttacagttttctgttcagttttccatgggcaaggaaaacttgggatgacagagtagaaagaataggaagcaagagtgataaacagaagtctgaatgatgtaatttgttattagaataaattatcagcaggacagagttcaagcagaagctttcccatgaggcatgtaacatttctaaaaggcatcaacatcaattggtgaagaattaattcagaaagtggaggttggctagggtcatgtaatcagagagtgagtgcagatttgagggtggaggctgcgcagctggcaaaaggctgggccagcttccc

SEQ ID NO: 43421 - DNA, 1264 bp, Homo sapiens
cccctgcccctaggtctctgtctccacacagtgatttctgttatggcgattgggcggctgcagagaccaggactcagttcccctgccctagtctgagcctagtgggtgggactcagctcagagtcagttttccagaagcaggtttcagtgcagagttttcctacacttttcctgcgctagagcagcgagcagcctggaacagacccaggcggaggacacctgtgggggagggagcgcctggaggagcttagagaccccagccgggcgtgatctcaccatggtgcgttttggctgctactttctttttcagtctttcggtgcggagaaggggaggaggcgggcagaggtctgaaaaaatcgaatgccttatggaaaggaactgcaagggttcctttggggtgatcaaagagggagacacagacacagagagacaaaggcaaggaggactgtctgggagccacgcgggcgatacagtttccgaggcacgccgcgtcccgcctagcctgttgaacaggtagacatgagcgacccaagcgtaagtgccgctgccgcgagtgcccagggtgcactcgcgcggggaccgacaggtgccactgcagggtcccctctcccgctcactgcctgccacccctgacgcctgctctctttctccattcgcagtgcggatttgcgaggcgcgccctggagctgctagagatccggaagcacagccccgaggtgtgcgaagccaccaagtaagtggtcgctgcatccccacgcgggtcggggttcttcagacaggcggtccctcttccgggacccccgcttgggctgggtctccttcctctcctgagaaaccttcggtacgctcccagttgcccagccctgggaagccagcatcgggttcccacgctggggaggagcgagaggaaaggagaggacgcccgaggggccggcccagggcccgggggacccgcggcgcccgagggaggagcacagacgggggtgggcgccgagcagcgccgcgccggctgctgagctcgcggggccgggccgtgagaacgcgcggggcgcgccggggccgctggtctcccacggccagggcgcctgggccccagagcccatcagccgcgtgcagcgctgcggcctccggcgcgccggcaggcaagcgagcgggcgcagctgggggatgcctggaccccggaggcagcagggctggaggcggtggcgggcttcagggcaacttcacccggccggctgcggcgtgggtaagaggcgcgtcctc

SEQ ID NO: 43422 - DNA, 1770 bp, Homo sapiens
attaagtataaaagcttacatacaaatgtcttgcaaaataaggaaactcatgaaattctcagaaatcaataaaagaaaataaaaccataagtatttgatgaggattattagttcaaagaaaggaaatcagtgtaagccaaggtaaacccaaggctcatttcaaataaatgatcaactaactttggtgacagattagatttaagagatcaaaaaaggaagagacagagataactccagagtttgctagacaagaagatgatatgaatgtatagttaagggcagagagtcactggggcagctgggtgtggagtttgtgaaaggaacagaaatttgcttggcttggtccatgctgagattgaagtattggccgcccgtccagagggatttcctgactcagaggaagtgatgcccatggaatcctatattgcagaagacctaacactaccaaactgaaatcttctgtttgggttcacactcagctcaactattctgtggctgtcagtgagaccaccaccaaaggctaaacctgtgggccacaacacatatccaatctcagattagtctcagcacattgcttcctctccagtttgaaaaacacatagaaaatcacttccagtttccaaagtgaaaattcataacatttatcattcaagcaattgtataatgtgctttattctcgaaaataaatcttcaggatgcatttttaaatatataattccaaacaaattattatataagggaatgtttaaaacatttcttttgaactttcagtttgaacggctgaatgttgcacttcagagaacattggcaaagcacaaaataaaagaaagcaggtaagtcaaaccactttagttgtgtgaacctcttattacaatgactaatactgctactaatggccagcagttactgaatgtgtcagccctttattgaatcattgtggtatgtcagaaactggacttagtactttagctgatactaatttcaaagtaagtgcatctatttatcacattttataaatgattaaactcaggtttatatgaagtatttagaattttatagccgtttaaggaaaagacagagctggggttcgagcctgggtttttcagagccattattttaagcatgtagttataaactgctgctttaacaagctcctgtaaggccgattcttttgtactaattggtaacttctaaaatatttaacaacaggtaagtcatggatcccaaacaatcaagacttcctgcctgaaggatgctgccaaagttttgagcagggtcccagcaggtaccccatccccaacacacatctcaacaacatgttaatactttagtatctgcatcaggaggaggtagaaggatcaagtgcttaagaggagggggactcagggttccggggggtagcagctgtttattaatccttagggaagtgtttctgtattctcctaactagtttggttgcactgcagaacatcagtttgtttatactttttttctagtattctttgaaattttcctttaaagcatttctgaagaggcttaatataaagttactttttattttttattttttttttagaaacagggtctcactctgtcatccaggctgaatgcagtggtgtgatcatagctcactgctgcccagaactcctgggctcaggccatccttctgcctcagcctcccaaaaaactgagattaagggcatggacctaaagttacttttttaaaatttatttttatttttttgagacagggtcttgctctgtcgccta

SEQ ID NO: 43423 - DNA, 853 bp, Homo sapiens
acacacgtacacgctcacacaacaaacacgccctgttcccttttgcttgtgttaaccactgagggcagatctctgaataataatacatttagtgggtccacaagagctgcatttcctctgctccagaattcatgcaaggagcacggctggggcttctccactgtcattgttatggcctcaaatgaaggccttgtcaccaggcgggggcgggaaggcactggagcgcagcagcattgagagcatccgaattccctcctctgtccctgattggttgaagaactggggagcaccgaccagccccctgcggctcgactcgccattggctgggaagaggtggcaatcagggcgggccaaggcggctgttctcgctccagctcgatgctgcctccccggcccggttgcgctgtagccgctgccgcctctgcctgggtcccttcggccgtacctctgcgtgggggctgcctccccggctcccggtgcagacaccatggtaagtgctctcagccgggtgcggcccgaacctcacccctcctcggccggcctggcagcgagggaactggccgcgcagccggagcttggctcgggggccctgggcgctcactgccggccacgggagcagcctcactccttgcccgcgcccagtcaggggaggtgggaacgccgcgagtcgtggcgggggcgatcggtgcctttgcttcccaggcgggtttgccgctccacaccgcagcttcctgagctcgggaaggggaggtgcggcggaggcgtggggtcttcccggctctggccggccccaccagtgtgggaggctgagcgccagcggaagggaaggctccgggttcgcgtccccgcgctg

SEQ ID NO: 43424 - DNA, 1134 bp, Homo sapiens
ttttctatttacaaaacattcctagtttgtagatataatcgagcaatgtatcagtatttatgaagttctacctggagctcaatgtttaggaaaaagtagtagggttttcaggtgttctgtcaccaaaacatacttaagatccattatcattagttaaatattaattaatctactgtacgagggaaaataggaaacagtccaaagtcagtttcaggtgaaaaagttaaataatgcaatcacaggcctttgtcttacattcttgttaaaattaccttaaaagattgtactagtaaattacacattagatgagagactatttctggattgactatactattttaagcattgacatttgtgagaccctcttcttgaaatgtgttaacattgaaaattatatagttgtttgcaaaggatatttctaaactggctgctttcagcagccagatcttgctggaaaatgatgtcagtgcaatactagctgaaccgaagcccagttttgagggaatgtaaactactttcaatccagctgcattattgatttaacagccaaaataagaactttagtgtttaatcaaaatgtctgttgtttacatagtgacatttttcttataaacttaaaacagcattaaatcaagttggaaactggtttgcaatctcctgccatggatttactaaactactggtgtcaaaaaaagctgccacttccaaatgaagtagctgccaagagatatttaaataaaattgaacaggcagcatttaatgggattattttaaatggattaaaatttgatacttaaatgttttgggggattttgggtttttgaatacatatttcactttttagtacttttgttggccactatcaacttatagcaaagtttcaactttcagttgttctgacttataactctctctctcaatgcccatgtttacataacaaaacaaagattcaagtggttttattaattccttttttttttttttaacctctactcattgtgaccatctgctaagcttgttatggcacagtaagagagcaagcggccttttaggtgtgtttctctgtattccagagctgctttatccaataggacagccactagtgcatgaggctactcagcatttaaaatgaga

SEQ ID NO: 43425 - DNA, 498 bp, Homo sapiens
ggagaaactggttattttaccaaggcttttactggaatggtgtgctttcctttaaggaatcaaacttggcttatgaaaccaataatgtccttggaaaaactgacctcatattttgtgtacagagtccctgtacagggtttctgacctgtggtaagtaaagaatgtcactttctgacaggcccagaagctccaagtttatcttggaacctcgagtggcgaggagattcacccaactcataggtacttgatggcacaaatctacggctgggctcggcttttaaaaagtcttatctgacattccttctatggaacaaagttccaccaaaggcaatttaaaagcctatgtaaaaaataactattcttggtgcactgtatacaaataatttggcaaagtaaaataaagcaaactagtcctaacatgatttgtctttagcaaaaatgggaaattttatgtcctaattaatcctttagttaggattagagaagagagaaaaatta

SEQ ID NO: 43426 - DNA, 1286 bp, Homo sapiens
tacaatgtgccataagaaaaaaataacaccaaatttggctacagcatctgtttggaacctattagcaggaatgaaggcaatagttagaataatgaaaacttataattatctggaagacagataccaacatctagattctattagcttcttcttatctcccacactctcccttatttgcaagacatttaagcaaaatttgatgcctaagaagtctttgacccattgtgcaattaatcttgtatttgcacatgtagtttcatttacctagaatattccccagaccttgatctggatgacacctaatggatcttcaagattcaatttaaaggaagaggagggaatatatagttgttaaaaatgcatttaggagccagatttcctgtgtgtggccttgtcctgtgtcagcttagctaaattagaactgcatttcccagcattcccatccttgtatatatgtgagtttcactgtcgtgcaggagctgtggtagctcacccacactgcaatccatctgctgactcaacttgctagtatcgggcagcagccaggaccacagctcctccagctcctttgtgaccttttccttcagcttcttcaaatactgggttaggtaagagtgcgacctggtaaagatgacagctatcctgcaggtcattcacaccatcaagattggaggtagtgaaaaagagacctacattttgagcttgtatttgtttccccgacttcatatccattttcccttcctgctggccctgcttacttcagccccagcacaaagaacaggcgaaagacttacaaagactgcttaaccagctcctgcaacgaagtggggcttaatccctagaaaaaaagccctttattctgtcattcatggtgattctgtttctccagttaggttctaattgttacagccacttgatggtatgacttagcaaatttttttttcatttccctctgacttaagtttcctctcttgtaaaatctgtataacctacctcaaagtgttcttttaatgattacattaattgtttttcttaaaatttttagacacctgcctggaatatagtgagtgttaggtaagtacttattaaataaatgattcattctggccaccaaagcagaagtaatctatttaacttaacgactgtatcactttctaattctcttatcttgccgggcaattttgttctgcattccatatggttcttcatttgcatgccttccattcctttacaaacatgatgaggactttcatattttagatattataaattttgaaactgaacaa

SEQ ID NO: 43427 - DNA, 1051 bp, Homo sapiens
tgagtagctgggattataggcgtgtgacaccacaccgggctaatttttgtatttttagtagagatggggtttcaccatattggtcaggctggtcttgaactcctgacctcgtgatccacctgcctcggcctcccaaagtgctaggattgcaggcgtgagccaccgtgctcagcctcatttgtactttttaaaaagcccatacctagctggtatgttcagtcttttgaaaacaaaaggcttttgggaacctgttgatgagtttcttatttcagttctccagtttcttgggcagttactggttcagtttgtgggaggtttctgtttgtcactcagctgcagccacaccattagtgggacagcttcagtttaaaacaactccatggtttgccataaatattgaaagtattcctattattggtcaagagatggggaaggactccactaatgcttaacttgtaggcccattagcttgccaaattatgtgtccacacagtacatgatttcatgggtcaaggtgacttggacagggtttcttcaaatattctccctgcagttttaagtttcgttttctcaactctgatctcttatctctgtgtactagaacatcagggagacatttacctgactgtcaattatttagaacaaaaatattgatttctcatcatttccataactttgggcactattctagtagaaggttattagttgtgtggtaaatgcattttctaaaaaaatagatcaaaataaaacaaaaataactcaaagatagcaaaataaacaatagaacattgaaaaggcacaattcctgggtgataatataacataaatgattgtcaattttttctcatgtagattttacacactgtagtaaaatagtatttcccaaaattcatgtccatccagaactttaaattatgaccttgtttggaaataggatctttatagttatagttatttaaggataccaaggtcctgcaaagagtaaaacagtatttcccaaaatccatgtccatctagaatctcagaatgtgactttctttggaaataattt

SEQ ID NO: 43428 - DNA, 646 bp, Homo sapiens
gtgacccattattgtgccactgtactccagactgtgtgacagagagagatgtgatgctgtctcaaaactaacacaaaaacaaaaacaaaagaatgatctcaaaatgtatcgcgtgatgtcctagcaatgtggagagtccacttgacattcatggttatgattttaaactgaatctagtaaatttggttttgagtttttgtttatttttttttctccagccacattcagttgccagagagcaggcaccaaatcactggagagtgcaatttatccaggatagaattttggctctagaagtgtgaccaagtgagagagaacaagagaactgagagtaaatggcaaggagtgactgaaatcactaatcattaatcgccatgtgcaacaaggtgagagtggggcaagcacactcaaggggtgaaggacagagaaacgttagttagttcagtgcatcagagatcccagaaagattgctgaggtcaggatggtaaaacaagtaagctgtaaacagaaagatggtgggcagaaaacggtatgcagggagttaaaattataaagagtgacagttatttgttgtagaaaagtccaggatggagacatccagtagaaatatagttcgagacacatatataattttggattttcctgt

SEQ ID NO: 43429 - DNA, 1454 bp, Homo sapiens
taccagttcattgataaatttctttgattttttaaacgtcacctaaatttgagagtcaccgtgcactttggcaactttaaaggttttaagaagctttgaaggatctatattggcttgtgtacagccagcctttgattacagaaactttcctttattacccctaataaatcaatggcagaaattctgtttcagaccacttactaaagtgctgagttaaaactgcagcatattaataaaacttcttagggaatttaggcacatcataattctcaatctgttgatgagaatagatattaaggcacaatctattgattgagaattatgatgtgcctaaatatcaattgagattagtgtccaactcactgacattctaggtagtcttatattagaatgaagggattttctctttcccagggctgcttgtgatattcctgaaaactagtttatttttattttagtgggactgtagattatctacttatgtaatttccttctttgtgttggctgccagaaaacttggggccaaatttggacccatgtctaacaactctcgtgattcttacagatcatgttgtaatcatctcattcatggcttaataatattttactacatgcatttttcttttgccccattctccctatcttcctgtttttagctgcattttttcatgtccattgaatgtatattttaaattttttaaagtttttttttcttttggagctaataataatattttaacaaactgtcttgtaagcattttgtttaatgaaagaagttttgaaacgtaagggaacgatcattgcactgttgaagtcatgagacttttaaatggctttgttccaatttcacctctaattagctgatgcactcaggcaatattttgaaattctctggacttccgtttcccatctgtgaagtgagtcagaaatagacagccttggttaaagattacagaccaagtcattttggcaggcgatttaatgcaacttctgccagctgtagaaaaagagtagaaagagatggggctagcttcagtcagacatgaggaagaaacagggctgggctaagatatgtgggcaattagagttagctaacaatttggttgccattcaaatacatattatcttacagatttgtttgtttggtagaagaagaaaaatttttatttaattagaattctttttaaaaacagacattcctagtatctgaagtgaaatgaatagatagaaaaaattcaaaaatggcatctatattattatttctggtttaaacatttttttctgaaaccagcataaaaaagggttgaaaaattacatgttgaaaataacttgttcccattaaatggaaatatttttgcgtgcttttgtttaagaattttagccaactgtgttgcacatgcttatgagaagaatgttctactgcagtaggtcagagctaatgaggagttttcctc

SEQ ID NO: 43430 - DNA, 532 bp, Homo sapiens
tgttttcttgggattgaataaatgtaatttttttaacttggcctctgttgattcattggatgtttgttactttgaatataaaagcagaacttggcaagtcatacaactcaatttggcagatcactcactcttagcaaatgaactgtgcccaacataaatccactctaaagtttacagaggttcagttctgtaccaatggaaatgagaagttagctaagagtacaagaagcatgctgattggctgatgcagggtaagcaggctacataaaaggcagctgtagaacatctgggaaggtcaatgatagcatctgcctagagtcaaacctccgtgcttctcagacagtgccttttcaccatgagtgggtgcccatttttaggaaacaactttgggtgagtatttacctttattctaagtgggttttggcttttagaagtatcaggtgtgagcattttaatttctgaatttaaggagcattgaaaactgtcacctttattcctttgtctaacaatctactctaaagaaaatttgcaa

SEQ ID NO: 43431 - DNA, 2627 bp, Homo sapiens
aacgaggaaagctacaatttttaaactacaaaatgatgaaagatcatggaatcacctctgttagaaatgtttgagaatattttgctgccagatgaattctcataggactgatataaggatttcaatagtcttctttatgttactcctctgctaataggtgaagtaggactttagctttgttcttaactccaaggggactttctgcctcttggaatttcactaggaattcacaagtgaagatgttacgtttctcacttcggaacactaaaaaactattttcaagatcattgaaatttatgctggattgacataatcctatacaaatctagtaataaagacaaatgtaaattgtgtccaaaaatgtatgtttatcctttccagatttctataatgatttctgggcagtgggtttttttttagcctatgtgttcatgacttcagaagtttagaaggtccctgaactccaaaattatgcacaaattttcatgaatattatcttaaagaggtctgtgaccccaaaatattagtaacatttactttaagcttttcagtaccactatactgacctcttaatgactggagcccaatcactgttgcctgccagtgccccacatctagatgtgtttccctgccttaccaattctttgtgttctttcctcaaatggatgctttccaatgtgattgagtaaattaataaactctggtaaagaaattaaaagttaaaaaactggcttaatgtgtcagttctcctgtttttatgtttatacttttatgggtggcttataccgaggcaatatcaataggagaagaatcatggtatggtagcataaattaggaatttaaaaattgtttagtatctcagttctactgttataaattgtgtgactctggtcaagttgcttagatctcaggacctccatttccccatacgtaaaatggagagaattactgatgctctcacttacagagttcctaggaagataaataagataatgtgcatcaagcatttagcccgaggtatagcacataataaacatgcaacaaatggtagctatcattattttataaaaacacttttcttctattctttagttataacatgtaggcagtggttacatagggttaaaaaagatatacataaactgatcaataaatgtttgattgttctttgctcaaatataaaaattaggtcccccaaagtctttttaaacataacttagagttataattggattctcttaattagtatggaaacattgcctttatccatatgattgaaccaaataggatgcactgaagatctctaagattattgacttcctgtgtcatctaattattacattgtctatttaatttattcataaaaataaaaataatcacccaatatttactttatgcctgacactgtgctaggtaatgaagaaaaatggatgagtatgagtaagtccttagtttctagtgacaaagaatactatgggaaggacaaatcaacggggagaaccatttatatttgctatgaatcatctagcaacacaaaggagtcaaaatgtctatccatgtctaccatactgctgtaagtcttaaggttttgaatcataggtttccaattgtaggtgggtaactgatcattttgcaaatgaatcaactgaagttaaagaaaatggttttgccccaattgacacagcccgtcacttcagatagattgattccaactatgcttcttccaacatgtcattactgtatcacttttctttaatgccaatgttactgtttgacagcccgtagtaaaaggggagaacaaacttaatccttcgacagaaaagctttggcagtattcaggtttgaacaaataaaccttggactcatggaaattctgaaagatgatctactggataatgtgaactcaattgccacaaagttcccccgggaattagctgttacagtaatatgaagctttgccattttcctttgaccacaaacatctggccgctttcccatatgtgctaagtctatgagttgctaggattttcacaaataaaacaaacagacaaaatgctgcattttaagtaacttagctttgtattttcaagttcttaaaatcctacagtctttcatttaggttaggaaatattaatttctcagtgtgtagatgaagttgattatcacttctgcttccccacatacttccagcttccatagaggaagctagaattaggttatgtgctatatcctcaaagacctaaaaatgcatttgttgagaggaattagtgtaataataatgaatatgaagcattaggtaacatgtctagcatattaaaacatttaataaaaggaggctattacaactttaacactaacatttatttctggcacacaatgggactatatttacatttattgattttaaggtaacattttaatttctctttcaacatgttaaacatatctttcatataataatggccaaaaaggctcccataactttccaactgacaatgatttccttattacagcttatgaactctggtttaagcaaatcctctgggagttggattctgttcgagagatctttcagaatggccatgtaagttcttatgtcacaatattggtttcatgtatatttttgg

SEQ ID NO: 43432 - DNA, 881 bp, Homo sapiens
caaatgcatctatatcacatagaaagtcagcgaatacaaactagacaagcaggacatagttcttttctggcattccaggataataagaatatttatcaattaaaaggtcaatatctgtcttcctgaaataactccaaacctgagtcaacacacattcttttcggattggttctgactggcgtaagaagagaaatacagcattttgttttttattttgtttatctaatcacagggaaggataaacaaagggcaaaagtgagagaaaaagttagatgtccttgaatttttttttttagtggttgctactgcatttcatgtttcatttttgttagatcatatacattagaaaagaatgatacattttagagaagaaatatgtacatacatagtatcagaaataattttcttgtattgattcatttaatatggttgtgcttatattcaatcagaaggtcaactcctttgctctaaggttcttacactgctaacaagaaatggcttttttcctgttgcaggtcatgagcagcacacagtgtcctttctaggcacataggatcatcgatcactgtgtggacgcaggctaatcagaattgcacctgaaatcacttgtgcaattagtgatgcaagagtgatcacaggaatcaagactgggagccaagagaaagaacaagaggtgcacaaagaagcagttcggatgggagaccaggaaagctgaggggaaaactgggaaacagattctggaaaactcacagtttgtttgatacccagggttaagagatgggactttgataggagtggtgcttatgaattaagggaggaagaaagaggtgagatcctaatgttggtaaaggtacagagacaaagggagccaaccaagtggt

SEQ ID NO: 43433 - DNA, 3674 bp, Homo sapiens
ttgaagcctcaatgttctcttttttgggtatccatctcatgaagcaaattcttacaggcagcaattgctttgaaaattttttcagtatttcttaacccgaggtttttaaaatgtactaagagtcttcataattcgatcctcctccacttccaactttccatctttcaacctgtttctttgtatttctcctgagaaaagttacattttctagacattcatcagggtatggcctctttacaggaccagtatgagtcactacataaattatacacatatatatttataaattatctaaaatctaaataaatgttaaaaatatatttataagtctagccctttgagctttgtcctgaaatattatttttaggagcctgacagtgtgtttatttatttagccaatgaatacgttaccaataaaggtgaaactgacttttcccctaaggggtttcgtttaccaggaaaacgaacgtaagttgaggataggggtagaatacaggccagaattttgttcttgaaagagtaagaggacttctggttttgaaagctagaactgaactcaagaataataaagtggagataacagtacacatctcggtttggacaaaacgtaagagtggacagaatcagggaaggctggccttcctaaacattggagctttccaggagagtcgggggaaaagagcacagctatgaaatcctgtgagaaattccaacaaacaccaggaaaaaagatacacttccttgagcaatattactcaactcagacttatgtttgattcagaatgaaagaattttcttttccaataaattaaatcatgataatggcatctttcatgaatttaaaaatgtgttaaatagtatcagctatctagaacatagtgaggcgaacactaaatcggcatcccttgcagtttccttggtttcaggaaaatcattatttgtgctcagctaactggtcccttccagagttttcatgctagactcaaatctaagtatttattataaatattataaaatataaattatattatatttcgtataataatatgaaaaggaaattaaatgcttctcttttcttcaactcagtctccgccaaggcaggaagaacttttaaagtggtgcgttagtttaaggagaatcataaaccatcaggattctttaatctggctaaagacaggctctttgtttctaacttctgatcactagcgccctcctcgggaaaaaaaaacacgacaggtttcttccaccaacaggctgctccctgtttctggttctcataaaagagaaatagaagagctttggaagccagtggcaacgatagaggggattgctaaaagggggtgcttcttcccaccaaggacactttggacgtatctatggatttatttgggtgcgtcccaaaaatccatagcgacaaatctcttctggaaaatcaagtcttttggttagcaaaggcatgggggagtgacaccatggcacaaggagaggggagagagaagctggcttttgcacccgcagctcagggccccagacgcatcgcagagccacgggtgcccacgagcagggtcagctctcgggggccctcttccgcagcccagacccgggacaggaagtgagggagcagggacagatcccggggaggcgcgcgctcggtacccggaaggcggcggcttcacgctcgcggctccgcggccaggtcggggtgaagggggcgcgggagtccgcatcgccgccgccccggcacagcagccacagcagccacggcagccacggcagcgcccgcacgtccattgcggcgcccggctcctctgccgcccgcgcggcctgttttctctttcggttcctcggctcctcccagcctgggctcgaggggcggaaggagctgggttgagtgcacgatgctgagattgacccttttttaggtccccggtgttctgtgactgaaaatccggtcagctggaggctacggacctccttgctgaggctagtttttttgtttttgtttttgttttggaagagtcaggcacttgaccatgtgctttcgaggtttcacttccatccattagaaaaaaagaagcctgagagtcattcttttgtgtgtgttgagatcaggtctcactgcagcctcgaccttcaggttcaagtgcctcctgcctcagcctccggagtacctgggactacaggcgcgtgccaccaccccaggctatttttgtatttttagtagagataggatcttgccatattgcccaggccggtctcgaactcctggactctagtgatccacccgccttggcctcccaaaatgctcacaggtgtgagccacctggcctgccctgtgagccaccggaagctgcctttttccttcttgccacaatccctaagttcaagacctagttctgaagtgatgtgggccaatacatagagtcatccattcagcagatgtttataaatacgtaacaaaattgtacagatgtgaaaagcatacacagtttttggatctattatggcagtttcaaaactcttgaagcctgtttctccgtttgcaaaggaagatagagccaagtacataatttgcagggttccgtgtaaactgaaaatgaagttcccttgttcataaattgtgaagaatttcaagacggcaacagcagagcattaacccaagccatgggccttctaagcacccacttctgcacaggtcacacactcatgaacctggctctaccgagcctttctattatcatctattctgaacaaggcttccatgtctgtgaaattcatatcattacccttgtagatttttagaactaacatcagatttatgtctttagtttttacctaggtgcagtgagttacaatattctccaatgcaaacttcgtaataaaaataaaaataatgttccgagtattaagaggaaagacacaagagttttttatgtacgttcatgataagatatattgctcttggcaagtgtggtgataaagattttatttaaatcataagttcacagaacgatgttcatgtttacctcagcagttcttttgtacttagcccttttttgtgactcatacaagcacatacttttctttttaaactgaactttgctttcagatcatagtccctgtttattgacaacctacggagtcaggaaatttaaatataggcagtcatctttactttaggataattggtattgtaaaaaagccccttgaactaaactcatttcaggagctcacatcaagtatttattgagtacctgctaagtgtcaggcattcttctaggtaatgaggatatatcaagtaagtggataagtgactaaagggatgaaaatccccatccctatgggactgatatttcaattgatttacatcaacaaatattttattgagtacttcctaagtgtcaggcattgttctaggtcatcaggacacatcatggatggaagtgcataagtgactgaagagatgaaaagccccaccctgttgaagctggtatttcagtgagggggagagacgcaataaaattactacaggttgaggatcccttatccacaatgcctgggtctggaagtgtttcagatttcagattttttccccccagattttggaatatttgcatatacataatgagatctcttggggatgagacccaagtctaaacacaaaattcatttgt

SEQ ID NO: 43434 - DNA, 2588 bp, Homo sapiens
ctcaggaaaaaaaaatgtttgtcaaggttttgtttggggatttaacattgttatacagtgcaggaaaatcatgagcggaagtggagtataatggaaatcccataaaccttagagttagtgaaccttggtttgattccctcctctgtccattgttagtcatgtaaactttaattcttctgttgcaggatttgctgaataattctgagcttcagttttctcttatgtaaaatgcagacaaaaatatcttgcagacatattttgagtggattgaaataatgtctatgaagtatctagcagaatgctgttatataatagggactcaataaataatgtttttatttttattaatgaaatatttctatatactcagttaatgctaatgtaggttacatcttgttgaacctattaactctcagacaacttcaaatacttatagcacagaaacagaagggcaaaaaagaaatttcacttattgtaaacttgggaagttggagtacagtgggattgtcctggaagaggaaaaactgaatgaacacttctgaaaaaagggtttttgaaaaggggtatggaatcacctagggcaagtttacttttctcaatttctgtcttcataatgaacatattaaataaaagtattgtttgaacatgaagatgtttcaggttaccatgatataagtgctctttatctttggtctagactatacttgctaatttctcatgagtacctgtgtgctcagaaaaatcttccttaaaatttcacaaacttgcaaaacaggcttttagtaagacatcatcagcttcttggcccttacaaggaaatggaaggaaacttattatattctttcctagacctatttacaaatcattcttgggtcacagaaatgtcacagccatgagttcatcattttaaggaaattccctttgcttgaacataacatatgttagtcccacagtgctgagcttataaattcttatgattccttatttggaattatccttctgagtcaaaaccagaccacaaaatatgtaatggtacagactaaacataagcaacatgctaccaacatccaccaagacaacaaaaacaacttatggtagagtagcttaggagaagataaacattctcaaaccaaacaaggcagaaaccgtacacctttcttactctttattcttaacttgggactaaattccatgtccagttgataaatataaatattttatcttttattgtagcaattttatctgtactgtaaaatcatcttcatttgtaagactctgttatgataaaaagtgctttttctgtcttcccatctgctccataaagaaagcagatattcaagggagcaacattataaaaagtgcctgtgtgtggtctgggccctgcttaatgtagaatcaaaggatgctgtgggacttcagttcattccactacttccagacagtttcctctaaaccctcttggacagactagtttataaagtgtccaggtcaggcacttggatagttatcctacctaactgccaggagtttcttctcaggttcaaggttcccttaaatacatctaacaattaaatccttattctgatattagaccttaaatggagaatctctggatagttaaaagcttgtgatgaataattgttaacactcttccatcattgaactgttaataacaaatcagtgaccttgttgtataaccagacactttaaatatttgcagaagcttcaagaatgaaaaggtaaataaaaatagagaggcaaagtcccaggtttgtgtgtgtgagatagcgaggcagtagacgtatgggagaaagtaatagtgcagtatctaagtgtaggaataatagtaaaactttaaaggattttttaaaatcatggaactttatgttgaatagaaacaaatcttaatatttcagaagcaagataactaatatcttcaagcaaattagatggacacagataaaagaatagaaagggagcaaattcatttttaagaacataaatttaggtttcttttaaatgatttgcaggtaggaaactaagtttaaagtttactgtttaaaacatggatgtgctctcattagcagaacacaagtgcctctaggctgtttatgaagttgtggtgagaactggccaggtaagcaaaggtgatggaggggcccaacttgcccctttgaagtcttacagattgagaagcattaacagccaaacttcaaagagcaatgcttcatcatttttgtgatccaatcactgtattcagctgcaatttataggctggtgatattaaattgggaatggtttagttgctcccaattaagctttggaaatgaaattaaaagttcaaagtactcagctgcctgtaaagtgagttggcaaagttgagagaaagctgtggtagtttgctttgaagtttgttttgtttgtcaatgcatcttagagggttgaattaaatgggaaacttgcttggttctaatttttcttttagggcaatacagtctgggtcaactcacagtttatattggactaaattattttcaaatagcaggatggaattatattaacttaaaactccctaaacattcacacac

SEQ ID NO: 43435 - DNA, 1560 bp, Homo sapiens
cattacggaagtaaaaaaacactttcagtgaggtatatttaattgggctaagtcattttcctggaccaagtaattattacttattatttacatgtatttattctcatctatggtctttgttatatttatcatgaatttcttcttcaactgaaattctgttttcacaagattaagtctcacagccttttagaaagatttgttcaccacataatcaatagtaattttacaagcaaaggaaaaatttgagtatacagttaagactttatagggaatgaattgaatcagttcacaaattaaataaaagctggctttctcctggatttcataaagctgttgcatatataccaataataaacaaaaaaatgaagaattaaaagtcttataatgtagatttatcattttctgttagagataaaattagcaggcacaaaatcagtgttctatatcagcatgataggatgctaacaaaataaagtccaaatctcaatgactaaacaaacaaaagcttgcatcaaatcatatgtggatagaccaactcggaagaggaagtctcctatctggatgattcagagacacaaagttcctcattttatgacagtgctctcccaaaacacagttctagtatgactacagctgggaaaaagagaatattgagagtacagtactcacattttcaatgtttaggtccataaatgatgctcattgcttttgctcaaatttcacagcctatatctagtaacataacatagtcttgtctaattgagaaaggacatggttagttaaatctttctctgttgccagaagtaatgaacaaacagataacaatgagcattagaaaccgctgcagtactcaaaatgtgcttttaattatatttattcagtaaaagcacactgagtgtttatatgtaccaggtaggtattgaggatgctgtggcgatcaaaatagacattttaaaaatcctcaaaaaacttactgttcagaagtagatctacacacgccagacttccaacaaacaatgtctctcagtcagtccattggcctggttcatgatccaagcaaaatggctttgtgcttgatctgggtgcaaaaatactccaattttaccttgaactacaaagtttctggactttgtacattcaaatgtaatttccggcctaagcaaagtaacagaattgcaggtgtttagcagctgggtgcccaagtgtgcactgtttcagcttgactttttattatacaagtgcatgcacaatatttgctacttctgtacaagcgggcagggttcaccaggtgttatattaaattattgattcctagtctaggtatgcagcactgggtttactttcctaaagtccgcacgtcattaagcctcacaagaggaaagtatgttgaaatcaaatttagaggcatatggcttgccacaggcttcagtattaccctctctgcctggtcccattgcgacactggattggttagttacagagaagaaagtaatgttcgtgaaatccaggtttcatacctaagttttattgttgtttatttgtttattttaggcaagaaac

SEQ ID NO: 43436 - DNA, 5762 bp, Homo sapiens
tctgccaaatatttgtaaaagttggtcttcagatttttttccttttcataattatctcctaagaaaacaaatacaggtattagtttgtttttctaaagaatgcagattttgagcacatcaccaaccaaaatcattatttttaaatgcaaatgtcattaatattatacgttttgctacaaaaaacagtaatatttttctttgttagttgttcattcttttaagatattcagtccaaagatagtctattactgtaatgtaatctgagggtggtctttctaagatgaatgtggtaacactgtgatgtttattctgtgggaaatctatttcaatgtctaattagaagcttttaaaagtttgactccttattcctttgtagagatactctcaggaggggagttggttttgtctatatagatgttatcctacacttgtattttagtttatgtaaagttccaaaaatgtacactgcttttctcacactttttgcatgcttaaaaagttaataaatttggaaaactgcaaagggcttcaattttgaaagtgttaaatgaatatctgaaagatctgttcagcttccgatgcttttgaatgcaggctagcctctggccaaatctttgagcaccaggcgtacattttcaggcataaagccttggctagaagggaggtttttaggctcaaatccagaaatcagctgtcaaaaaactagatctcagtttagaacctgattcactgcccctgcttcttacagatcaacatgataatcaacttcaaatttgctaacaagggctctattcatggatatttcagctagtcttgcagatcttcatcttcctgttcctaagtgggagggaagggaagtgttgctcgtaagttattcatcaagttattcatcaagatcaaatcttataaatatgtaacagctttcagcatctggacaggactcaactgcccaggcacttgaacactgatttcaaatattgccaaaaggaaaccacgtctgttggcatagtgaaataccagggctgggcaagtctgaacatgacctgctgagattaaagctcatgatccaaaaaagctgcaactcttagagcaggaaagggcaggaatcgggtttccttctgacaaggtttagaagagcaagtctggtgcaatctgcccttgtgaatggctcaaattaaccgaacattattcctttcatataaattctctaggctgtcactgcattctccaaagcagtcgatttcactgtttctgacagactaaaacagatattttgagtgcattgtaattaaacagttatttctatacgttttcatttgtgtctgctatggatgctttccaattccaatgttactaaaaaaattaggtaattttatagaaaactcagttaagattatttccaatttcttggccatgcagaattaggtttaattaacatcactttcactcttagagaaagatacacccatatgggcaaaagtgattatttcaacagcaaatttatatagttaaaaattattatggtgtgggttcttttaggttcttgttttcttgctatgaatcctgccttgaaaactatgaattctattttatgttgggtcgttgccatttttcatagttcttagaattgtctaggcttagaaaatgcaaagtcatataatactgacccatgggagatactgtagacaaacatttttgtagaggatcccctttttctatccctaacctggttttgcagctatgataatttcttttgagtcccaaaatcaacatattccaagtattaggtttgagtaagcagtgatttttgtaaaatgcaatgaaggacttcatcaaaatgatatttttgaagataatatataactggaattttcagaagtatccccctttcaattttccacacccactgggttataactaagttcctccttttgtatatattattattcaatatataaatatgctcaaatgataagaaaatgtattgaatatatcactgatgaattttaaactctaccctttagaagctgtggcagaagaatctgaaacattagctgttaagaaaattaaatgaggttctaatctgaagagggagcttacctctggattttcttccaaaaacaaaagccttgccaagaagttgccaagttggcctatatagatcttctaagtccaactgccatctctctggttcaagatatcgaataaggtcttccaaggtactaaaggcagttatagcattattaagcaggtccagtggcaaagctgaagggggtagcactgaaggactcacagcttctgtgaattgctgaaagtaaaatgaatcctgtgttaactgttttaaaaacgacaatgtattccttctggacatatgcaagaaattataaagactgaggctggaaatatgtgtgaagggaaattgtattgaatccaattagaaataactactctgcaaagacttcatgaagatgaactctgatagatttcctgtaaaatcaatgagaaagacattaattttcattaccaccaaccgtgagggatatggatatcttttggtcatataaaagaattaaaaatatcttcatggttcaattacaaacttagaatgaaaactataatacagtttaccaaattttccttttcttttccacttttcattttccttaatctgaaaaattacctggtagttatgcaaattagtgtcacataaattaaaaatggaataagaaataattaacccaaaagatctagaacaaaatagttagaaatcatttgacattaaagaacttattaatcaagatagaaaatatctaaatcataaaagatcagcttaataaattgcctacaatatatttttaatataaaatgcctaataaacaagattaagagatcggagggacactggagaacacactgacaaactatgtgactgtcataagattagtatccagaatatacaaaaataaagacaaatgcaatggaagaaaaatgggcatattacagataaaaagcttgaatggtcaataaacatatgaaaatatgctgaacttcattatcagagaaatccaaagagagatattatttcacatacgaaaaaaggatactttttcacacagatgagatgggcaagaattttaaaaaggattactgaggatgtgattaaattggaactcctctgctctgcctgcagaagttagtgtacgtaggcacaacactttagctgatgtaactgataagcactgaatattctttcacttatgcacatggaaatatgttcaatgattagaaagactggaagcaatctaaatgcccacatataggaaaacactaacacatcggctcttccttttcattctcattacttccatcctgggctccatactaaaaacatgtactataaatagcagcttctaaccttatctccttacctttaatcatttttctctccttttgttctatgctgcataatcctgggttaatctactaaataagatattactgatcctatgatgaatttggacaaatgcctatgtgatttctcatctggaggataaaatccaaattccttacacagcattcagagccctcaaaaactgacctctgctcaccttccactctaatctgctactcatcagagacatgcatattttgttccaatcagtctagtctcttcactgactactgcacatataatatcatctcagactttgtaacttatgctaaatctgtccccatacctgacatgcaaaaactctccccccgttgatccacatcataaatctttaccattacaatgaccttttcaaaaatccaattcatccatgaaacctggcacaacagggtcatcactgtcccacagccctctgtgggctgctctgtgagcacttggcttgaagagcagaagctgcccagtaaactaggaaaaggagcacctttcctctggacaggcacaaccctcgtggggctcctggctttgtgggtgtcccgctgcccacaggggaacattcttacagggtataatcggcagaaatgaacgtggcagccttgggccaacaatgatttcatcctttttttttttttttttttaacaaaagtttattgagtaactacagtgttccagggcctgtgtgtgcattatgagaaaagcacagtggaatgacaatgtctggcctccttccttgcctggattactcacatgtactttccaagtctccactcagctgttactcctttcatctttttgttttttaaataagttttattttgtatatctgaggtttatgacatgatgttacagaataaacaaagatacgcaaagatacatggaaaatgtgtaagtacatatatatacagtacaatggttactattaaagacttaatttcaataatgtcaaggatctggctaaaatattaggactaagatattttctaattattttatgatatttttgctctacccattagtctgttaaactttgagagtttattaccctaatatgtttttattacccagtgttttctataattgtccaaggaacacaaaattgctttgacagaactatgactgaaaactctattatagatataaacattgatctaaaaacggttttaattttaatttagctaattaagctactattgattaaatttatggtgtaaaaagttaacgcaaatttttgcatatttcaaaaatataagcctatatatgtatacaaatgttttataaagtaaaaattaaggggtcaataatagtcaaagaatcagtattattacaaatggaaagtttcaaaatctgtacagataaaataagtggttgctagcaagttaatacaaaaagtatacattatttattaaattgtcagggtgcagatgtatattttaagcataaaatataattgctatgtagggtaatttcaattagactgtaatccaagaatgatttggcttattttgcttccagtctgttggagactctctgaataaagcatttcttttgaagcaatacaaagttctaactgaaattaatattgctgagatgcagtccaaaatattaacacaaaagaaggcaaaacaagataagcctgtaataatgggcaaacaaaagatgcacaccttaggtccagtgaagtatctgcaatctgcatacccatcccttcaaatgtgaaaggttgggagaaaagcatcttctgttactgtatgtatagatcagttggtgttacaaatctctaagcttctaaatatttaaattaaaatttgataaatttagaaagacaactctttccccaccacaccccacacacagtggtccccacccagaaaacaggaaagaagaatgaacataagttcccaggattcaaagaatcaatccctggacagaacaggggaagtggtgcttctatttaagggccttctcatgactgtccctccacccactggttcaagaaagagccgagttgttcagtttcaaagttctgcttttctaagttgtttaaagggactctcagagagaaaggggggagcaatgaaaaaaagaagttacagaaaaaaaaatgtctttgaatttttaagttttacttttctctctaacaaagtaacactgttcattacagactaatagcattttctcccataattagtatctagaaaattctaacaatacttttgatatttaaaaacacttatgattgggctgttaaactggttagaatatgcaaaatacgccttgacttggattttcacatttcctgtttatgtcttttatt

SEQ ID NO: 43437 - DNA, 521 bp, Homo sapiens
aacaactgctacggactcacttttcccgtcatcatgaaactggagaaccattactatctaaccagatttacaaactaaaacactgttactctcaacaccttctcacctaaagcactggtggtctacaaactaaagaaaaaaattcaccctagtgcaagcactttagatttgaaggtctccacagaagtcaactccaccacagagcaggctcattgttggctggtgagtcagagtcaatacacagtttcccacttcctaggtcaaactgcgggttataagtaataatcaatgtggaaaactagaattccatgggatgactaaataacatagtactaagaatgctttccacaatggcatctgtgggaagccaaaattaaggtttttttttttttttttttttactaaaatttgaaaaacaattcctctgaataaacaatgtgacaggccttaaaagctaaaataacgtctatcagtggcaagtgtttgacaacaaagtatcgcaggaatttttttcctaatct

SEQ ID NO: 43438 - DNA, 1087 bp, Homo sapiens
ttcaagaccagcctggccaatatggtgaaaccctgtctctactaaaaaaacaaaaattagctgggagtggtggtgcacgcctgtaatcccagctactcgggaggctgaggcaggagggtcgcttgaaccaggaaggccggaggttgcagtgagccaagatcatgccattgcactccagcctgggtgagtgaaactctgtctcaaaaaaataaataaaaataaaaataaaagaatttaggtttaaaatgtataaatctaggtttatacataaaattcagcctcacctgctttcccttatcatcttattattggttttaatttccctgcccagtaatcccataactgtattttaacttctttttcctgctacctattgttggaggtaggggctgaggggatggagggtagccagccaagtgtggaatgcagtaaaatcattctgaatagacaaaactgacaaaaaattgtgaaagcaaaaggcgtgacagcctcagaatcctgaccttccagaacttgaaactgataaacatgaattcttttgtattaggggtaaaatggcaggtatttcctgttattaaaacttttttggcttaccttccgaaggctaatgtagagtttctgaaaagataacagtgacaataaaaagattgttaagagtgcctccaagctacaggacaaagagtattatatttctactgggaaggaaacttaaattatagtcaaagatccatgaaggcttaagtcacccaggattgcattcacgtcttcggttattgcatgtgctttggaacacttgacaatcacagagctggcctgtgggggaggtgagtcaacagtgattctctttcataactatccaagaaaaacaacccacagtaatcttcaagagcatcacaccttaactgtttattagagctgggacaactaaggccaagacaatagacaaatgcaaggctgttaatattagaaactaagtttactggcccctactccctagaatgttcaagcttcatgaaactttggaccacccagacatttgctatgttaactatcctcttaaactgaagtggagatatttattcagaat

SEQ ID NO: 43439 - DNA, 2691 bp, Homo sapiens
aaaattcacaacagtaatatgctttcttctagacagaagtctaaaccaaaaaccaaagatttataagaaaaaaggaaaaacagaaaaaatatagctcctatttatagatgctaagcaactactgtctcttttcccaaagcaggggggcaaatgaatttgtgaattaaagagatcactctctctcaaagaggctactctcccttaatgtgacagtttagctcaggaagtggatgcaatgaccttgtacaaatgaaattgcaggagcgattggcagagcaattactcatttggtcaggatgctggctaaaaactcataatcttgcaaaaagcaccttgggaattttaatgaccaaagagactcagcagtttagtttcaattctctctgaaaaacatccaacattgtaccactctctccctctattataatattcactcatgggcccaatctgactcctaaatcaccaggctcattatcagaaggatttcagccctttgctgccaggagctgatcgcgtctgatccaaatcaactactggaactaagaaattagaattcatattctatcctcttcccatatttgatttggcaatagttatcatgccaacaagaggctttagccttgatatttcttcttgtaaactatgtaacatttgttatatttatgaaaaactgaatgaaagtaggttatgtcctgcctattaaaaacagcctatggaatatgcagacagaactgtgaatcctacagaaagtactagttgttagtattactcacatctggcagagaagatagagaggaaacaactttaaaaaaacaagaattttaaggtaaatgctgaaatatttctttatctaccacctagaatatggactatgttatcagaatgaggcaaaaataatagctttggtttcacagcatatggtaaacagaaatataaaaagtataacttaggaaaagcaaccaacccactttaacgtatactatatattatttcatccaagatgatttcatttatcaataaaaattataaacaagcatgctatagtgaggtttccacctttgtgatgaaaaatggccttggtattattttatttaatgagcatggcattagaaattatacaggattttaaacaacaaccccttttctgaggtaatagtgagctcaaatttgcctaggtccccgaaggaagagctactgtcttttctccagagtttatctatttatcatcaagaccacaggaacagaaagacacgtcatgatgagacagacagagcccgggactgagagttggacttgtgttctagtcttgctgccaacaacatacatgactaagataatgacttcacctcctagaaaatgacctcacttagaccagaaggagagggctaggcaacacagtatctcaatcactcccagttcatgttttcatatgtgttaagactttcttgcccttgaaaatttccagaccaaaagcagtaagaagacatcacccagtttacttaggaatgcttgaaataatttttaatgttacttcagggaaaaagaagcaggagcagagaaatctcagttgcagtgttaagaaggctggaagcagaaatgggaatctctctgctcagctagcctagtaaagcagtgttaatgagtcaacattacaaacctcaaatgacataaagaagggaggtcagcagaatggaccaaagagatcgccctctcatctgctgggattctagctcctaagaagtaaacaagataaaagactaaaaggggtaaaagcaggaacgcacacaagccctctgcccagccatctcttattcaggatctgtgtgtatgaacagctgtggttctgtaaccctctgctatggatggactagctgcaggttacacagagggttactttggcacttatttccctactcaaaagactccacatttacttttctactcaaaactctcttttaatttaaagttctcccctgacatggcctagctaatgcactttcaggggttctagactctgcagacagtagttttcatttgaaacatggaattaaactaagtaaacatcaaaatgaaggatgacaatgaaagacaggacaacaagaaaaactgaaattcaggaaataaaactgtgtggttttgtttccttgtttatttatttgttgcttagttccttatttatgtgtagataaattaatgagaggtggtatcacaaaacaactgccttagttgaggtataacagcaaaaagaggtctaagaaacgagattgtcactatcagccttttcccctcaatcctttaaactgaatccttgattcagtttagtgtcataagcacaatctgcagtgtttcttccaaaaactaaataatatttcctaggacaaaatattctacattgactatgatgtccatatactgtggagagtgtgaatgtgcagccttagggtaaaagcaaagtagcaataaaatcagaaactgcctgacttcaataagagacaggttctggtatggttgacggacattctatgcctagaaagggaaattaatttacagtttctcgatctgctagtctcaataagtgtgaatagcaagtctctacggtctacacacacactgtggatggtgtgccatagaatgcagctgcaaagcagggattttctttccatgttttttatctcacacacttgtctataa

SEQ ID NO: 43440 - DNA, 2652 bp, Homo sapiens
ttgatcttcaaggctcaagaggggatgtacagctaaaaaaaaaaaaaaaaggaaaagacgaaaaccccatatggtgccaaatgttggcagctatcttctttcttcccagacaaaactcttaggtcttgtgaaaacaacatttcttataaactgccaaaaacaacatagataattgttgtgatggctctcctgcaccgactgctgcggccgctttgactatatccacatcgagctctgggataaaattaagagccaattttaaatcttaagcctgaagggccacctttaagaatgccacctcctaggcttctaaaaaaagtcttggcatattaaggtgctttccgttacaataggagaaaatgctatttgtatttgccttccctgaaccctctgtttaaattaggtttaaggaattagcacagcattgtttctaatatagtagtaatataagcttactataggaaatttggaaaatactatgtattttagaaaggaaagtaccaacacccccaccgctgccctacagcctttatagatgaaatacttacaacattttagtgtatttcattctagttcctctacatacatagaaatatttatgggggcatacataaaaatatttaaaatcttattctcaccctgctttttcacttaacattagagtgtgagcatttctctgtggaggcagcattttgatcattgccccgtatcccctgagtaatgacagctctgtgtaattcacagcatttctcatgggaggtttattgctctactggctagccaagggaccagtgtgaaattcaccgaggtcctgtgctgctgaaatatgagaaaggtgagaaaggattatagcgcaggagagtggaagcccaaatgtccatctctgaaaacatccagttccttggtgatttcttcaagaaaagagagactatctcttttgttaagaaccaaaaagagataaatttactcaccaacggtctcctactattaagaattctttgaaagattcatgattattcttttaaatactcaaagcatttaaatatgtgtataatatagaaatgagccatttattctgaataacagagagaagttgaaaagtatttattaccttctgcctaagggggtgatctccttgattaacgtgcaaagtaatggggaaaaagtctaatgtgtacttttttttttatttctttcagagcattaaccccattctagttggtcattaaaaagtagtatgtgtgtgtgtctctctctctttctctctcgctctttctctctctctctcttgctcacacactgtctgtgctgcaatatttctttataacaaactggcctcaggaaattattaatgaagggttaagaggttacacagcagctaagcccagaagaatgtctgtgcaaagagagaactacctattcagaagggaggagaattgtttggggaggactggtagtttgaaaaggaatttcttcctagccaagaaattttctacactgtgcaaagccaaaataaaatgagtcatagcacttcacatttcctaagtgtgtattactagaatgacttttgactttctatggaaatcaaagactgcacaaatgagaaaacagaactgtttccccttcccctacgtccccttgaggacatacctgagatgatatagggtcagtcctggcagaagctgttaagaattgggtcacatatatttgtaacttacagctttaccttcaggaaaacaagcagtaagcataacaggaaataaaaatagcttcactcaaaggtacataagcaacagcatgtccaacaaccaccagcactacctatgacatttttcctaggctatatatgctatcagaaacagtcatatgttttaatcaatgattatgaaggggtctcgagtatgacaccctaaaatatgcctttctggcataaggattattttgagctgaagacaagtaagaataaacagatttgggaaaagttctccgttctccagttatctgccgaaaagtagtacataaattttcctttttgaagatgacataaatgccccctttccctccattccaggatgaggaaagtgacccttagcacagacaaacagctggcgctggaatgagactgtatatgcagacttaactaaaataaccttactaaaataacattatctgttatgattagataataatattagtttccccatgttttttggtcactttcccaaacttcattggcgctagaagctcaaatcccctttccattgtctagtcactcctccacaatttatcaccattcattaaaacggtatagaaaatcccaagtctaactgctttttaagattttcacatccttactttgaagcccttatgcacacaaaatttaaaatattaataaaattaatatgccttttctcctgttactctgtcttttgtcagtttaatttgtagtttaacttctaaacctaagaggtagaagaaaagttctttttttttcctctccactatagttcaataagcaatttgaaagcagtgttaaatcagaaaaaaaatctatttatacccacaaatacacagaacttccaaatgtttataattgttgaattgctaaatgactacaaatttatgaaataaataagaaaaaaattctagaaa

SEQ ID NO: 43441 - DNA, 2014 bp, Homo sapiens
acatttttcttcatgtaaaaattcacttattgaatctttcaatttcagagtaactaccaagccctgatctaggcgctatggatatgacagtttataacctaaacaaggagaaaggaaaatatatacttctctttcacctcactgtatttttatctccagaggtagatgcttcttacacccttctcttcattcactaaacaaataatgttaagagtacctactgcctgccaggcaaggttctagatcctgaagataaagcagtaggagaaaataaataaacctccaataacaacaactaaaatttcaggcttcatgtatcttacattccagtgacttaataaaacaacgctcgtgatcacaacagtgtttaaatttattcaatcagatttcattgtgaggcttcattctctctataatcaatgcaggcaaatagtttaaagaaaattcataatatacatgttcctgtatttatatataattgcttgtaaatatgccaggatcaatttttttaatttttgaaaccattattgaccatataagttgtgattgtggagttttaatatttttgtttcttactgaatggtctgttggcaaaggcaggtctcccctttgagactgacgcatggggcagaaattaaccaggatttctgagtggtttcattttcaaggtcacaatataaatttatcaaacacaattcaaatggtgtatgacaatgaaaagagggcatcctctgtctctcttccagagccagtcttaattttgtgatactattctggacagagaaaggtccttcttaatttagctaaaatctgagcctgaatatccactctaccttatagaaaaaaaaaaaaaaacaaaaaaccctcgttttctttgaaagacttcattgcacaagggatcaagttaagtctttcctaaactcacagatacaatcagcctccaatatgctccacatacacaaactctgagccatttcaagcataaattttagaagtaaagaaagttccagtgaatgcctaaatagataggaaaaaagagtattcttcttccaagaacacttttctgattcaaactttcttccccaaaattagggcagtgacaaccattagtcatattagcttatttgggatataaactgttttaatatgtacactaaaacaaaacaaaatgtgtcctctttatagcataagacacaatatatttaggcaaaggaatgcatctgctggattttaaaatactagtgtttcaaataatcaaaactgtatttctagaccttttgctacatacctgattctaccaatatcctctttgtgcttaaagaagtcatgaaacagtcagaaacaaagaatttcaagtcacaaactaatgatggaattaacctaaattatagattagctattacacactggcattcaatgatactgccaagtttcttcaaaatgtaatacttatttgttgttattaaaccgctggggtaaatggcaacatttatcactacgtagaaaatcaaacagaaatcattaagaacattttaatgaaagtgtggagtttttttgttactcactgaaattattggcagcactgaaacaaaatctattaatgttttaagatatgaactatgctttaacctggtatctactgcagtacaaagagctaagtcacacacaaaacgtgaaaatcaattttggcaactagactaaaatgtaaataccacaggccaattctccccaatgcctaagatatttcctgataaatgagattcctagcactaaacatttaacaaattgatctactaatggactgcaaaagccagtaaccttcctcaaccttctagtaacaccaagtaaatttccttggtattgtttactaatctgtacaggatttaaacaccctaagtaatctgtttttatttttccagcaccaaaattagacataaacagatcagtgaaaaatttgtgatcattttcaaatttggggcataaaaaacactgaataactagtctgaaagaatat

SEQ ID NO: 43442 - DNA, 4776 bp, Homo sapiens
tccttggagacaagaatgagctgctacagtcataatatatcaatttggacatttcagagttagagaagacctgtcacaaaacgatgcaatgcacaaactgggccaatgggatcttctacgtggtatcctcaaggagggttcgtatttacaggactgtacaactgtcaaaattgagacagcaacagggcaatcaaaattcaatcataattcagtatgtgggcaaaagattacccacataatggaaaatttgaaagacaaaaagaagaagaagtagaagtagtagtagtaacggtaatggtagtagctctaacaaatctggttacattccaggggaatcttcttcagcacccacctgttaccctcaaatcttgaaacatttacgtataaaaatcaacctgagcatgtgcaagaaaatagctctatattgccccctagtgctggccagtgccacttctccttgggctaaaaactacaagtagttcctctacttctagttacttcctgctgccatccttaacatagaccaacccccaaacatagcctaatcctctacccacagattaggaaacaagcagcaatttttagcatcatgcatcttaggaatggaaatggcccagcctcagatggcaacagaatgtgtgtggcctggcttaatgaactcatctctcctggaggtgtgaatctacttgggtaaagtggcctatgaccacatgctgcatgacagctctgggacccttacaaagtgatgatagcatggggatcacaagagagaactaaaaggaaaggacaaagagaagcacaggtcagcaaagagattcgggcagatgccaagagaggcttgataagacaaggcaataggagaaatgatatgggacaggaacaataaaaaacagaagccaggaagccaggaatattgtgcattgttgtcattatggaggagcttggctagtaagaagcaatattttgaactggacatttattttacatgagaaagaacaaaggttggtctgatgtgtttcctgcacgggtacagctggtgctgtggctcctttgatcactttcccccagacctctgcagctactgtgattagagatacatccctaggctgccctttgatcagcagctcaaggagcctgcaggtgccatgtggcatcacattagcaagttgtaagaagcaccacactaatattagctgataaatgtgatactatgtcttgctgcgcaacagcaaatacaaataacgtttgcaaaagtcggcagaatccttattttatctacttttataccctaaaactttctgtgctttcttaaacatgaacacttcatagagtttaaattcaaagttgaagtcttgaaacaccccaatatgaaaaggaaaaaaaatcactctgacttaaaactatagcacatcctatcttaattttgtaggtatgccacttgtgttcattttgcatggttaatcaagtgacagaatccttgcattctgaatagatgatatacaaagcagtaaaaacatgtatattccttttcaaattacagtaagagccaccatttgtaaacagggcgttaaatattccaattttagacagcctaacatgaacattgtggtttcatgtgcagtataaaatttctatttacaaagtattctcaaaaatgacttcataatggtagatgaagagaaaaagagtttagaaattgaatgatgtaaatcatatgggttcagaggctaagcaaattacacaccctgaagctgccctggctttatgaaaggagcctttctccagctctgtgcaatcccagcccaagggaacttgcatctgagagttttctaaacatttcaggtacacttgaaagctgaaagtaattctcatttcctatgcaggattaagtcgtttccagcacacacaaaatagcagtcattcaccaacacatacaaaaacacaccaccagaaaggtaaggacttcagagtacaaaggcaagtttaaaaaacaaaaactagggagcaagagaaatacactttttaattcctctaaaaacgaccacacagcctcttgacctctatatttcctatctactcattgattaattgatgacttcgacctagagtgcttcaattaatgcggctgatatatttcctgaccgacccccctcgccctccccaaatctgagtaaagtcaaacatgccaaggctcattcattttggattcgtttttagaggcagttcttgaacttctaactttagcaatgagcgaacctgcaatgtgcatttgaaatgacgttcacaatcgctcccagaatgtcctcactcagcagtggcactcacgttgccctcttggagctttgtggcagctcccgaagttgcaaactacacttaacctttaacagtccatgccaatgaacgcagcgcacatttgcatgtaatgagagaccaaagataccttcacagtctggtatatatcacataccaacgcacaatgccaacgttaacacacacagcgagaaacaagcagggggagaatgggggaaagactcaccgttctgttccttgttgctggaaaactggaatttactactcaggttggattccgcctgagtcccctgtctctggccggccagggcagatgtcagcaggagaagcccgaagaggctcatttggctgactggggtgagagctcactcacggcgggcactttggaagcagcgactcccgagtctctttcaccaccgccaggggaaggctgcactggggtggaagcgccgagcctgctctggcagcagagaatcgcagggtagtttccacataatcccatccaaaactttttcctagagccctcttctgtgtctccagtttttgaaaaggatcaaagcaaaacctggacctgaaccagtttcccaaggtttaaacaaatcctgagctgtggcgaagtggtgggggtgggggtgaaggcgagggaggaatgagggggtggggacgcgggggagcggcgagaagtccccagcaagttgctgggagcacctgtcagttcgggggacaggacagaggcgaaaactcaagggttgcccgcagccagactggaagccaagtcggcggcgagcagtttctgatcaataacaaagctgccaatagatgcggctctccgggcgcccctctcccccgccccaccccccacccccgaagggggagggggaagaaacaaggcgagggcgccgcggcgggtcccacgggccggggcgccggagcggggccggggggctccgggccgacggcggcccgggcgcaggcggagagaggccgcggggctcccgctcctcagcccggagcgcagttggccccgggttcggagcgccgcagcacggattccggcacctggcttgagttttccgcgaccaaagttcaccttgttcgggctcgtcccccgctcctcaaagcctggggcaattcggccgctcggggtcaccgcggggctccggttgttccccgtcccctccccccacgcctcgggctccgcgctaacctcggggctacgcgcggcgtctccgcacggggtgaagagggaaggccggggcggccgggaggatccggcttgtcccctccccttctctaccttccccccgccgggcggcagacaggaggtgggggccgtgggccgagcccgggcggagcgcgcgcctggcgagcgggggcggctcagcggctctcccgcaggcggccgatggggcgggcgggggtcagcgcctctgggaggggcagccctgggacgcgtccgcgcgagcgggcttggccgcccactggctgtcaacaggtgctgcgcagacagggggtgctgcgggactcgctgtgggcaagaccccggtggcccaggagaggaacgcggccaaggcggcccctgctttcccttccacggaacacctctaaccccaaatacagagcacgatgggtggtgaagggtgctgcagaagtaagtgggaaagaacttcctgcagctctccttctcccgccccctgtcgcctgacttgtcattagtttccaggagggctccccactccctaaggtctttgctaggacccttggccagagtttcagaacagaaggaagaagggaaatgaattcaaaggctttcctccaatttccagctccgtaaagcaggacaaataaagcaaaagtaaaggcagccaaaataacatccatttaacaagtactatatttactgaatgcctactatgtcgggcactgtttagaggttggagccgtagcagtgaaaacagacaaaagtccctgccctcgtgaagcatacgtagtagttgggcagcattaagctaatagcaagctcttctgagaatggtgtctaagggactcagaatgatcctgcaaccttggactttcctacaatacagcctctaacaaaactaggctgccctgaacccctggtgatagaattgtttacatttacaccaaaaaggtcgagaaagaactgaaatctcttgtggcttgtgttcaggctgacttggagagagaggccgatgctttaagacctaaagttctcatgaggtagtctgaaatgaaacacacatgccaagcagggcttatggtggttccatgtctgctaaatatgtctgtgacaggatccaacgtgctttctttgtggagaagcagaaaatcattgtcaatgtgttaaaggcacaagcagagagtcagaaaagttgaattttaaaatgaagctatttttgagtaataatcaaaatgaaaacaaggaagtgccatggcaggcaaatc

SEQ ID NO: 43443 - DNA, 758 bp, Homo sapiens
ttctttctaaacttgctcaactagagcagtactattgtatctgttattgccatagtttgaaaaaccaagctctaatggtaatcaaaaagaagaggggacagagtttggaaatcactggctagggcaagtatacaggaatatcatggaattcaaggaaaccaaataaatccccaggccttcaataggtgcaggtattcatattttacttttcaatatttggttgttatcatgctaacagcctcgaaagaggcaaagtgcagtcctaagcggagtgtcaaggtaaaaagaaatagctattgtacataactgagttgtaaacactaaggaaataatattgttgttagccaagaacagatggtcaaactcatactgttctattgagtcacactggtggaatgtgaaacaatctggagagcaaggggtatcccctaagaacatggacagcaacactatctttgtccatatcttagagtcaataaggtgtcatttttctctctcttgaaatcatttgtaggatatgaaggctgttgtccccattgtgacaaatcatagtaaagaggtcaagacacagctacagaccctcctttctcagatagtgaccttcttatttcaaaggtcatgggagaaggagcctttcactttgtgatcattgtttcaaatgcagtcctttccttggctactagcctttgtaaaagaggtggatagtctcagcccactacttaacagtgaacatcaaaaagtattgctggctggctaga

SEQ ID NO: 43444 - DNA, 1571 bp, Homo sapiens
tgaatgatatgaaataaaaattctaaaattgggcattttatcaccagatccataccttactgagtcaccagcaaaggttagcttatgtttggacaggaaagtttgctgtgacaaatgaagcaggtttatcaaattagctgtacttggtggagtgccagcttaacacaacttttttttccctcacctcagctctataaacccgtgttttaggctcttatcccctgtgcctgaccaatatattagacaaagaccacagccttccagtgcctttcagatattggcacaatctcatttttagttattaaaacattgctccaattgaatgtcataattccagtctctcaatgcatcccagctcagatgcagccatgaattctgcagttgagcctaggagtaagtaggttgcctcactggagggacaaggttccccaacttgtccctccacaaccccttcttttctcatcatgctgcagctggctgccctaggatgaggaaagggtggaggaatgagagtgaaaggacaagttcttaagggactggtgctcttgcaatatggaatatgggccttctgtcatggcaaatgcccaaataaagtttctctcatgttggatttgagaattccacatttccatcttcaccctcccccttctctaacacaatactgtttcctaaccaagcaatgcatttttttggctaacattttccttacaattgtcactcaactcttgccccagtggtattcacagaggagcaggagttagtgtagcgttcttttctgatgactcacacctggctactttccaagctattgcttctggctttaggaaacattacacttcttttgcccacagaattctttaaggtctggcctctcccttggcagctgcaatctttgctctgaattttgagcaactccaatcctagactcttctaggaaataatcaattatgaaggtctcgaccaatcactctcatatgaacccagagggtcagaaactactaagtactttgtcctgtgtttaaaaatacctaaatttctgcagcttaccaaataaccagttggatgagaggatacgtttttatgtttctggaaagctgaaaagcatcccgttttctacaagtgactatcttaaatcaactacttcaaagattcttaacatgccttgtcatcggctttgtattctgggacaaaactcctagactatgggagaagtctcaccttaacatgtacttcacaataggtgagttacagtaactttaggagagcatatttaggatggtgttggtgatcccagagcttaaatgcacatacaaaaaccaaggtgtactttaatcatgaaattagtaactctgggttaaaattctccatagggcatctggtccaattctacaggcaataatttaatcaatagtaaaagagctttaataagattttttccaacttggcttgaataccccttagagacaaataaatccttatatcacaaagctgaccaaaccatttctgtatagttctaagtgttgaaaagtttgaatttacatcgagtcaaaatttacctatatgtgaatttc

SEQ ID NO: 43445 - DNA, 2319 bp, Homo sapiens
cattgaaaagttgataggtctttcagaaagttcttggaattaacaggcagatcatttacctgtgcaacagtctccagggaaagtaaaattatgctaatgaagacagtgtaatagcaaactcctgttaatgtggacaataaagtgtgatttctgttctctgtgccctttctgagtgtggaggtagacagtttccagtcttcaccggaaacagagacacaaagtcacagctagtatgtatggaataaggagctagaaaaaaaatctaggtgaattctttgaggtgcagaccacagagcctaagataaatttttgttatgctttcattttattaaaaagatgtctgcaaccttggctaagggttaaaaaggagttgtgagtgtatacaaattttgaaacagtaataataaatccaagaaagaaatggtaataaaattcagaaatgtaaggctttaggaaatactatattgttttatttaaaaataaactgggtggtttccatgaagggttatggtagacattactaaagcttcctgatagccaattctcttctttgtggatttgtgaaacactgtacttaccagtcctctttcaaacaggcaaagccatgtgattagttatgacaatagcttgtgagtggaaattacttccatgtgtcacttctggatggaggcaatgaaaatctgttgcatgatcctcctcattctttttcaaccacttagactatggtggctatatatggagattctggagccacaggataaatctagatctctgactcatttggaagggagctgccctggagagccttgcagctgacttcctgtaggcaagaaatacactccttcgtgtgtgtgtgtgtgtgtgtgtgtgtgtgtgtgtgtgaatccaatagagttttggaatttatttattcctgcattatatcctatcctaaataatacttgtggtaatactatacagaaaattttaagtgaaatgaagaaatgataacaaagtgggtgaaaaaaatcataaataattgtttgaaggaccttgatgataaagaaaaaaaggggaaggagaggtgttttcaaggttctagaagaaaaagtacatttttcatattttatctaatttaaaaaaattggatgacagcgtactaagacattcagaattaacttttcagatttttaggatcataaaattagccctttccatcagataatgtcactctttaccttctgatccccaggactcatattaaaattcatatgtttggtgatttgccaggaatttgaccttatagccaggagtttgatctcattgaaactaaaagcctatattacatcacgttactctttgaaaaaatgttctctgcccctctatcctctagattattgaaatatattttgatagtatttaacataagacatagtttaaattatttttaatttatcatagactatttccttgataaattgttttcatactttttctatcaattgccagttaagtacaatgtgttctcataattccaggaagtagtgttacggctgtcagaaatgatgtgttgcataatcagtaacagtaaatagactaaatctttgaagccattcctgctggaaggtgtataagaatatccactggaaagtgccaaagtatacctgccaacaactgaagcctaggagttgaaagaattagggagataaataaggaaatgtgctataactgtcttgaaatattgaaatgttagactgggagggcattgtgaaagtacacagtgatctcttgttttatgtggcaaagtgttctgttgaggagaaaagttatctacgattaacccacttttactgctaagtcctgagaatgtgttttgtaaaaatgtgtcaatatgagagaaaaagaacgctctgctaatcaaagcccagtgtatggtaagtattcaatacatttttggtaataaaggaagtaaaaatgaaataatatagtcactgagcagttggtctagaaaatgaaaacttatcttttagtatcatttagaaaaggctttcctctagagttcttgtcttcattgtaaaagcttgggctgttagtggataatctctcctggagaaaaacggagccagagtgttaggttgaggctcacgttgtaaataactgagctggatttgggaatgggaatgtgggtcacatgaatggtgacagttggcttaagtggctgagccaagttgggactatgatttgagtgacagtcttgggaagaagccaaagcagaaataaggcagatatccaaaagaatcaccagacattctccctgaaaatgaaaagaaattaggttaa

SEQ ID NO: 43446 - DNA, 1911 bp, Homo sapiens
cagataaatggcctgtacagataaatggcttaggtgcatctacaaagaattagtgattacaagtgaaatcttgtaatgtcacaagaaatgttaatgacgtcagtggtgcagatgaatttcttaataccaagtggaaaaattcacttgagataatcttttacaatggtgtgaaattcctcagacttttgttttatccataaactgcacaaataatacctccctctgtgacacttagagagggtgacatgctgagagtttcctgaataatcacctcttgaaatacacaaaactcttctagtttcctggttgaccgacccagggcttgacgactccttttgagccacctgacaattcagtccagcacagcaactgaaggaaggcgttccccaacctgctgtcctatgaaggcctctaggtcaccggtgctaaagccctcctttctccaccctccttaagtggaggtaaacgtcccagcaggaagtcaaggctggattggcgctcttcgcgagcaccctgggaacgggagtctgggtcacgggtgctagagccctcccctctcctcccggccggtgtatgggaaattgtccccgcagaaagtaaaggctggccaggccgcccccagcacgtagagggaatgagtcaggctccggctccacactggcacgtagtgggcggatcgcgccggcgctgagtaggaaggagcttcagccgccagcccggaacgcagtgagtacagccactcaaaggaaagccaagtcgctttgcaggggagcgtctcatgatttttcagaaacgtgctcatggttaaaaagaaaaatcaaggctcggaataaatacattcaagcactgttaattttagcccaaagacaggcggtacttgcctggagatttgggaaaatcaacatgaaactaaaaatgaaattttagttggagtggagcaagcagtattgatcagaacataccaaatacgaattttttcaaagtctgcgtagaagtttaaattactaggaaaaatgtaaaggagaagtatttactaataaatgaaacaaaagtaataaaataaaaatgaattaatatagtttgacaaaatatcagcgaacgctgaaaagaaaacattaaaataatgtttgagactttttaggttttgtgcaggaagaattgggaaaaatgtgctggatggagtgatactgcttttcttttccacaaaaatttcattattttagagagcggtagagcctttttaaagacagtaagttattgccaattcacaatgaaataagatcacatgctctgaaatgtacaagagctgcatgcaataaacttcatttatctataggtaataactgattgatgtttattcagtagtcgaaatgcacctcatgcactctaattagcacgtcaaattagtctctccgtttcagaggtgtagggcctttgtggagccttctcaataaaataatttgccactcttgaaggttagacattctcttctatcaatgtacacataaaggttttgttttgctttgcttgttgtgaattaaaatggggagaaaatgatgtgttagctatcacccagtcatgtgtctttttagtcataggttagcttttcaagacacttcctgcatctctgacctgttgcacctctgttatcttggcacctctgttatcttagcagcaagcacctgcctcagctgacccttgagccataacccatgtaagtcactgcagggctgaacctctctttgagcctaacagtagaataataattatttttattgaatagtgttaatgtgtcaatgttgaaatgtgcctcagtgtgtcttcctcaaccacatccctatagaggatgttttcttaatagcaatgtgtttttgttttaagaaagtccacacaatttcaaatacacatttt

SEQ ID NO: 43447 - DNA, 520 bp, Homo sapiens
aggcaagctcagagagtactgtaataaatatttctctatccaacatgcagaatgaacaaaggttaatgtgtaacttttgtttcagatgttttcatataaagtagatgtaagacttggtgaaaatagggttatcttgcagctggactgaaacagcactatgcttatctgcagggatgcacggaagtctggtatgacccttggccaaagtaggattaggtatactagttaatgatttatattatgctgtttaaaaactgaaactcttttggaaggactctgtactaactagcttacttagtttaaaaatatataaattactggtttgcacctagtttgaccaattttacagcctggctttagctgtgtggctcggagtatatgaaagacctctctacatatttatttcctgggctcccctaaaactaggatagcctgtgcatatcttgatggttcattatctgaagttgacatatgctgtgcaactgaaaaagggccctagggctgtgtctggtagttttca

SEQ ID NO: 43448 - DNA, 2067 bp, Homo sapiens
actcatgcagtgaaaactattctccgaaacccatgcaatgaaaactattctccgatgggaaaggaggaggcagagagccagcaacaggcagcgcagagctgcgtggcttcgggttactgcggatgattgaaaccagaaggcgagacaaaaagaaaccagtgaggggtggggcgggtggaaggaaaaccccttaagactcctcaccactaaatctaaagggggaaccctcagagaggggtggcactttagctgctggcatcccccccgcttcccgcccgcacgctctggggcgcagaagggccggtcgtcccgggtcatgggggttgggggaccgattccctagcctcgcgagccccgccgccgccggtcttcccagaggcgccgaggggggacgcggtcccgacaccacactcacgtctccgatctgcagctccacttcctccagctggtccaccgttgggccgctgctcctgctcggaactggccagcccaaactcactgggccgcccggggaagatgctgcagaggcgtctgaagaggagggagaagagggaggcggcgggggcggcgaagaaacctgcaactcctcagggtcggccatggggaagggttgggaccgcggaatccgacccgagaagccgaaccgacaccaactgtcttttaaccactcgcgcccaaagccgaaaggccccgcctcctaacgccagaaatcccgcccagtctcctcgtgggtctcagccccggaccacaaagacgtttcatttttcgggacagccaatcatatgagtcaattcaccttaggcaactcacggctcctgcgcgagcctccaatcgatctcgaagggcactcgtagagaaaactacacctcccaggaagccgtgtgcgtcgccccgccttctactgcctttcactgcgcgtgcgtcgtgctgtgggattcgcggacccctctggccgcgctgtggctgtttcaccgctccccggctgggacttggagtcccttatctttccctggtttggtacatgacccggaagcctcggctggccgttgcgtcatccatggcgccggcgcagagcgagaaggaggtgggaacgccgtgaagcaagagcggtcggcagagcggggaggcgaactgcagcagagttcttgctttccggcaggtgatggcgccccccgcggcctagaggtccagcgcccgccgcgagcagcggacagtcctcctgttgtgtccgaccgagagtcctggtgactttgaacatgctggtgccgctagccaagctgtcctgcctgggtgagaggaaacgggcggtggggataagtggaggagttagggcaaaagggacaaggccggtcctgggggctgtaggcacctctcgccccttctctcatcagctttctcaggctatctagggcaaaggtcacgcgctgtcagcctgttgggggaccctggcttcctccctctggggttgccccagttggtagaattaatatctaggctaaaggtcaagggcggggaaaacttgtcaacacgccctcggcatcaccaccacctgtcaacacacacacacctcggtggactcctgaactgaggcttcccaaatcctggttctaatcttcaaacctctgttggaaatggaaaaaaaaaaatcgtatttgcccagtttttctccctggtcctgacctgactttcgtcttcggagccattctagttcagtctaaagaaattgaagtctgatctgtcacatcatggttaacattcatatgttgaccaagtcacccaagtgtatctggagccagtttttctgcgttgtctaaaattaagggctgggcgtggtggctcaagcctgtaatcccagcactctgggaggctgaggcggatggatcacctgaggtcaggagttcaagaccagcctggccaacattgtgaaaccccatctctactaaaaatacaaaaattagctgggcgttgtggcccactcctgtaatcccagctactcaggaggcttaggtaggagaatcacttgaacccggaggtggaggttgcagtgagctgagatcgcaccactgc

SEQ ID NO: 43449 - DNA, 2068 bp, Homo sapiens
ttattttattctaatattcaaatttagtctacctactgtcatgtatgtatataaacagatttgaaacattacactaaggatcataaccaattatagtagccaaaagattagcaccatgtaagagatatcattaaatacaaatagttttaaatcctgagtaatttcttcaagaggtactgagaatttccaatcaccaagcaaccaacgggagaaaattaaacagtctttgggtgggcggacttgccacgtgttacgtatacctgcagcctttgtgctctgagcaaactgcctcatgcaacctctgaagcaaaagctgtaaaaattcctcctctagatagcagctaagacaggtgagattaaacctagccctagctagttgcaacaaactgaatgtacgtgtaaacgtgtgtgtgtcctgtacatgcattcaaacacattgcctggccagcaattccaacgtgttccagaacaaggccaatccagttacaaagcaacacgctccctaattcaccaggccttaggaacttctgagcggctatgtaacctaggcaacaccatcactacgttgagcgcattttcccaatggcaaattaagagaaaatgtttgctcatctgaacggacctctaaattaagaatcagtaataaggcaaaagcaatgagcaaacaagtccctttaacgtataaataacacagcacgtgctgatatattatctcatgtggcaaatatagtttcctggggcccagcagacgcatatcccaggatatgctttccgaactgtcccattgcaaacataaaatatttcatgctaacttggtagtgcaaaggtggcgtggaagtgccaccaaatcaggaggcaaacctaaaggacgccacaattcccgaactagaaatttccagaaacttccgcaccaccgatggcattgatacaagggcgctggatcgatctagccctagatctccgggcctgctccggcggaccagcctaggcagccatcccctccgcgaaactgagcagtcaccggccggagccgcattccgcccttggaatcccccaaatcccgggaacccccgcctcctcggggcttttccgcgagcgtcagactccgctcacctcgctcccctccgatgtccacgtcaaagaagactcgagggttactggggttggagggcttggcttggggggacgggtgcgacatcttgacttgcagacgtgtttagtacggaatatcagagtacctagtggccgcccgggccgcccaaactccagagtccgtctccgccggagaccggcagcgacgctgaccggccacttccgacgcaagaaccggaagccatggcctgacttccggcaccgccccgctcccccgcgcggtgtttcaaagagcctgagcgactccgtgcagcgaaccgcgtgccctccgccacctgttcctggcttctcatttaatgaagttgcgatcccagttctcattattcttctcgcttgtgtttcgttgtctttcccaccctcgtggcgtagagagctttggagtcaaccccatgccagcgtcagctctgccaccaagttgggtgtgacttctcagaaactcagtttgctcctctggaaaaagaataaaaacgctgacctcggaaggtcgttttgaggattaaagacatgaatcagtacaatgcctggcataaactggtggtacccaaccaataggagccttattattgccatgtcgttacaatttgatcttcacattacaatgtaagtggtaaggcttagactaaacgctccaaacagctaaagctgagagtccagaagagagcacagttttgattcctgataaaactgtatttggcggggcgcggtggctcacgcctgtagtcccagcacattgggaggccgaggcgggcggatcatttgaggtcaggagttcgagaccagcctgaccaacatgatgaaacccgtctctactaaaaataaaaaaaaaaaaaatcacccgggcgtggtggtgcttgcctgtagtcccagctactcgggaggctgaggcaggagaatcgcttgaacccgggaggcggcg

SEQ ID NO: 43450 - DNA, 2137 bp, Homo sapiens
cctcctctcaacaagtgtaagagagcccaggtgagtcactgttcactactcatggagaagctagaagaggcatggttggggtcttactaactttatctctatttcccatcatcggaaaaattcgtgaagcccaacgctctaaaacatagattaagaagttgctttgagtctggtaacgtgtcctacactggctgtttagagccctgcaccaccaaggattaaattccaaaggggactggggtgggacagggcaggaaagcggactcaaacacatgaactcctcccttcctcaaaccaaatatctgctgctgatatgccttgattgactgttaaatatgtattaggaaaaacaatcccttgctataaaatatcttaagtttctaaatctatgtagtgagttctgtgtgtgtgtgtgtgtgtgtgtgtgtgtgtgtgtgtgtatgttttaaaggggggacttaatatttcaaatgcaacttcttatataaccatggtatggtggcccaagacgccaaacagaacaaatgatttggataaacagtttaaattttgtgaaagcctggaggaatcgaatttggacatggaggaaacctgacaaaaccttgggtgctatgtgattcaaatcacagcccaccgaagcggccaccgcgcgtaccaagccttcccccctagcatacgccttctgtgaacgggctcttgtacctgaacaaagcgaggacccaagttcaggggctttgtctctaaagaacaaagatcggcctagctgcatgctcgctgtgcgaaagaacccaggctccgtgggaaccccacgccactcgcggagctgcgccccggcggccgccctcgcccctcgggcccctttaagtgccgcgcctgcccccgtccgcgtcccccgcgtgcccggagtactgggccgcccgcccgctcctggccgcacctcccacctcccgcctcccgccggggttacgtgagcccggggcgggcggccgccgggccaatggccgccgccggggccgccgcgctcctcccgcgccgccgccgccgccgtggggctgcgggctcctcccgcaggagataactgtcagcgcgcgaggcggtggcgggccggctcagtcatatgaccggcagccggcggctccggcgccgagcagagttactcagtcgcagcggccccgcgctcccgcaaggctgggcggccgcgccgccgcgatggccccgccaccgcggccgccgcccccggctgcgcgctgagccgccggccccccgagcgccacggccggagctgcggcggcggcatcatggccccgaccctgctccagaagctcttcaacaaaaggggcagcagcggcagctccgcggcggcgtctgcccagggcagggctcctaaggaaggacccgcctttaggtgagggggcgccggggggcaattctggcgcgggacccgagttggcttcggtgctcgccggggaggggacgggtaggggaaagggaagggactgtccaggacggcgctgcctatcgccggcacctggtcccgggcttgtcagcgtggacgcgcctgatccgagtgtggctccggaccctccgtgacccttcctcccgctctttctccacaactcagggtccttccccatttcagagttctcttgtgttccttggggttcccgggcgtgcgctgtgcttggctgtggcgaccggagattctccggttattggggtgaaccccttccgggcagagccgcctgggcacctctgcgggcccagcaaagctgtgagctgtcattttgagggcagctccaacctattgtgtacgtgacagtgttttgaagttctgaaggagcaacagtcacgaaaaaggcatctttcttctttcttgccatatatgacaagctctcaaacggatgaatgaaagtatgtaatttccacatcatgtggaaggttgatgccgcatgatgtgtggaaagggggagtaagatgcaattatgaaatttccgagatttcaattgatcaaagctgatatgtatatttaatagatttgatctctcgaacacatacctttgaatattgatagcatttatggagagcttactacctaaaatgctttatgttgatttctgtcgtttacttttctgacaat

SEQ ID NO: 43451 - DNA, 1411 bp, Homo sapiens
caagtaaaacatacgtgtattccccagtcttccctttctttcccctatcccagacctctcttatcttcaaagggaaaaaacaaaactcttacaagctgacagcttcatgctcccagcctttaagctttccctccagcctatggcaaaatctgtacttggtaaacctaccagatacataactatctctttttgtatcttttaatatcaggagcttcctttttgttttttttttttcctcaaattagtttcttgacagttctcttgcctcttttgattcatttcacaaacatttatgaggagtcagttatggcagctaatcctaaaattccagacttattgcgaggaaaggagtttgtgtttgaaggctcttactaattcagttctcacgattgttgtatttttacaaacagaaaagggagagggttggaaaaagggagggagagggagagacatttgtatcagaaactgggggtggggaagctcccaattgtccagtaatcttatctacagagtgctaaatactgcctgtaattgtatgtagggggtgggtgctagtttagataatgtgccaagggaagcgcacaacctctgcttgctccaactaaagctgttaaaaagcagtctagttccagtaggtgcaaatccacactttaatttgttcatcattttgtcttcattcttcaaatccagtttgtattggactttgatcttatagctgattactgtgccatgctgctctttagtttactccagcagagtattgagttttacagcttggactgttaaagtcaatattgtgtttaacacagcagtagcagagtgagttgtcttgagcttgccgtgacctgctagcatgctaagctagcatgcttaatgctatttaagaggagagttcctttcagaattatgtcaagattagcaattgatggtgagaattgttgtggtccaatcaccagaccacagtaggtaacttccctggggtgaaagcattgccatagtgttttagacctgtgctctgctctccatttattttagaaaccattctgtacaaggcacagggcctccaactcatcattttccctgcagaggtttacctcagagatgtttttagttggagaggggcaagttaccttcaaggagaaaataattgggtctctcttctttaattcaaattccaaagtattgtaaatctcatttattacctgtctgttctgaagactccacttttcttttcatcttagaaatatttggcatgtggatctagaccaactctgcctgaagcactgaggcaagcaggcttgatctttttttcttttttgcttggccttctcaggagtccgttcaccatcagattagtgaaatttcacacaaattagtgaattagtgtggccttgtcagggcaggggacgag

SEQ ID NO: 43452 - DNA, 1532 bp, Homo sapiens
cttcttggtaatgtcactctttagcccccacgtatagtgctggagtgctgtctagtggtcctactgtaagaagctgtgatgtgcgttacaaagacagtgtctttaggtaagctttgttcaggcatgagttaatagtgctgttggctatgagttcagcgttaatgaagcaacaatatgcatgaaatagggtatcttccaacagaaacacatatacactataaaccaaggtatgtattaatctgttgatgaaaatgttgtaatcagcggctttcaggaacctaaccctttatttccccctagaagcagtggttcggtattcactaattcagtgttcatggtgactttatagaacataactgcttcacagaatgagaatgggctgcacagtagaagccctctgcagcactctgcagccttagaatggagaaggtaaatgggtggcttcatcctagaatgagttttggaggccagtctgattgaaggatagaatgaggtagggaattaaagtgatgacttgttggctttgaaagataaagaggtgaagtcaggatgggtttgataaaggaagttatcaagggactggaagattgtatgaagtcagagggcaggcctgcagggaataattacagctgcaaggatcagagggtatagtcaaagtcttgctggaaaatgggggaaggtagaaatgagggcaattaaagaaggcagagaacaacacatttgtttttggatagaccattcatgggaactttgagctctagggagtgatatagggatacttaggtcagaggacccagagtgctgataaagacaattggaatgtgcctacaaggtgcagctgtctgtgcaaatttccagaaattccaagaaccctgagacgtgatctaggaatcctaaatgtccagatgtgaaagcaggtataaacaggcctatgcaaagtatcacatgagtggcaggttcttgactacacagaatacagtgtactttttcagttacaggacccacagcattttaccatggaaagatgtagagaaagaatcaagatttgtttactgattaggtttagggagaggaggggaggacaggagtgaatagtcaagagttgttccagtttgactaattgctataagatgctttttgttctacagagtttaatggatgttttacttccagagttgtctttgttatatcataattcttcagttttcagttcccttatcatgtgatttttgttattatgacatttaagattggcgaatgagcatacttatggtttggtaaatagaggtaatgattcctctcagttctgtttgcatgggggttgtggagctaggtcagcttcctcctgactgtctttgaagtttcactgacaattctggacactcagattccagctttccaagctttcctattggccactgggttaggtttcatactccttctattggttgctgtgatggggtttgtaaatggaacggaggcaaatcatacttgtaccctactattgtcatttatgtgaagagttgtctaga

SEQ ID NO: 43453 - DNA, 7484 bp, Homo sapiens
aagaaaattcttgggtccagttacattaatcctctcgaagttgttagtatacctgaatgtatcccttataaataaaacgattactgtcataagtactaaacacccctctgctaagagaagtttattcattttccttggaaattcctctatcataaataaaatgaagtcaacatttatgacagttctactggatggaatataactgaatccgtttaagaactggtatcagggttagcattagcttggattttggactaatcaaatgcagtcatatttttaaatgtgcagttctttctcaaaggagcatttgaatctatgtcacattgagccgtggtataatgaggttttgttgtccctgagagagtgactattttcagaacttagatgaacagctatttgcaaggcagccttagtaaatatgacagaaaagaggttcatttaaaagcagctagtttaggaaccacttactaactgcctgctctctgctcagtgttagtattaactgcacaagcaaaacacaaaagaaattaaaggtgtggtccatgtcctcgaagttcatcctctggctcagggattcctaactgacatctacattctgaggtatctgatgagatgtaaagagagattaatacctttataatagcagctaaagcactaaactttgaaaattatttcttaaaagtcgcagatccaaagttacttgaggaaacaccacttccacacatgttctgttacgggaattgtgcatggcttgcaggtattcttccctaaaccaggggtccccaactcctaagccacagaccagccacacagagcagcgggcaagggagcgaagcttcatctgtatttacagctgatccccatcgccgatgttaccgcctgaactccgcctcctgtcagatcagcagcggcattagattctcacaggagcacgaaccctatcgtgaactgcgcatgcgagtgatctaggttgcgcgctccttatgagaatctaacgcctgatgacctgaggtgcaacagtttcatcccgaaaccatcccccacccccagtccatggaaaaattgtcttccacgaagccagtccctggtcctggaaaaggttggggaccgctgccctaaaccgtggttggtggcagtgtgtagactcggtgactgttgttccaaggtatagccaaggggaaagttgaaccatagttgtagttggggaggttctgagctacaagaaaggtagagaatccttcagaggcattgtttatagagtccgttctatcttcctattacaaatattgaaacgttttcggaaagggaccatttgggaagtttttatagagcaaatggcccttggtttgggtcctaaaagaacttagaggattcagcttgtaaagttaaatgagcggtactttagaaggggaaattgatgtgactgaggatatatggggtgttgaaaggggatttatgagtggaagagagaataccttatgttaatttgaaagataattgttccacagatataattttctaactgttgtgctaatttgttctagagcttattgttcccaaggaactttgtgatgagtctatctcagagtgtttaattgcctggagcttccagagaattggctatgtttttgggggagggaagatggggtgggaaggtgattgaccttcttgggcaaaatcattatttgccaggtatcattgtggccaaagttatttatcttggcttcatgttgtataaatacagtgcaatcatctatgagtttagcaactcaaataggacagtgagtacttttgggcttgtgtatataaaaattaacacgtcgcatttgtctagaattttatagtttttcaaagggattttcaaatgctcacatttaacatctccaacaattcttgtctatttatggttaaggaaactgaggcccagagagtctagtgtctttccccaaagtcacataggtagtggatgactaggccagaactagacttaactcttgccttgtcgtccaaggttctgttccctggtatgacaccctctctcagcagggaccctgctgacagtgactacgcgctggtggctggcgtctcctgagttccttgtactcagcctgatcatgaggaactgactcagagaaatgagagtctgctgattcagagctgaatatcctttcccagtctttcatttcccagctttctcttctcctaaattgatttctgtcagctcccaagcagctttcttagttgtcgtagctattagaactcttagagcactttaagagtctttctgacttaatttactagcaatgaatgtattgcatgagaaacctttaattatagctatattttgggtaggtatcactatttttgcctgtcaaaccaaaactgaaggagaactgtcactaacttaacctctacatagatttcctttaataattctcattgactttgttattctgttatacacattgacttccattgaatggatttgtagcaggccaagaatgagtgagataccagtacgaaggctattacggtagtcctggcaaaacactgggctttgctgggcatggtggctcacacctataatcttagcgccttgggaggctgagacgggcagattgcttgagcccaggagtttgagactagcctgggcaacatggtgagaccccatgtctacaaaaaacacaaacattagccaggtatggtggcgcatgcctgtagtcccagctactcaggaggctgaggtgggaggattgttcgagcctagaggtcgaggctgcagtgaggtgtgatcttgccactgcactctagcctgggtgtcagagcaagaccctgtctcaaaacaaaacaaaacaaaacaaaaaaccccaaatccaccaggcttcgattagggtggtagcagtggaatttgggatggaagctgccatctctccactggcatgagtcaagagggagccaggagtgccacaggctccagagaaaacttcttgcccagccttcctatcactagtgttgagagaagagaggggcttctggcaagaccttctcccacaccactgggagacctgttactccatcaccacatctgctttgagactgttggcacactaatttcattttcctctttatcctgtttacaactatttacactgacagcctttaaaacaccaaggcttctaggtttttttgtttttgtttaaatttttgttgttgttgttttttagagacagggtcttgccctgtcactcaagccaaagcgcagtggtgtgattatagctcaccgcagcctcaaactcctgggctcaaatgatcctcccaccgcagcctcttgagtagttagcattacacgcacgcaccaccatgcctgattacttttaaatttcttacagagacagggtcttgctgtgttgcctagggagctctcaaactcttaaactgaagtgatcctcccacctcggcctcccaaagtgctgggatcacagacgtgagctaccacacctggcccttctagattttttcttaatccaagtctttactctccatatataagagatggataattagataagtttccctcccactgaatattccctattgcttacccttcccctgcttcatcttctgctatagcactcaccatttgttttggcacactgaatatttttctgaattattgattttcttctgccactatcatgtaaacttcataaaggtggcaggggtttggttcatgtatcatcagcatcctaacagggtctggcacatgaaatatttgaaaagatgaagtgagtggagttttaagtctttagatagcacattttaaaagtgagttcataaattattctacaaaagcaatgaaatgcctttataaactggaagaatgtcagatgttctttgttttgtttaatcccatttggtggcttgtgtaattataacacagattaatgaataactcttagtaattccaaaattaccctaatggcaataatatgtatttgtatgatgccatttacagtagcctgaatgaattttttattcctctgtcagataaatagttgtatctcaatgttataaatgttaaaaattataaatgcttaaaaatgttgtaaatgtaagagagaaggctattcacaaaaacattcctttccaggaaaacagagaccagtctagtgtgagacataggtgtgtagttggttagagcaaggcatatgagaaggtacagaatgatgagaaggttttaccttcatgcccatgaggtggctaaattgtcagtagtagttttgggcatgtgagctgctgcttctcaatactgacagcattttaggggactggactttgtacagctctgcattgcctgctgaggaatccaggcatcagcaacagaaagttccaaagcattaacagaagatttaattatgttatagctgtacatccaaatggaagggagctggagatagccaagagttctctgctaggtgtttttcagacatgcttctcatgaattaaataattttagtcctgatgtggagattgggagcactgaaaagtggtactaccatagagcagttttctgtgatgaagtaggtagagtaagcaaatgtgttacataagaatttctgcagcaactcttccagacaccttctaccttacttgataacagagtgtcctgatcacatgatttgcagagaatgagagatctgtgaatgattgctgagatgatggccccaacccagtagctcagcttccaacttcttaagcagctctagactactgataccttcctttcctaggtccaaatgctagggacaacctggctcaaaatcaaagttaaactttaaaagttatgtaatattttgttgctgatgtgtttctaacttttggcagtcttcaaaaaataatcccatagctgctattaatttcaggggaattaatgattatatgattataatttaatcatggggatgggttgtaaaaatcattcataaggaaaataggttgtagattgagttctgatattggacctttaaacaaaaaagtcatgaaagtctttatccaaattgctggttatctccctgattctagaaaggttgaatcattttaccgagacaaatagatacgcagtgccttttcttgtgggtggagagttacactgccggcctgacctggccacctctttttggtgttaaagtttagatatgaagtagttacaaacacagctttattgtagctcttctgggccgctgtttcgtttatcaggttggggatttcctggagccttaactttcttttccttatctctgtgttgtctggatgctggtacctggtcagatagcctttcggtagcactttttcaaaaaaacgtataatatgtgtactttaaaaattcctctcattgttatgtatattgcattgctgcttgatactacacaaagtttccaaataaagggaaattgtggagctttgtttagatactttaagagggtaatggctacggctatatacttttgctggtttttataaatattaatgatagcaattatgttgaaggaaaaattgtgtgagtcaaattgcacccttccagggtgagtgctttgcttttcctttcagctgtcagaaattgttttgcctctgatgattctcttaaaataaagcttgcagaattattacagattaaggaaatcaagtgatcattaatggcaagaattttttttaaaaatagtttttcccattgtttgtaaataatacatgcctattattagaaaattcgaaaatataaaagaatttttaaaaagtatcctgatcatggctgctcaaaagcgttctgatattgtttttctatgctttcttttttctgttttagttttataaaactttttctacatttagttttataaaagcatacttgttatcaaactgcatatacaatttttatcccattctttttatttaacataagaattttctatgtttcacagattttatgaagatgtgccactcattcattgattctttcagttactgggtgccttctctctgtgctctgggtgccaaatgctttgctttttaaagtatggagacatgggagtagaaaataatctagattataattaggaactgcacatcttcctgaatttccatgtaactttgatctggatctgaaagttaaattatttcccaggtagttccacattttaagtcaaaacaataatactcattggtttgtattatatatttaagctaactttgtgtggattaaaaaaaaaatcactctgcctaggagtctttccctagctgaagtgctggactgggagtggagggcagagcagaatcctggggaggcggtaggggccggtgtgcttggcttctgcacaggaattgtttataggggtgagtgagtagggcagggttcatggcaaggtgtccgacaagatacttagtcactcacaaagcacatgacttgggccttgtcctcagaggactgaattagtgagaatctaaacattctaggtggcacggaatttgagatgtagaagaaagaatttgacttatcagtcagtgatatccaattgcctcctccttagccccttcccagatctgtcccagtggtcaggcgcagacgtggtatgagaatgagcagggtgggcctgctcctgagcaaggatgcctggatttaaggcctggctctgccactgacaaactgtataccttgggccagttccttaaccttcctgtgcttcattctcctcatctgttaagagaagatattactactgcctacttcctatggttaaatgaaacacatagaacgatgcttggcacataaaagagcactcagtggatctaactacctaccagtattttctaccctatatgactgaatttgacatattgacacatttccttagcgctgagctcgtcagatgagtttagatggcattaaggtaggtatgttattgtttgattgcacactgaactggtatcgtgaggatggcctgctgcttagctagctgttaggaactatccatggtcatgtttctgaaaacagccaagtattgacagacttggttctgatcctggatctgtctccaaagcccattcccctaaagtagactgcttcaaaaaagcttgcacacccccttaccttaatctactggctgtgggctaagaggaggacctattttgtttttaataaactttgattgaattataatatacaaaacactgtacatattcgggttgctgtgtgttcacagtaccagcactgggatcaagaaacagcatcccataacctttttgtgtctttctggggaccgtgcttcgaagtctctggtagaaagatttgtgatcatttgttcttgtgcaaggagaaggcattatggaagatagggaattacccggataaagaggaggatcatttgtgatgctgtggatcttaaacctcccccactccctcctgtcctgtatttatttctcctttttttctc

SEQ ID NO: 43454 - DNA, 2679 bp, Homo sapiens
aggttgcagtgagccgagatcgtgccactgcaccccagcctgggcaacacagcaagactccatctcaaaaaaataaaatctagtgactcttaaatatgatgccaggtatatggtatcatcctcaaataattgctttcaatcctctttcttaaaatattgactatagcaaagctgccaacaacttttgagtttttcaaactttcccggcaaattagcaaacaaaattcttacggctgtttatatgagaaatctgggacttgccacacatatttgtgaatcattgttgctctggtggcaagagaaaacttgccatgtctttaaagtataccccttacacactgaaaaggaactgaaacagagcacttcagagtcaattgtgctttacagtttcatatcttgaaatttgaattcagaagaaattctctgtactgctttagaatcaccaggatgattctaaatgagtatatccattttatgtacatttttagatgagataattctattaaaaaagggaagtccttagattgtctgtggtagttacttaacaagaaagtaagtacagaaacttgagtgcattgttccctggtgagctgcttcacatagataagctgaccatgattttatgaccagtctttatttatagcagttgggattactgactaggaaatataaaaatagtcacagatttagagagagatatgctaaggcaacagaccaaagaattctgaagagtataataaaaggtcattaaaagtaagcgtaatgcaggtttgtaggaatggaaagaatgtttctcactgctgctcctggaaacagtgtgaaaaccactctaccctgatgctacttaatagaaaatgtagcagttggacaggttgaatgaagtgggtagagagaaaaaacaaaccctagtcagctgatggtcttgtgctttgtgacaagcttcacagagaggtcgtaaatggttgggtgtgactctgatgggttgggtattgtggtcacacgttcttctgcgcttcctgcattccttccctttttactgatttttacgtaccatgagaatttttctttgactagttagaagagtttatttctgctggctgagggtagagattttgagatataattccagactgataagagtgaatgaatcaaggaatgcagtgttgtgtctgatttagggttcaagaacatttgtcttttccctctgaggatacatcacttactaggaataaatcagcaatcttaatataggagattttcatagacgctaacaactgacatcagcttttgtctcggtcatatttggataagcattgatgacataacagggtaaagcacttgttattaatcaccatagctaactgtgtccagaatgacagtgttccaggcagaagatgaggttaatccagctctggagtctgcaggccagtcactgactgggcagcttctgaagccttttttcctcaagttctgctcagctctgtgctgaagcggaatgctggctgaactggtccccacatccctggttctcctgttatgactcctgtggtgagtcaggctctggcttagccttatccttttattgttacagtaacaaaagccaaataattgctgaacagtgatgtagcaagccctggtgggaattggagagagcaataacttgtgacccatctaagattataactgtcaaaagtcaccaaagagaatccaccctgtgggttataaaaacacccaaggttcctgggaatattcttatcttttatgagttcccaaggggatatttaggtatcaggtgtacacccatccatcagccttatgtctttaagggtttaagaaaggttttttaaaaaaactactttaggtttttacagaacagatgtgaatgaaaatccttttttctcactatgccatatcctttcactttcatgcctcaccctgtccaaaggcagaaaaaggaacttagttaagctattttcccacttactgattttcagctctagcatatgagaacctagacttaataccagataaaatggaagggactttgacttggggatcttctctaccctgattttatgatctgagggtcttctctgccttaaaatcagtgtctttgggcacatcatttcatctctctgtttttgttttttaaataatattaattaataataataatgatggtagattggaatggtgtttcctgagcctcaacttcagatccactgaaccgaattcctagaggtagagcttgtgaagctttgttgattacacacacacacacaaacacacacaaaacttctggggtaattctaacaatgagccaaacaacttggaaccagtggacaggtagtgtctgaagtcccttccagctaacattctgataatctgtcagtgatccatgagtcccgaagttagagaaatataaaggctgggccttgggtaatcaggggagttaaaactagctcagtggtaatcttttcccatgtgagcgaacaagccacgcgggtgtttgaggaagtacattttcaacagagagaacaggaagtacagagatcttaaggcaggaacatgcctggtgtgcatcctaaaaagaatattgcctcagggcaaagatgatttggattcagaaagtaaatgatccttcgtgggaatgtgaatggggtggaggtgtactggtgg

SEQ ID NO: 43455 - DNA, 824 bp, Homo sapiens
tttttacacctcagaaggacatgcagaggaaggtcctggaaggaagagaatgttatcctaacttgtttgctactggtatcaaggtgatagtgcagtcgagttggatgagcacagaatttagagccaggagactgattttagtcctgacttagccacttactggacataaccttgttaaagtctcctaacttccgtgtaaaacgttatataatacagactctcacaggacatttgagaaggtcagctcagttgaattctgtaaaagtgtttggtaaactctaaaatattaggcaattatttgtgcatgtgctgtgcagttcttatcaccagccttcccctgcctacatgcaaacaccagaccttctggaattggtgtctctaggctctgcatgaattatgcagtaaaaaaggcagttatttaatatgatgggaatccatctgatacaccactagaacagcaatcataaactgaaagacatacatgggtttaatcaatgagaaaaggggttgcttttttagagagaaactttctcctgtctttgggggagggaggggatgaaggacaggaaaatgtagtgtacaagtgttgagaagaaagctcaataaatgccattgtctaggccaaactacatatttgaaaactgaatctgaatgcctggaattcattaaggtggtttccctgtaggagttcacccactgcctcatgctttagctaccaagaagcctcttaaaggaaacagtagttaagggcttgtcttaaagcaatgatagattctttgggtttaaaaaaatagggtgttcctgttgtagtcctcatctttgtt

SEQ ID NO: 43456 - DNA, 4607 bp, Homo sapiens
atctgattttttttacttttaacaaaatcaacatatgtactatgttataataatatatagcttcagagcctttttaatgacctcattttatttatttatttatttagagacggaatctccctctgtcacccaggctggagtgcagtggtgcgatctcggctcactgcaacctctgtctcccaagttcaagcgattctcctgcctcagcctcctgagtagctaggattatgggtgcccactagtgcgcctggctaatttttgtatttttagtagagatggggtttcaccgtgttggccatggttggccaggttggtcttgaactcctgacctcaagtgttctgcctgcctcggccttgtgtaattttaaaatttagtggtctgggtcatagtcatcagactgtgttgattgtaagtgacagtgaactaattccaggaatagtgcttactcaggaacagctggctttgggtactgccaggaatctgtttcattctattgctcacctctactttcctccacgcagacttttgctgacttcattttcagacaggcccttacttcatgatggcaaaaatagccaccaccaactccagggttaccatttacaagctgaacaactgagttttggggctggctcacacagccagcttgggtcatgtggccatgtctcattagccagacctgaaacatggactccctctggactgagagtagagggaagatggtttgaaaataaacttggcttattattatcaagattaggaggaaaggatgctgggcgtgataacttagggcacagcttgttgaaagaaggtacaaccagaactttatatgttttgccgtagggatttaagaaaacaaatctgctacccaaaaagaacatgttcagtattaactgcctgaaaaaggaaaagaccaaaaatgcacaatttgtgattgagtaccagacactgtattaattttctttaaaaatcataacattaccaatcctctgaggcaattattgccattttggagcacttactgtgtgtcacactttgtgtgaggcactttacgctttgtaggacagctttgtgagggcagccttaatattctcattgtactgatgaagaactaggaggccagaggcatttgggtttgaatccagatgtgtcttatttcatttatatcatctcctagttttacagtttgcttttgttagtctgtctgtgtgtccatctatcctcctctgtcctgtcagagctccccctcagcttctctaagcaaggccccctttcacctcgggcacctctccagtccattgggaaaccggctcaactctgtcctctgagcatgccaccagtgtctgtcccctttcccccacctctgctgctggagctctagccttcattatgaagggccagaactcttattatgaattctgtttggccttcctgcttccagtcttcatctcttccacccccattttccttaacagccagattgaactttcaaaaagtgcagacctgatcttatcaagcgtctgttttccttggcttctcatggagggagaacatgatcctggcccctgcctgccgtcctttccacctcacggcactcactctctggccttttttcttcttccttctccagtgcagcagtcttacaccttaccacctccttctctgttcctatggtgcgcatcatttgttttgcttcttcaggtctgtgtttacatgtcacttcaagtccttagggacttctctgtccctttcccctaccccttcaatctggaaatctgaagctgtttactgctcctttttgtacttttcacagtttgtagtgatacattcgtctgtgattatttgcctaacattccccactgaatcatgaactccataagggtggggaccaggtctgtctggttaattaattgctgagtctctagcagcaaccacagtgcctggaacatcacagacactcaaatatgtgttgactggactgatgggttaaaaactgagtatatccaaagcagtgcacttttaaatgattatcttttctgtagttccctcactctgtaatttattaagaatgaacctatgttttcctcagagcagttttatcccagttgcttttggtttgcttagaaacatgcttcctttcttgctgactgtaattgctagcaattccagtgctctacagtgatgcacttggtttctgaaactcctggattagagctagccataatcggggaagataataaattttagggtatgtaattcctcttaatttgacctgagtgtgggtgagggaaagaagagaaggctctaccgacttgctccaaatggttccctgcccaataacacagaagccttaacactcctttaactcggatatgctgtccccagaacccaggcatccaaatttagtcttctctgcatgtccttgtgatttctgactgccatctgtgtccaaattggctttggaaggagaagctttctctccagtgatttattatttaaagcagtcttctcagcccttatcatgaaaactggcaattttcatatggccctttggaatccacatacaaggctatctgtcccaggctcactggtgccccagttctgaggggatcactagccctgcatgcttgtggccttttgatgtgcacacaggcatggtgactgggaagcttatctgtctgtgatcatctcatgtgctgcagataacataacttcttttgccctttttaatccacagttggtcatgttcggagtttgacctgaatgagattcgcctgatagtttaccaggactgtgacaggagaggcagacaagtcttgtttgactctaaagctgttcaaaagattgaggaggtgacagctcaggtatgaaatgctgatttgctttctccttttcttttgtgcttttaaccacccttctgatcaatcatttattaatctatcatcttctctttgagttatattatacagtgccattaatggttcagaagaaacataagcaagcattgaatcctttaatcaaagccctacccccaacaggcatgagtatgctcactgctaaacacaagtgaaactgttagcaagtaatcatggcaggagctaagcagtgtactattaatagtactagaggtaaatttgctggtgagttgcaatccagtaagattttgatgccaagtgagtgcctcaaatgtaatgggaaagcagaactctaaaattcataaagtgataaagtgttagtgtgaagatcattctgtccagtgtttctcatggataataataagtagcactgggttaaacaaaattaaacagctttgcttatttacaggacttccatatgcaaacctgcattgttatcttcaaaaaggattgtttctcaaacccttctgaccaggggagcttttatttatttcccattttttttgtggagagttgggtggtagtggtggtggtggtggtggtgtagggtgggcgacaagcaatgggtagagtgaggatagagcagctcttgatcccttggaaccagaatgggaatggtaaagtaacatgtttaaggtgaggagagtctgatcctttctgggtcttttttggatatgataccagggtacttgtaaattcactttagacctttcattctcttttcagtatttgttcagatgcctacaaattaaataaatccacttgtattcattctttttatgttcaataagttgctacccatactgaccaaatactggcagtttgtagaatgtgcagctaagtaaatgaacagtttataacgcagtctttgtctcatcagggccaaggggttgttttcctgcttttgataaggatcatttctgcaggaaggaagtgtttggttaaacacagtttagctgggtggattccacagtgttttaaagtggagttctgccaggtggctaatcattacagtagttgttgggcttgttaggtaggtgaagggagggagggggaaaccaagaaatctctcaggtgattcactgtaggctttccaggttagatttgtaacagaaatttaggtgagccagcacttgaccctttggtggacaggagatggtttacctcttagtttcttgaattatttcccatttctctgaaggcctcacatggatggtctagttgagcagctatcactggggctgctcatagtggtggcaggtggaggggaaaagaaacacaagttttcaaaaggaactggaatcttcagtgtaccagagcactgataatgctggaatctggaaacataggctttcttagaagcattcatctaaccaaaaaggcatcttaggttcaggaggtttgtagcttgcccaaggctacaaaagaatccagtcagtgctctattcactacaccaggtggtttctccaattatagactgttcagcattgtactccagccaaagggtctagcagtctgaagcagtggcacctcgtgtcacttaggccctctgaggggctgtgtttctggcttaagtgagattgagtaacagctttatctttagcgtgttgagggagtgctgggtgctcaggaataatcaagtgccactttgaatgccatcattgctggagtgacagttgtggtccagcac

SEQ ID NO: 43457 - DNA, 1340 bp, Homo sapiens
aatttaatagctttcctgaccataacacttttggcatatgtatgtttaataataaaatctaggtttatttgaaatcatacaagctatgagtagagccctaagtaaataagttgaagaccagggggcagaaggctaattctcatattctgcccagcatgagtaattgttatgttgtaatttatagtaaagaaaatggaggaagcagttcctttctatatttggcagagataggagactagatgatggagttagaaagagaaaatgtatcgccagtctagggctctcatttgcaatgttaggtcctttgtgttggtgtttttgtaggaaaaaactattttatttgtactcttgctgttagtagctatttggtagctacactggcttttcacagtagttaagtaagagacatggttaggccatttttgtgaggcttaccccacaagacaaattaaatatatatttagaagttttgggcttcgtggctgtcatcatagaagccgagtctctcaaaagaatcaggttttttgaaaattttactgtagcagaagagaggtaagtgtttctgcttggaggattttcagagagcttaatcatatggcttaatctgagcatttagaagagttacttgatctagtagttttaatagccctgggaaagtaatcctggaagtaccagtacatgttcaaatgtttactcttgttcaatagaataccacgtagtatcattcctcttttgatgtcttatctattggtatctgactatgttttggataaacagatatttcacattccttcctaaatatcatcaatttgacataaaacgattcaaaggaaaaggacaagagtaacaacgggaaatttaaattacttgtagctttcatttgagcttctttccatgttaggataataccgtgtggcaggcaagctgatgttctcatcttcatgccagggaattatagaaaagaatgaactaaaggcagagatactcttagttatgactgaatgttctgggtgtcatccccagtcattacagttgaccttcagtgtgactcactgatgcatggcaacttttcaaacttatatttccctccaggtcaactgatgagacattcagcttggctgaagaaacctgtagctctaatccagctatggttaggaggaagaaaattgccataagcatcatcttttccctatgtgagaaagaagaagcacaaaggaatttccaggacttcttcttttctcattttcccctgtttgaatctcacatgaacaggctgaagagtgcaattgaaaaggtaataaggatgtaatccaaagtcaaatagagaagtgattgtgggg

SEQ ID NO: 43458 - DNA, 544 bp, Homo sapiens
cccccaggtgctctgtcccaaagagatgggggttttatctataaacccctaactggggctgctgcctttttttcagagatgccctgcccagagaggaggaatctagagaggcagtctggccccagtggccttgctgagagctgcagtgggctccgcccagtttgaacttccaggcagctttgtttacactgtgaggctaaaccgcttactcaagtctcagcaatggtggatgcccctcccccaaccaacctcaaacgtcccaggtcgacctcagactgctgtgctggcagtgagaatttcaagccagtggatcttagcttgctggctctgtgggcatgggacccactgagccagaccactcggctccctggcttcagccccctttccaggggagtgaaccgttctgtctcgctagcattccgggtgccactgaggtatggaaaaaaaactcttgcagctagctcagtgtctgcccaaatggccgcccagttttgtgcttgaaacccagggccctgattgtgtacacaccaaagggaatctcctg

SEQ ID NO: 43459 - DNA, 643 bp, Homo sapiens
tattaataattttaaagcacccttgcaaggactcttgatggtttatagtcatcaaatatcacatagagccgcatggctgtccctcatcgctgggcggatgaacagttgggaaaccacaccagccacagacataatgacaccaatgagaagctatatgccgcagataagaccttccccacaactgaaagctgaaattttaccaaattcaaaatctttgaactagtgtgacccctaccaggaagatggacataagactcataacataacttgtctgttatttttttttctgtagtcttctgttcagtacatgaactttgcctggacctaaaatcttagctcatctgtttacttgtaatttgcagtccatgctttgatttcatcaccacaaatcattttgttaggtccaggagctgttccctcggtaaacctggtctcctgaaacatgctgtaagagatacaggtctctccaaaatgctaagaaattatagatgacagaccagtgaattgatagtgcctctttctcacacactttagatgtgtgtgagatatttgagatgtatctttcataatttatgtgaagaatttactgtaaaaggtcatattctgaaatgaactgatttttcccccaacttggcatcaagta

SEQ ID NO: 43460 - DNA, 1294 bp, Homo sapiens
aggctctccaattctgacatttaccacagaatgaactcatggcccggaaaatttttaaatgctgcatttcaattcagttggtacaattatgcaatgggcctaaccactgaaagaactgaaaggctaggtttgtcaaatttctgaatgagccaaataaacagcaggctaaagcatccttgctacataccttagttctattcttaaatgataaactttctcatttttttcatttttctttttaataaagacaaagtcttgctgtgttgcccagactgatcttgaattcctggccccaagtgatcctcctactctggacacccaaagtgctgggattacaggcatgagtcccgtgcctggactttgttattattctttttgtttttttgtagtcaaactttcctgtggacaacctgaaagcaggggcagtggttactaattaaactgcttccaataataaactcgtgggattattgtgtcaactaggtaactgatataattatgcctcaaattataaattggaattcagtcacaaagaattagagaattcacctgacacttatgcacagcttaactgatggcttaaataatatatttggcaccttaccacatgcccaatactggctcagtgtgaacaaaggtcattatgacatggcctctgtttttctggcctcccatacaatctaaagaccatgctcacctcctttagaaaatattttctgagctggacatggtggctcaggcctgtaattccagcactttgggaggccgaggcaggtggatcacaaggtcaacagatcaagaccatcctggccaacatagtgaaaccctgtctctactaaaaatacaaaaattagctgggcgtggtggcgtgtgcctgtagtcccagctactcaggaggctgaggcaggagaatcgcttgaacccgggagacggaggttgcagtgagctgagattgcaccaccgcactccagcctggcaacagagtgagactccatctcaaaaaaaaaaaaaaaaaaaaaaagagaaaacattttctgttcttcatggcagacattattattcactgaaactttaaagtacaatttgatctgtttcatttgtgtgctgaggtttcctagccgtttcgtgactatgtgtcttgtctctttgcttgacagttaacccgtttttcgtccctattagagactcgcacgacgtctcgtttgctttggaacctctttagcattctggacagtgcaatgcaccaagcaaatgcatagtaatatttgctgaaagaagactgcttgctcattaa

SEQ ID NO: 43461 - DNA, 1314 bp, Homo sapiens
gctcaccattcacatagatagtctctagatatttcatgaaaaaaattagtaagatttgtgtatatagaactaataaaaatccatttgagtgctgcaagtaataggaaatccattgcaaaattgattaaacaattaaggaaaattatgtcccataataagatcttctgaggcaggaggaatccagggttgctttcttcagtagctcaatgatgtcttcggaatcacaggcttttccatctgtgtgcactgcatcctctccttacccctggccagttccccttgaggtcccaaggaggctgtcacggtttcagttatcataggcagatacaatgatgttcaagagggtgtgtgtatgtttaatcagcagggaagcccttcctagaaaacctcagataaattcctctctcattttattcaccaggattgagtcattcgtctcttcctaaaaccaagagctggcaagggaactggaatttcgatgactggcttggatgattcagaatttaatcctgagtcatgtgaggtcagggtagacacccaaataaaatggaagctctctggaaagggagaagagtgtgctggcctctgggtagtcagctacaaagcaaaaaggaaaacattcctcagagaaaacacacacacacaaacacacagctacaatgcaactttttactgctgctgtgcaatttacttttaagaccacatgaaattatttgaagttacttcttttctcctctttggtctctgttgctagctaaatcataattagtttggtgttcgtactatcatacttgtgaatatggcttttttttttttttttgagatgaagcttcgctcttgttgcccaggctggagtacaatggcacaatcttagctcactgcaacctctgcctcctgggttccagcgattctcctgcctcagcctctgaagtagctgggattacaggcatgcgccaccacacccagctaattttgtaattttaatagagacagggtttcactgtgttggtcaggctggtctcaaactcctgacctcaggtgatctgcccacctcaaaagtggtgggattacaggtgtaagccaccggacccagccaaggatatgggtttatactaaagcaatgcaaagaaatgaaggcaagccaggggctcattcagaaactatcctcacaaaaggcaagggagagggcaattattggtattcctccatattcaagctctttagttgttgttgttattgtttagagacagggtctcactctgttgccctggctggagtgcagtggcacaatcctgactcactgcagccttgaac

SEQ ID NO: 43462 - DNA, 1630 bp, Homo sapiens
atttctggttgcttctgcagcagagaccatgggcaaaatcccggtgctgaaataaacatatgccctgatgtattagtggacacgttgttaatctactttgtatggctggttggttgtttgaaaatcacataaatacagccctaaattcagttatactgtacacagtattggcagagatacatggtttccaggatgttctaagggagctttggataggtgcagccttcagaggtcagcaggtatgaccttgcactctatgtgggctccccttcacagcacgtgttcatccaactgacaaaatatttccagtaacaaaagcacattctatttttggacaggtctaattattcttccatacattgaactaaaatctgccttcctgtaacagtcacacagtagtctgaattctgaattctggtaaagaatccccgtctcattgaaatagcccatgagatcccaggaaagggtcactttaggctcttttgcaaattaggcttccccacttctttcaggcgttcatgtaacaacattcccaggctctgcaccactctgcctcttgatgctcttcaatttattaacatctggcttaaaatgtggcatgcataaccaaaaataatgctaccatgtggcccaatcggggcagcgtttgtttctggaacacagctctctgttaatgcagcctgttattgtgtcagctttgttggcaactgagctaacctccgggcacatctccagtctgcagtcagctccacgctccacaccaacctattgcataatgtcttacctatcctctacttggattgttgatttttaaactctaagtgcaagcttcatatttagtcctattaaattataactttgtgagtttcagacccaattctaaaatagtaacatcttttacagtccaaattgtcatcgaattttactctctcttcttcctaggtttatatgttcagcaaacataaccacatgatgtctctctttgtataaaatcctgaggaaactgttgaacaaaacagagctgattcctgttcccctccctcactcaattatttacctcaaagcttgaaactagaataaaatgtccaagtgaagtaccagttaaatattgactttcacttgccaattttacttcaatctgtctttcaactgaagtagcctgaaaaatgaaaatgtaatcattctaaataattcttagggaacatatagaatgcctaatgggtattaaatatttgaaatataaatccccattctttgatgtgtgcaaaaggaggtagttaaagaatagtatagagtaattaaaagcttttatcatgatctgggattaattgaagtatttagagagtggtgatgccatactgaaaacaactattacaacatttagggttttgtaattttctctgggttaattaatgcttataaaaattattctggctggacgcggtggctcacgcctgtaatcccagcactttgggaggccaaggtggggtggttcacctgaggtcgggagttcaagaccatcctgactaacatggagaaaccctgtctctactgaaaatacaaaaatacatgccgggcatggtggcacatgcctgttatcccagctacaggggaggctgaggcaggagaa

SEQ ID NO: 43463 - DNA, 728 bp, Homo sapiens
cgtcatttatgtcaggggttccaattttttggcttccctgggttacattggaagaagaattatctcaggccacacataaaatacactaacactaaccatagctgacgagctaaaaaaaaaaaaattcaaaaacatttcatgttttaagaaagcttacaaatttgtgttgggtcacattcgaagccattctaggctgcatgcagcccgtgggccactggttggacaagcttgatttacatgtacctttccataactcttaaattttcattatgcattgcaacttaattttttccatgtgttataactacagtgatggtaataaaattacatttttactgaattacaggaaaatcagctttggggtttcgtaagtcctgcaagactgtaaataatttaacaatatcgtcagatgttgactgactctaaactagcagaattggaaactcccagatttattttgcctctgtctctttcccttccttggctaatatacaaatgcaaggaatgcctgtgtcctaacacacagtaaatatttgtgaataaatgaatatatgtgtgtatttgcatgttatgaaaacaattcctttactgaaggaaaggaaaaatgcagtgcctcatgcaaaccagtcatgtgcagacctctaagcaacatattttaggatagcattacattattgtaggaatagttcagtttttaaaatacagataataagtttatatttggaaag

SEQ ID NO: 43464 - DNA, 1072 bp, Homo sapiens
actacatgtgcatgtcaccacactcagctaattattctatttttagaagagacgggctttcaccatgttggccagcctggcctcgaactcttgaccttaagtgatccacccaccttggcctcccaaagtgctgggattacaggcgtgagcaactacgcccagcccttcagctgtttatagtgctgcttcagcctgttaagcatcaaagctgactctatacaacccatcacatggtggaagaatgatcgatccataagaggtgtggtaaggcggggttgatggacagagagttggaagttatccagactttgacctttggttgcctcattctttcattcctgtattctttgaggccttttagagcactccacttcagtgaccatgacttgatcagttttgttagaccacttatgctctggaacctagcatttagaaaagttaaaaatattatttgtgtttttcaaaaaaatctaatcttgtgcattttatagtttttaaaaaaattataaaaagtagatttttatacacaaactgaataatcaacttctaaataaatttgctccaaaaagttacttaatcctaacagaaaaggaaaaccccatacatatatacatttatttgtgtctgaaaccatatactcatctatttaagcaagacttttcttgattaattttgtatttaaaaaatttcctgattctttatattttctctgattttaagggcaaaatttatgctagattttaaattagaaacattcttctcattcctgccttgttccattgattgattaaatttttttttatctcctagtgcttatcatacatgcttagaaaacacagggtttccatcagtcatctatcttggttgctttatctgttgagtcatagtcacattgccacagattcttggtaatctgaaaaataccaagatgctcttagataactgaaaaccccagcgaagtagtatttcctgcgctgtaccaaacaagctctgcagaaaagtaactaggctggagccagtagttgacagtgaggttgcccaatcccagttctatggagagccctgcctctgg

SEQ ID NO: 43465 - DNA, 962 bp, Homo sapiens
ttcaaatatgtgaaccatgatatgatagcatgtaacagaatggcatgtaatagagaaagcacaaagagggaaaataaaagagctcctgctcccagtctttagagatgaggatgcttaccgcgtgctggtgtgcttaccttccttcagagatgattgttcatgcttttagcgatgttttgcagtctgtaaaggtactgttttgcctttttgcctttctctaggccacctgaactcgcttaagtaatcatacctcctccaaagcatggtatttgagaacagacctggcctctgtttcagaaggacataattgaccgttttgtgtaagcacaaaagggggtggggtaggagagctttcccgagcctgtgctatctcctgttgaagcccatttgttagcctcgtaggcagggcgcgctggaatgcctggcaagtgcaagtacagtgaaatgccgtcattgtgctgctctcacggcgcatgttttcccacgtacaacattcaaaatgttcagttccctggaaaatgttctaaagaagttgcactgtattaggctttgtcttctcgtctttcacaaaggcagacagccctctgttgagaacagcctttccataggcatttctcttggctcagagccacatggacgtaacctagagccaccgagccacaagaaaatcttggaccagaagcagggggaggggacgctttgcacggtttttcctcccacattcaatatacacaaggatcccgaattgaaaatgcctatcagtttgcaaaggatgatattgtcaaagaaatttgtttacaatgataactaataattttttctctccccttccactttttttttttttttttttttttgagagagtgtccctatgttgcccaggttggactctaacttctaggctcaagtgatcctcctgcctcagcctccagacttagctggcattacagatatgcgacacc

SEQ ID NO: 43466 - DNA, 473 bp, Homo sapiens
gtttccaggactcctggcatacctgactgttgtgtgcagtgcaccagccattgagtgggccgagtgaatttccagtagaattctaatatatcctgaggtttccagaataggaaccaagacagatttccagttttaccagctgggtcagataagaaaattgactcaagaattggaactttagtgaggagttcaattaccaggattggacaaagagggacacggattcagaggcctagtggggaggggagcagcactgcttccctgccagtccaataatactaagttccaaatgaggtcattgtacttgctgccaacatcaggaactaaagtggcgcccagcctagagtggcagccctggacctggctgttaaggcagatgtaatctactgtcagtggagtcagaaaacagaagtttagtgtttagagctggtgactacacaggaaaaatgattgtttcccagacactggaagag

SEQ ID NO: 43467 - DNA, 1017 bp, Homo sapiens
ttttgaggcttgacatttaaaaaatggatctgagttaacttttggcagtagttgttgttagaataatatacaggagattgtatttaggtgatgccttcagagaatcctaaaaggtggctggtagaacctgtgtgtggtttctggtatctcaggtaaagttgtccagagtgagcttcctcttgaggacaaaggacaagaggaagaacaggaggagccttggatttacagattctaccatttactcacaagaataataaaaattcaaaacacctgctgtctctcaggatcaaaaagcaacacagcgatttcttttaaacaaaagcaaacacagggcagcaatgagaaattcattatgaaagaaaatgaagcaagtatctggacttgggcccttcccaagccctgaaaactaaagtctgaacatcctgatagatgagtcactgcctccttcctgctaatgtttgtacctgagaattcttttttttcttttgtcaccatgagggaaagaattcttttttcctgttggctcagtagaagagactggaggattctactccagtttctcaagctgtggagttgtggtggatgatgatgtcagaaaagagagagagattccaaaatcctgggttgcaggttggaatttgactgctttcccacaaaaacaacagggagctagagttctttggttcagctgcctgggggttagtagacctgcaaggtcctgctaggaacctaactaccatttttagcattgtttccataggaattttttcttctaagttccaaatgaattcacaaatacctgttttagaagtaacaatagcagttagagccagacatctgtggctcacccctgtagtcccagcactttggtaggccaaggtgggtggatcacttgggcccaaggagtttgagaccagcctgggcaacatggcaaagcccccgctatacaaaaaatacagaaattagctaggtgttgtggcgcatgcctgtagtcatagccactcaggaatctgaggt

SEQ ID NO: 43468 - DNA, 3315 bp, Homo sapiens
gaccttaacacacctctacgtggccggggcaaggagtgggggggagctgagggaatcagcaggagcggtgacatcttgaaggacgaggtattgtttctgcaccatgtgggtccggtttggaaatttgagcatctagaggaggaggcttgttctgtccaaggcaaagccagacctaccaataaatgtttctgattatgtcacagaacttgccatcctggtctgtcgctaaggagtgatcaactttaaatctggagtgtttgttggtctaggggtggtagtgggtctggtgttgaaacctctctgcctaatttcgtggtcattttactgtctgaggtgccagagtgggcttggaaagcaggggagggtgcagcaaattacaaataagcaaaataaatcctaagaggatttatcgccacagaagcaactcggacgcaactcttgggctcaaaaagaatgcccagtacagcccgggctggtgggccggtcttttgcccaaggttagctttcagcccctgggcggcggcgtggcgccaggagcgggcggggagcagcgacccgacgcggctgggtctcctagtagggcgcgtcgggtgtggggagggggcgcggcgtgagacagtgggggacactgcgtgaggaaagccctgcgcttctctccggggcaccaggacttgcgccccctcttcgggtccaggccgcgcgcgggacccgacagcccggccgagggctccgcgacccacttgcggccagagcgctgctcacctgggcgccgccgaaggtgccgctcagacgcgagggcgcggccgctggcgggcggggagcggggaggcgggacccggcgcgacggggctgccccgccccccgatgatgcggcggccgccgactcgcccccacgctgtcactcattcctcaccatggttgcagcacaaagcaacaagccccagaggccgcttcctccctgaggagcggctccggcggccggagaaggcgcaggaggaggaagaggcggaggaagaggaggggaatcgccgcttcccaaacactctctccgagggggctgtgcgcggctctcggctttcggccctcggacgcccgcgccgggagtccgaacccgggctgtccgcggccccctcttccccctcctccgccccgcgcagacgaggaacaaagttgccgagagcgactgggccggagggctgcagcccgggccgggtgctctggccgcggcggcgccggcgccggggcagctccgctccgggcgcgctgatggggggaggcggcggcggcggagcccacagcggcggcccgagcagcagaggcggcggcggcggcggctgggcggcccgaggggatgcagcagcagtcgggagggacggccgagcccagtagacagagaccaggagcggcggccgaggcgatcgggcttcgcagcgcccggacctgagccagacccacctggtccgtcctcccgaccggcggccgaggcgcccgaggactggggacgcggaagatccaagtgattctcggagacccctgggcggcggctgcgcaagcccctgagaggagggggcgaccctcagcgccgtgggggaggaggctccgcctgcccacagccctccccactgccactcgtacctccctaaaaataactcgggcccgctggggccaggaggagccgccactgtcccccgagtggagccggggaggcgtgtcgagccagggccggaggaagccggcggagcggcgaggaagaggaggaggaggaggaaggggagttccgcctgcgggccgcatcgcacggcagcctaggggcgccgcgaccctcccggctgcgtccagcccctcgcgcctgtaccgcgctctcggccgccgggcccagccgagccgcccccccgcgggccccgcgccgccgccgccgcggtttggctgattagtcgcgggcgggcgggcgggcgcagcgcgcagggcggaggcagcagcggcgctgggccgggaggaggccggccagggtgcggagcggccccggcccgctcccagaggggagatggcgtcctacgtagataacagcttccgccaggcggtgatgaagaatccccccgaaaggaccccccaggtgagaacgcggcggccgcctgcccttggccggatttctgcctcgcaggctgcgtcttcccctgtccccccacctccttcctgacacagttcgccccgagcaccccacttcttgcatcaggacccccaacttccaaaggcatcccacctccgagtcttttactccgcctatcctggttttatttttccctctccttgacattctgctccttaactcttccctccccatgactgacctttcccactatgttgcccagccgagagagagagagagagagagagagagagagagagagggagagacagagagagagagagagagagtgtgtgtgtgtgtgtgtatgtgtgtgaatgtgtgaattctctagctttccctctccccagccgccctccgtggcctctgaatctcaggggatggagtctcatctcccctcgggcagcgactcttgctccctctgactccagatccgttcctccccttgcaagtgacccttggagttcagtggtgtttgaaaggtataggaggaaacctgtacggttgtgctaaagacaaatccatgctgaccttcagtaaaacattgaggtgtttgtatgtttactgttttgcttttattttttaaaggatactgctttcaattgaagggaaaaaaagttgaatagctaagttagtgcttttagtttaaattgcagacatagctgcagagcaggcatgttccagtacaccctcgggaagggcaccctgcggattcttttggtgttgcacaaccttgtcaaaattagataagtttgttaacctttatacatttgtttacctgcaggcttactcttctcttacttatagcggctgatagggttggatttggttgtctcaagttttactggagagggggaaattttataaaaatgtggtagcttaattttctccgcctttagttgctgactggataatgacgcatattcctaagcgttgggatggtgactataggagatcctgcctgccaaccctcttaagacaaataagccctcctgatccttgggaccatcagacatttaggatctaatgcttgaaagtgttgcttcgcttgttagatgttggatgccatctgttcaaatccaaatgctctccttctctgatgttgattattatttactgtggggagagcataataaaatagactcttcccctggctgcctttggacaag

SEQ ID NO: 43469 - DNA, 567 bp, Homo sapiens
aaaataaaaaatacaaacgctttgcaacccaatctaaaacaacataagagaaagtcttcctcctgtataccactgttccaaatttcctaattcctttttatatacttgaataaaaatttttataatcctatcgggatatttagatatattttgtaagttaaacaaatgcccagactgggcagtcgtttcatacacatagttcttgcctttccttttaaatatttccacgagatgattcaaaggtcagcctcattctgtccagcagcacagtattcccctggatacctcattatttatcttagcagtcccgaaggatgaacatttagcttgtttctggattccatgtccccttacacatagtgctgtggtgaatatcattgtgtgtatgtgtatgtgtgtttgtagatgctttttgtgagtagatgcatagcttaggtccctggtagtggaattatggagactaagtgtgtatatatatatatttatatatattttttaacattttggtagatattgccaaatggctcattgagaagcctgtaccagtttatatttccaccaacagtg

SEQ ID NO: 43470 - DNA, 412 bp, Homo sapiens
acctttaacttgaacaacaataatgttccacatgccagtgttcataaaagaaagtgcctactacacgtcaaggcactgatgattcgcttagaaaatcttagatactcttattattcctattttacgggtggagagactgagccacagagaggttgagtgacttgttcagggatgccaagctggtaaatggcagtcagatactgaactcagtcagtgttgctcaagtgactcatctgcctagtggcctggcaagcagagagtatgcaggggaattgcctggaaaggtgcactgtgattacctgttctgtccacaacatcttcctacatcattttgcaaatttttcgttctataccaaggcccagagttccactagtagttctagagatatctttcatgtaaaaggagtgtctc

SEQ ID NO: 43471 - DNA, 947 bp, Homo sapiens
gagcaaaaatgaccagaactgatttctaaaatcagacattactccaggttattagtcatgtcttttcaagagattccttaccttagtgcttagtccgtactaatgagctcttttatcctgacttctgtcctaaactgctcacctgcaatgtttgatatgcgtatacttctatcttatttgtcctacaaatattattgattgcttcttatatgcttgcttagaatgtggtgctgaactaaaagagagatcctcctcatgtgctatcaaagccaagagataaaaagtgttttgagaaggttcactttgtctagtgctgcagggacattcagtaatgagagacataacctttggatttagcaacttgggagtcctatgtgacctaacaggactagtgttagtggagtggcagagctggttgaggagacaatggggaaagaagaattggtgaaacagaaaatttcatcatatcaaaaaatttcattgtgaagtagagcagggtggtggctaggacttgtaaagtcaagaggggtttgtttcttcaaagttaggagacactagcacgtgtttgtgtgttgatggaaatgatccagttgagagaggtacaaaggtgatacaggacagaggggaggtacttgcagaagtggatgaaattcccacagtggggtgggatggggtgggggaggtgttagcttttgagagagcaaaagcacttcatgctcttttataaacttaggatgagagatgtaggtcagttggtagatttgggaattccgtgatttcctgctgccaaacataaatccacactccttggcgagacatacaggacagctcaaagtgcttccagcttgcgttgcttccaacacgctctacagttactgatcgctgtggtctggacatacttttgtctaagctgttctgtctgtctgggatatccaccacattgttat

SEQ ID NO: 43472 - DNA, 657 bp, Homo sapiens
tctttcaaatatagtagagaagagctgcttgattaccactcaagcccaagaagcatgaattttaatttttctaagaacgtgcttgtgggacagtatatagaaaagactttagagtctttgtgttaggcaataaagatggtttgaagatgacatggggcaagactttcaaagtaattgcccaaggtagagattttcaaaccaggcagttattagatttgcctggcttaggatgggcaaagtactgagtcccacgccctagagattttggtttgccacatctgagttggaccttagactctcttgttttaaaagcataccagcaggtggttaatcagattcgaacagagaggctgtaggtgaatgactttaaaatcgatgtgtaactgttttaaaggtagagcaatagaagaagagaatccctggaagatctggtaaagttgaaaccagagacaggaaccttatcttaatggtctctgtgtgccaaagctaagggcctgactagtatttccatggaaaaagaagttgatggagcataatttaaaagggctaattggtggaatttagtgactgaaggttcagacaagggaagaaaaaaagtaaaagatggcttcagatctttgaatttggatgtctacagagcagttactttgacagcta

SEQ ID NO: 43473 - DNA, 616 bp, Homo sapiens
tcttcaccccaatacagctgaggtaagagccaccttttttttctcttgaagggaaaaatgacagcaaaagcagcctcttttaccttttcccatgctgttttgatttaaatttattctagtattttccatggtaatccctcaggccaggtatacagttcagcatctctttggcggagagcaactagtttgtagtacagcttgggtaaattttaataacaaaattgtattgccagcacaaagcatttgaccttgaagactcagaggagagcagacattgcagatttccctacttgccctcgacttacaagagagtagataatgaattaatagaaattgataaagagtgtctgtcaggcagccgctgaggtcatgaggctggtatgcgaaaagagtgcccatacaacatgcgaaacacatagctgcagccaggagaggtgggtgggtcattgaagcaggaaattagccgtcagatggaatgttggcctctgtacaagctacgccgcgcgcgtggactcactgggagaaaacacggggaaatggggagtgctcagtgctgcagagaaaagagctcctatagaaggtgacagcactgttggtgttagtggttcttcaaaga

SEQ ID NO: 43474 - DNA, 972 bp, Homo sapiens
tgaacaatgggtggatgtaacaatactgtgctgtgtgtgctgcaatttctggcaaaatgcagcatgttaaagctgctatagtggtctcaacctccttgctttagggggactaactctctttcttgcagttacaatcaggtatttacgttgatttaatttatacggattgggaaattgcactatagcatatgtacagaaattgaaatgtaaatcaagaaatagtttagaaaataaaatgatttctcatgctattaacagcatgcattgtaaattcatgcaaggcagttaagaatggtatgcagtgtgctgtttacccaagtttcagcttctgttgaaggatgtctatttttatatattacatcatctctgctacagaactccggtgtccactgggatttactgttctttcattccattttgaaagaaagcttgtattgatgtcataattggacccatcttttggttgcacttggaaattgaaagtaataagggtgttgtgtagcaagtcatgcaatatttcaagcgatttatttgtcgaaaagatcactgtcactttgtcttgcctctccttgtgaatactggtggctctctgtgcttgtacatgttttaaatatacttggctaaaatttagcttttaattgcaacagcgaagatgcttttcatcttcgactgtttcatttcttatcatgtgatttttttttttgtcatgagattttgcagagctacatgctgattttaaaaaaagtctctttttttttttttttttgaaaaatctactttgatattcagacctatttcctgccagtgctgaattgatcttttttacagttatctgttgtaagttgtctgttttcactgtttgaaatatcaggtgattggaaatactctcttttggttttgaatgcagttttaaaacattattaacctgaaatgcctctctgttagctggaagatattgctgacttctggaca

SEQ ID NO: 43475 - DNA, 1281 bp, Homo sapiens
taattactgtcactttcttttttttagaaagactattaaaccattttgaaaacttacatagtttgatatttatttccagacactagattttttaaaaataaaaatgtatttgttaaatattaaatttctgaagactcaataggtctatgaaagcagatagtatctttatgccattgtgtatatcctttgcacaacagataatacaggtctcagcaataccctggttgtatcatgttgatatctttggatcaaacttgcaaaattagcattatttagtatttctaggagtggcattatagatcttcctgctttaacaggtctatacaaggatatcagcacaaagaacttagtcccagacaactgtacattaattaatgggttggccgaggcttgaatgcagctgactttttagaatattttagagagaataaaactgacacttattgaaggtttatgatacaccagtctgctagatgtttactgatgtgttttgtcaatgaaactagcccacagttcagtatttccccgtcagtagataagcatgcactggccaaagaggttaagtaacatgttcaatattcatggtcactcaggtagtaaatgttagaaagccaaacataggtctttcccattcccaatctatgaaattactcatttttaaaaatgaatttaacatgtattgctttttatgttatttaaacttaaaatgtggcccaaaggagatatatatcaaataatttaaccgctttagaagtataccatttaagtgccttttgaagaaagagactggggcatagaatgtccaatgtccaatatccagaaatgatgactgagctatatttgcagcagttatggactttggttgatgaatcaatcttttcgttagaagttaagtgtttttccttttctgaccatgtatttctcattaataaagcacagctatctttttttctttttaacctttctagcttcattccaataggataagtttttactagtaagtagcaccatttcataacaaagggatgaccgtgtaactagtgtattttaaaagttaggcccactaatattataataaggaaagccaaaatcttgcagaaagatcttttgtaggtatgactgtttaatgaactgaaatcacttacttacagttgtctaaaattattcatagtttttagaggtgaaaaaaataccactcataaaatttcatcttgtgtaccagaaaatgttggaagtgttttggtaatatttaagaatattgaaaaatataagtaaatcaaa

SEQ ID NO: 43476 - DNA, 2171 bp, Homo sapiens
tcatttggccatatatacattaatcaactacctccgtgtttctatggaaacttgtataaacagttcgattgtaccatttgaggtctcagataaacattttcaatgacactttcaatggttctaataataattctactattgttcttgatgccagatatctcagatatctttcttaaagtgatagaattagttgactagcataagagagagagagtgtgtgagtgtgtgtgtgtgtgtgtgtgtgtgtgtgtgtgtgcgcgcgcgcgcgcgcgcgcatgcacataatgttttttctgaccttcagatgttggggaaattatataaaagacaaggttttgtttccaccaaaatcaactatcagaaaataagccaccttaatcttttatataatgaagttctctctcaatttagtttattgtttttaaagaaggatgtatttttccataaggaaaattaatcagaaatgaccccaagcgatcttagcttggaatgtttataattcacatgatggaattggtataagggagttaaagaagttttacatagatttaataacgaggcctgaatatgtgatctcagaattgcaattactggatattaccataaaccttgtaaagattaatttataaagcaaaaagtaaatgatggttgttgtaaagaacttgcaagaaaaatgaaaaatcagcttcctgaatgttatacagcactgtgtcatttatagacacatcactaccttaaacaaattagaaggaatgtaaactcaattggatgactcaaaaagtgagtcagctttgcaaatgtcaaagtcattgatgttggagatgcagattaaagtttcatgagtgagaaattatttacaattaatatttttcatgtgattttgaaatttgtatttcactagtaatttgatctaaatagccatttgattgttccatcaatatccatgagaattttcaggtcaattagtaaattaataaatatatttaagtttaatgcttaagtgtgtgctccctagccgttcatctggggctggaatctgtttccatcaccttttcgctgtgtgatcttgatgcaaatcacttttctgcatctgaggtttcctcctacataaaatagtcctactaatacctattttttaagagtgttgtaaaaattaagtaagctaatgtatgcaagtacttagagtagggcctgtcacatagtaactggtgtacaggtgatctaattttgttatctttggaaaaatggggcaaagcctcacattttgaaatacatggtacttagatcatgcagtttctcatcacattgacgtattcctctcttccattttcaagtgaagttcatgtaggtttcctttctactcaatgctttctttgaacattcaatggaaaaaccctcctaaaagtatttgctttgaaacattagtcaccttgtgacagacagccagttttcaaccagttcactaatattgattatttattttcctcatcggggtcccaagtgtatttaaattgtccccatttcatacacgcaagaattaattcctttctgccttgggagagggctagggtaccatatttcagtagctaattccaccacataaagatatatatttggacagcaagccatgtgaaatactcattatataagccacatcttatcaagccctctctgttacaactctaaaacattatcataatataggaaagtagcaaggaacgtttgaaatgcatcccttcccccaacccccaaaaaaacacacaacacagtggtgtttctgttcagactgtcctctgagaggcagtgtgctccgtatggcaggagcaaagctttgtggttttaccatacttagtttgtagcatatgtctgtgccaaatgcatattattttcgaggcttttgcagtcaaatataataaggcaatacacataaatgcacaaaactacgcaagttgttatcactttgagagaattctaaactacagaaatttgaatattttattataaaagagagtaattgaactataagcatatcatgaaaatgaagttatttagtttgcaaaatgtattatggtattctaagcagtgagttcctctccatataaatacatgatttatttaaaaggtaatatgtagacttttggggaaatatatagtaagtgaactaccataat

SEQ ID NO: 43477 - DNA, 956 bp, Homo sapiens
taacatgaggcttctgtcttctgagcctggtaagaagctggaagaatgttaagtaattacaaattgttaattttggcagttttctccagtagataaaagcaaataaatttttgcagacctattcttataaagcatagttacatcaacaccttaaaaagtctacctgtagtttaatcagaaaaacattaggccttatcttatcagtttattaagttattaactcatgacacatttagaaaacttttgtttcctgacattatatatatttattagcaaaataaattttatattttacaaaaatctttctctttgctttgtggaatactgatctgatatatgaagacttcaaggatgggtgttgtatctagggtatatataaaggggttatgaaaggagccaaaattactgtggtgaataatatttaaaagtccaaatgtttactttttcttgtgttcttacagagataggatttaaagaaataaaagatgatcagattataaactggtctttaaaatgagctactaaaaaatttcctgcctcatcaagctgcatgtagaaacaagtcagagtgtcagaactagtagtacctgaaatgattaatagcagaaaggaaagaaaaaggaagacagtgtgggtgtgtatgtatgtgcatgcctagagaaagagaaacaatatgaatggcttttaaaataacttgagttccagagggagtgaaagatcgtgtctatagctgggtgagtttggccacgaaagccctttctgggaatagctcaataatccattggcatctaggcttagattccagctacaggaatcatgaagctggaagggacctgcgccttgcagagtctggtccgtgatgatctgtacttaacactttagtcatttctgtgtgccaggcacttctctaagtccttcacacccatttatttattcagtcctcacaacacaggctt

SEQ ID NO: 43478 - DNA, 1148 bp, Homo sapiens
ggagggggagtggctgaatcagatgccataattatttcaggactggaaacagaattgaaatgacccagatggttaccctaatgaagctgatccaaaatgtgtgccaagaggcatcagagcatgcctttctctctgtgtgtgtgtgtgtgtgtgtgtgtttaggtgtacaagtgcaagtaggcatgcatgattgatttttggctgaagtgggcttggggttatagcaatgcaagtgtggcaggccaagatggatgtgcataggaaagcaatcacaatgcagagcctcttcctgctatggcctcgggctaggcctgactcctctcaattgcaccagcatggaaaatccgctttcctttggcttttaacatagaccatatttcctgggaatgtctggtgccttttggataaggtgcttgaggcagatcaagcagggctagggacatttaggctgctgacttgtgccagggcatttgtccaaaactctgtctctagcagaaaaacacatattgtgctgcatgctggggcgactgtgacaaccaccttgtttatggactttgttttaccaacatgaagcaacatagctgctgcaatgccacgagacaaagggcaaggacagggctcaagactgataccatatctactctggttttaaaacaatagaaagattttttttcttttcgtgaaaggacttgatatatgtaaatcttcagcaccatgctaggtacatagtatatactaattataagttagctattattattttattattcatttaacatcttagccgtggatctaactgtgcttataattcagaggtatttctttaataaagagccatgaactttgttggatatgaagggagactgatttgagaattgattatagcaactttgccaccttggataattgggactaagccttcattttctaactgtaaaacaaaattaggatgggcagagtattcctataattcttcccttggtaggggaaaaagtttcttgcctactatgtgttatgactgcgtgtgatattttatacttatgacctcatttaatcttcacaatgaatttggctttattaagagactgaaattcacagaacccaagaaatttgttaaaaacagcaattactttcatttattgagcacc

SEQ ID NO: 43479 - DNA, 590 bp, Homo sapiens
aaggaattagtaaacagggtttctccctagatgaatgtgagaaaccagatggttctatcttccataatgtatcaatttacacttagaaaatatactaaacatataacctgtcatgctgaggaaattttaggtaaattataatcaagattcctgaaaaaatacaatcagaactgtgggtgggtttgattgttgttgtttccttgtttggtgttgttcaattggagtctgggtttgaatcactttgcgtcagagcttggctctggactgaagtgaactctgagtttcataatagttgtataacctctgggcaagttgcgtgacctttactaagttttagtttcagcactttgtgataagtaataatataacatcacatatgtcaaagggctgtctggtgttcccggcaacatattaaaaattcttaattttactatttgctctccttgggcagtctcttcagttctcatggattttaaaccattttcatggtaatgaagtctctagtccaggcctcttctgtgtgctttagacttgcctaccttttaagtgattcatctccacttggatttctcaaagatatctaaataaag

SEQ ID NO: 43480 - DNA, 819 bp, Homo sapiens
cccaattaaagctaggtctacatatacagggtgaaatggaaattgaatatttagagattaattataaacactttggtaaaaacaattgttaaaacagtaaaataattcaatcaaagcaaatttttatggtttaaatttctaaatgattgctttggttctctttcctttgtgtgtataaaatatgctagagtaacgtaaggaaatcactgtgatttaatattagttagataatttttataataataaacatattctataataaaattcaaatccttaacctttgataatgcatttagctattaaatttaaatacatggaaattcaaacaagtggacattaaacctgtctcttgggagcatggactttggaacaaagctgctaagtttggatctgagctctgatatctactgtctggatgaccttcgcctagtaatgattaatcgctaattatttattctccttatcttactttccttttttgtgaaagaggatattaacagtgtttagatagaaagaagtcagacacaagagtttatatcgtatgatcctatttgcatgaaaattgaaaaatgaagttgtttaactgtagcacttgactttgttattttttgatacactatgtttgtatatatttatgggacatatatgaaattttattacatgcatagaatgtgtgataatcaggttgaggtgtttaaagtatccatcacctgagtatcatttttatgtcttgagaacatttcagggcctcaattctagctattttgaaaaatataatacaatgtccactatcaaagattagaaataatttctgctatc

SEQ ID NO: 43481 - DNA, 3409 bp, Homo sapiens
atatatacacacacacacatacatgtatatttctgatatatatgtttatatatgtatcacataccaggatatatgcctttgtgctggagagcatgtacttgtatatatgtgtaagggtctagaaaatgcaatactttacaaaagttttcaacaaactgggacatgtaattatgtaatataagtaaaatggcaagcacaataattttcttgattaataacaagcaatatcctgatatgtttttcagagcatcatcttgttagttcaattctacgtgacatgtttgtttgtttttttttctcacattcctcttcctcacccagacactgacctcatcctttgagtagccactgatactgctttttctgggaatgagccagcatcctgcttttatctcttcaccaaataccttgtgattttttgtgccactacaacatattacctgagcctgggtaatttataataagtggacattgtatttctcacagttctggaaactgagcagcccaatgtcaagatgttggcatctggtaagggccttattgctgcatcatcctatggcagaagggcaaaagagcatggggtgtggcgtggggtaaagaaagagagcagaaattattacatttttaaaatcagaaattcactcccaagacaactaacccattcctgtaataacagctttaattatgagtggagagttcttgtgacctaatcaccttttaaaggtaccacctctcaattctattgcattggggattaagtttccaacacatgaactttgggggacacattcaaaccatagcacaagtatactcgtcatactgagacccccaagcactggcctatataataagatatccattaggcttccagcattaatagtcttttctcccatgttttcttttccactgaaaaacttaaggtaactttgtctaaggcctggattattgttacatatagacagtctcaatattgagaagacagtttataattgacacagcttactgaattaagcactactggctccaaataagtatacatacttacttatgtagaccaaaatatatcatgtatttacatctattttcttagatgttcgtggaccaaacacaatgtgagatgacgaatggagacctcgatgcactagcaggctgttgatcttattttagagtttatttcttagagataagagggagaattcatattaggtgatcttgcattctcaaaactcagagcgtcagttttccttttctcaagtactttacaagtctactgtcctttcttttcacacaccttaaaagtacttcggataatatctaagactacatggtacatctgtttaatgagtcaccacaatctgtcattgccggaatattgtgattttcaaaaatattctgtgagtgattaactaaccacatagatatgtttatagatatccaccactaaaatgcaactgttttgttttttcacaattactaggtcaaaatgcaaaaatttgactttctaaaactgaacattcttatttatactttctttcaatttcttcttagaggaaatatgttaaagacaaagcagtagaaagtaaaaagtgctgtatggtgtacagaacgtttatgttgtgaacagttgtttaacctagttagaaattaacagcagacaaaatccagtatacacaatgtgactcagaaccaaattgtcacataaccaagacaaaggcataacggtacaacttggtgactgattctagcttagtttacatagtgacacacacactacacaagtaggcacatgtcctggtcaggacaaaggccaaggcaatcttcaaatctaggttattacagtaaaacaaaaagagagagagagacagggaaaaagaaacagaaagagaggagaggagaagtggggaggagaggggaggggaaagaactgaaagaggaggggaaggaaggcaggagagaggggagaattgaagggaaggagaggtgtgtgaatgggaggggaggagagtgaagtggccagagagttgctacatatctccaataaagaataaatatgggccaggcactgtggctcatgcttgtaatcccagcactttgggaggctaaggtgggaaaatcaattgaggtcaggagtttgaaaccagcccagccaatgtgacaaaaccccatctctactaaaaatacaaatattagctgggcatggtggtgggcacctgtaatcccagctactcaggaagctgagatgctagaattgcttgaacctcgggctgggggagaggttgcagtgagccgagattgtacccctgtactccagcctgggtgacagagtgagactctgtctcaaaaaaaaaaaaaaaaaaaaaaaaaagaataaatatggacagggctctttcactccagaagaaccagacatgtatctatttgcagaatgtcctagaatttaaaagagcactatggctatctgggtcagttataggagaatttggaaacctatggactttccttggggacaaaaaaaaaaaaaaaaaaaagccctcagattgctgcctgtctgcaaagtggacttaatccacaatgaaataagtatgaaaatgagggtgaccattgaacaaggtctgtacactaaagcccatggaccagcttcctattttgataaagttttcttggaacatagccatactcattcacttatgtattgcctagggctacttttgaactccagtggcagagactggatggcttgcaaagcctaaaatatttactacccagtactttacagaaaaagtttgcaaatccaccacctcattccctattgggaaatgtttatagcaatttgacttggccataacatctaagtatatgatcatgtgtctagtaattttcttcttgtattttacaaatttattggtccacaattgattgtcagagggaaaaggaaaagaaaagacttttcaacaaagatattttaagcagtgctgttctgcattatatatatttcagggcagggcaaatctgttcataaaattcattttattttaagcgcactgttctgatgcttattgcctgacattaaattagattcaagggatgagtcaaacttgtcctctgactggacttgaactttttcaacacttcttttgcaataacagtttgttgttattgattgctattgtgaaagcaggtttttttgataccaatataatactgttgtacagtaaattttcctaggtacatattgtgtttcagtaagactctagctcttaaagggtgtcattgcaatacaagtttataaaatttgcatataaattatgttttttaagaattaaaaatttccaaacctgaatgagatttccaaacctgaatgaggtcagcatggatctgatggaaattcatttaaccttacaagaactta

SEQ ID NO: 43482 - DNA, 1842 bp, Homo sapiens
taaaagacaggtgtgggggcaagggggaaaggctctcacaaaacgtaagaagcataagatactactaaataacactgtttggctactttcataaacacgtgttccctgcaaggattctataaattaacgtaatcatcaagagccagctttgaaacacaaaaaataatacttttcctgatccccaatgtatgtggttcaaaaaacaaagcctagatgtgatgataaaaaaaaatcagatctgacacaaaactcaactataaccacaaaagtacagcctaaactgagtagttacggaaataacctaagatcctcgggttttctaaagtctaacaaaaaatgatacgatctatacatagaacccttcaggccaccaaatttaggaaataagtcagtactaagctcagattcacaacgcgacctgctttgagaggcagcgaataaggggcagtcggagccaatacttcaacacgtgagcccggagcaccaacgacctgcccaccctccagggcccacacaagcaacctctaggctcctaggccccagccacccccgcccgtcatacaagacctctccccacagctccgggtcccttaggcacccgacctgtccgagtccgaatccgagtccgaggtctccaaggagtccggcgcccgcgcaggctctgcggctcctggggaggtgacgcagtctccgcaggccggcgattcagccggtggctgtggctgcggcgccggggtcccggccgcgacggcgttcagaacgggctgcagaggctgctccccggcaggcttaacctccacggtctgcccagcgtccggggacccctcaaacgactgtagcggcggctgtgtccctggcacaggggcagagcccggagacggagccgccggaccttccccaactccaaagtcggtgccattgaatttcagagtttccagctgagcggcggcggcctccactacctccatcgcaccgcgccagaaaccgggtcggcctcaggattggggcccctggacaagctcacggctctctccagaaatagaaaaacaacttaggcaaccgcagcaacactgcctgggcccaacttcccgcgtttctcaggtaactacacgcggaggagccaaaagacacgcccccgccatttacgcagcaacgctttccgaagagcgtgtgacgtatgtggcgcgacggcgcgacggcgctcgcgggggcaggatacatgcgtcatatcttcgaaaatcaggattagggggtcgggcgccgtggctcacgctcgtaatcccagcactttgggagaccgaggtgggcggatcacaaggtcaggagttcacagaccagcctgcccaacatggtgaaaccccatctctactaaaaatacaaaaattagctgggcatggtggcgcgtgcctgtaattcccactacttgggaggctgaggcaggagaatcgcttgaacccagcaggcggaagttggagtgagccgagaccgcgccactgcactccagcctggcgagaaagcgagactccgtctcaaaaaaaaataatcaggactagggaggccctaaatcgaccgttttcactgcgtcatgtgaaccattcaaggcctgaatgtcggattttcctattgctgcatgtgaaccaattctgcttgaagcgccaaaatgaagcagggattatacaacaggggggtgcctgaagaatgctaagttctgtacatcagaaacttgagccaggaagtcttgacaagacgctagtaacttcatgaaagttaaatgaagtttatccatcaatagatccatctgtcgatagatagggtattaaccattttttcaaaaatgtaact

SEQ ID NO: 43483 - DNA, 2049 bp, Homo sapiens
ggataaagaaactaagactcggccgggcgtggtggctcaggcctgtaatctcagcactttgggaggccgaggcggacggatcacctgagatcaggagttcgagaccagcctggccaacacggcgaaaccccgtctctactaaaaatacaaaaaaaaaaaaaaaaaaaaaaaattagccgggcgtggtggcggaggcctgtaattccagctgttcgggaggctgaggcaggagaatcgcttgaacccgggaggaagaaagaaagagggaatgagggaaggcgggaaagagggaaagaagaaaagaaaagaaaggaaagagaagaggggcggggcggggcagggcagggcagggcagggcagggcaaaaaaagactcagtgcaggaaaggacttgcccaaggtaatctagtacgtggaaaagcggagggcaggagcctgtgccgtgcaagagctccggggagccaacaccgagcggcccttttgagagggtcccagcccctgagatgcgggagcccgcaagagggaacctcttgtctgaagaggttgctgcgctctggagtcgtgctctgggacagatgggcaagctccgctcttggggccggaagcgtgtagcgtctccacccgggctccaatccccagcctcgcactcagcaccaggcagagttcagcctcccgccgcaagctcccttccgccgctcccggcgagcacgcaggtctggctgtccgttgggctagagcttaaaagcccaacacgggcgaaaaagacgcggtctcagttaacggggacgctttagagaaacgcactcgcctctcctgttccggttgggtcggcgcgggcttctcaggcgccacgtgggattcggcccgggtgctcttgtgagctgctgctcctgcggttggtgagattacctgggtctagagtgcggagctgctccgtggccacgaggacgtcaccatggtgggccccctcctgctcccccgaaccgctcggttggttccccggaaggctcttgttgagcaggcagagagggagggtgcggtttcgggaacctaggagaggggaggatgcaaagtgtttattttcagggagtgtgcggggtgcggggcgaagcctctgggaggcgagtcccaggcccaacgcctggaccttagagttccgcgtccgagtgctgaagtgctcacacgtcgccttgctcctctttgccttgtgcctaacttctcgctagtcactacttcctgggggaaacccggcacctttccattgtaacgcatcgaggagtttggcaaaacttctgagatcgctggccctacacacctctgcctctctggcctgggtagactcagtatgtgggcttagtcgcctcttcctcggcgtccgttcacctctcgttagtgccctgaatcctgccgttacgcccccattcgctccagggcactgaagcagttttgttgtttttattaaaaactgagtagatacaaaagagtgttactaaagcacatttcaagtgtaaagatgaacagtttcaggaattctcgtttacccattttgtagttttaagaaataaaacatagcctttgaaagccctgtgttaccttctttgaactttcaggaaaccttaagaagcaaacattatctaagttttgtatttataatttcactacttttctttatagttactacatatatttgtattttgaaacagtatgttgtttcttgcctattttttacgtaatcgttgtgttcttgagagtaattcttgcatagaaacatgctttataaatttttttcaattaatttttaataaaagcaaaattttaaaagtttataatctggtcagaagttacgatattgtgtccacaatgtggcctctttgtttcttttcatttttttctcttttcattgtatgccatttttgtcttacagtctggttctttcgttgtttcgcgagttttttgtgctttattttgatccactgctgacgcatattttgtactttagattgtacacatttgtgtaaattcagtgtttgcttgtcactttgcttgtggg

SEQ ID NO: 43484 - DNA, 950 bp, Homo sapiens
aaatgttaaacttattttaatgaataaaatgtatttaggttttattattaaaggttttattattttaaataaaatgtgaataaaaataagcaattctagttaggactctgtttttgagaattagctttgtgaagacctttccctgaaagaagtgtgtccagtagttcgttgagattacattaccaaagagcacagaattgggaataaaggtacctgggtcctaggtccactctgacataactagttctcttactggaactagtcatgtgacatgtctggtcttcctgtattctttagtgaaagaaggcttttgagctaatctttaacatttctctcaactttaaaagtctcttggttctcatgattcctctaatcagatatgcattgattgctgagcctatgaagtgtacgctttccttcttacccagttacagtaaaatccagattaaagagaggggaatgtcagtgttaagaagagcatattatatggtatgttggcaaagattcatttacaaaagtacacaatgtgccacgaaacacatgcagtacaaagataattttttcctttccatgtgaccttttgaaatcagaaatattatttatagaatccccccatgccatttatgcacaaaacatttctgacctttgcaaatgcaaggcatagaactctgagtgtgattttaacagtcaattaataaagattacaaagatatttacccatgtagttaaaaagaaaagtttcttaaaaaacctttaaagcagccaggtaaatagcctaataaatgataaaggtcatgttgactagagagcacactccctaactcttctaaataatcattgcagtctggctgttgtctgataagagagttaattaccccatatttcaattttaaaagcaacctgagatctcaattaaatgctcaagatgtgaaaaagtaccagtttttgtt

SEQ ID NO: 43485 - DNA, 1596 bp, Homo sapiens
atttttgtaattatgctaccattctgtactatacacgctgtaaactaggccactggttttttgtttttttgtttttgtttttgttttggtaatctggtttgaatctatcaaagatttaaaaacctttgtattcctaccatgctagattcaaaacaacacatgacactttttctctcgtgtgggtttccaggccatgatagcgacaggtctgcgggacgctggcgcccggcccgagcgtcgttgtcactccaagtccacagcctctagagccaaggcaagggacctcaccaggaagggagattcgccccctgtgcccctgggacgtccgagcggaacccatcggcccggctcccggagactcgcggggaggaagggctgtcaggccaggcgcgcatcacgtgaagctgccagttccgggatcaaagacgtaccccgcacgtgggctgggcgccagcctgggacccccgggggccgcgcgcccaccgcccaggagcccaccccagcctccactgggaaaattagcccggagccaacgtgtcgcggatcccacagccgcctggagccctcccaaagccccgcgcccaggcctccccgggcacaggcggcgcccccttcggccgcggccgcagtcgccaagggtggcttccctctctgagtctccgccccgtgcgccccggcacaagaaaaagcggattccggggccaaccgcccgccgcctccgtgcactcacgtcctccatcctgccccccgccgccatttcccgacgccggaggccgaagccctggccagcccggcctctccacctggacctgtaagcctctggccgcgaaactcgccaccttctgggacctgccaggcccctccccagacacaccccctcctgcgtccgccccgcctccggctggcccgatccccgcccccttagctccgattggctgagatggtgggaggggtgtgccggcccagaagacctggactgtgggcggtggctaccgcctgaaccacctcggttcctggggcttctggccgcagcccctcggtgcgctcttacccagagacttgagcatttaaggatgccttcctagtccaagaatttaactattttcgggctccacttgcatattttaagaacattaacttttttcggtcttgcctggttgtttgcagacacagctctacgcctaggtagaaccagcggtaaaatcctactccgccagcagagggacaggagcagaataaagattccaatttccatgacatatttacagatttctccaatgggaaacaaagcagttcggaatgcttacggcgttcgtttattaagacagagtctcgctctgtcgcccacgctggagtgccctagcacgacctcggctcactgcagcctcgaattcttggcctcctggccagttctcccacctcagcctctcaaagtactgagattacaggcgtgagccactgggcccttgtttcttttaaaattgaatttcaaaaagagaaaaaacttcaatgacattttctaaaaagctcatgattgtaaaaatgtaagcaaacaaggaaagaaattttctgttaccagctcccggagagaacttt

SEQ ID NO: 43486 - DNA, 837 bp, Homo sapiens
aatgatataatggactttgaggacttggagggaagggtgggagcaggtgagggataaaagactacacactgggtccagcatacactgttccggtgatgggttcaacaaaatctcagaaatcaccactgaagaacttttccatgcaacgaaacacccaaaaactattaaaattaaaatcataataaaataaggataataatatcagataagtagattattggttctgaaagttttattttttaaaaaaaaacacttctctggtcttcttctcttaaactgattttcccttctactttttcctatattctctttgcatattcatctgctttaaggtagttttgatgctgaattccaattcccaagtccaagtttgtacaagaaccttgactatctgttgataggtacaaaggtcaggataactcaaaccatgctaaaaggtcattgtaattcattcctatttccaaaattgcccacaaagtgttgagaattgagttacccaagttatgtgagttttttaacctctaagttaaaactgcaaatgtaccttttttttccaggggataaagatacacatgaaaagtgagaatatactgtagaaagtgggatgatactaaatggatgaactgaacagaaaactgtagctaagatgctattaaacagaaaaatgtactggagagtgggaaagtaaattaactaaaagataagaaaaaaagtttaatgtaatataaatcccaagtagatcctttcttataagaagataaaatttaacaatgatgtgaaataaatgaatttaggagctgatgatagaaaagaattaaataataaggggaaaactga

SEQ ID NO: 43487 - DNA, 1962 bp, Homo sapiens
accactctttctaaaatctctttccctctcctcatcctcatttatgtttcttcatggtaagcatcacttactgtttccgtcaccccgtctagatggacagctccacaagcagaaagacttggttttgctgtcacagccgcagcactaaaaccttgcttagcaggtgctcacttcacttgtccaaggaatggctagcatactgaggagggagagcctgcttcctgcctgggacactggacaggcaaatcacttcttcttgcctcagtgccaccctttgtaaggacactggttggttatgcctacccttcccatctccctgggtacaggcacaaatgaaaagaataacgtgtacacgcccgcgaagcagagcagcaagtggataccgagcattattacgccgtgcgttcggccgccctttttctgcacggagaaccccctccgctcccattttccagcgcccccgtcccggcgatccagagacccgctgtgggcggccgccgcccgcgtcccggcctgcgggccagcgtctgggcacgcccgccccgcacccggctggcgcccgcccgcccgcctccagaagcagaagcggcagcggcagcggcagcagcagcagcaggaggaaggggaggcgccgagggaggggtactcggccgccgcgggaggccgcatcgcagtcccgtcacagcgtcggcgccggccggggccgaacccggaagtggccgagcccgcgcgcccgccggtcccgtcgccgccgccccgcactcgggcgagcgcgggagccgcgcagtagacggagcgcgcccggccgagcgggccatggccgcgggggccgccgccgcaggtggtggcgcgcggtgaggagagcgcggcgccccctccggggcggatggaacgcggctcggcgggcgggcagtgccggcgtccgcggctggaatggtgctggctgtgttggtcggtgcctgcgttctgaagcccgagaggagccacaatggagacgccgccgctgcctcccgcgtgagtgagcgggcgggcgggctgcgccgctgcggataagcgcgccgctgcggcgcgtgtcgccggccgcgggcgcagctctggggacagccgccggggccggcgggaggtgggagatgcggggcgtgacgaggcgctgtgcccgcagtcctgagcggacgcggacggaaactcagcctggccaggcggtgacttaaaacgctgcccaggatttctggggaagggtcttccccatctcgggcggatagaagattcggggtggggctgtgcatgggtgaccctgcaggtcctgtgtgtacctccctgaaatgcatgggcacctggtgccgagtttgcctacccctttataagagatcaggctaggatgcactgagtccgttgaaaaaaggaaactggaaagtaccagtcacccgctgtctaaatgaattgatcttaggttgcttgattccccgaatttctaacaaaattaatatctgaggagcttttgcatcactctaaatgagcggcggccgttcagggcatgtgacctcttttacctggcactgcagaacgttttatccagaaatcagcatcttctgtttcgttcgtacctcgggcaaattagtagcgtatcgacctgccaggcacaggtgtcttttttctttggtacccaagtacattcaagatcactggcaacagaattactttctagaaataatagctgaaacattatgtagaagacattattgcattattcagaacaagggttttttttttaaattttagtttttagttttaaaaacatcttggtaaaagtgaactgtaaatacccaggagtttcgaaaatttcaattttggttccctcttctcttaggaaggaacaagagtcctttgaatctgacttttcaaatcgcagacaaacctcatcctgaagaatggtttaccttttcatgagagcttattcatgga

SEQ ID NO: 43488 - DNA, 989 bp, Homo sapiens
gaagtctaaaaagactgacttttaataggactattcaaatgttctttttccccactcctatgggtggggcacgggtagccttggctttctgctggtgttaatgtgagtgggtctctgttgacctgggcatgactcactaaactgcagggaaggtaacaccaagtgctccttcccttggggtgaatgacctgagttttgggacagactctggtctcgagccaattattttacttgtttgagcctgactaaaatgagaggaatggacaggatggtgtctaaggttcagtgctgctctgacattctcagcctagagatgtttttcctgcttacctgcaagccctgtggtgtccttgcctggccctaggattatttataagctccagtcttcattcatctgtttgcccctttttggatgtgaactctataactgtgagatagtaccttcttgttctttgtgtggcaccctttcagcagctgggtctggtatgtcactgggctggtagtcgatgctgattttcagaacaaagaatgacctttgaatagccagagtgttggctgccaggtctataacccggattgttttaatgaaagtgccaacaacaacagtatttttaaaaatggactgtcgttggagttcatcagacctttttaaaaatgtcattcccttccactcttaaatcttatagccattttgagtaattctttaaaaaaaaatctctaaagaggcctattccttatacagctgaaaatcattaattatttcctgtccttgcgtcaacttcctcttgcccagaaagggtagctgagagtggtttcctgacttctgggaagggaaaacttccttgttctcaccactctgcccttgggctctaacctcaaagtggtagagcaacagctgtactccgaacaatgttaatgtgaacctttggctaatggaagcaaaattttaggaataaaagtcactttcaattatggctgatgtaaggtgt

SEQ ID NO: 43489 - DNA, 4550 bp, Homo sapiens
taatcttcattgtagggaaataagtgagttgagctgctgcatcagcatttttttccagctctaagcctttaaggtttaaaataatctgacccctccatacacctacacctgctctgatttagaaaatgtaatactgtggtagaattccaaatcagaaataattgctgacatttactgatcatatcttgtatgccagagactgtgcaaagggctttacatacgttatctcatgtaatcatcataaataactcttcgaggtgtaggtattattatttcacagaagtaccagataagacagagaagtaacttatccactgctaataaaatgccaagcctagtaagtgtggcccgatagtgtgtgctattgatgctcacctgatagaggatggcaggtttgggcagagagaaaagttgggtggcagtgcagtcatcacacaaccaataggatggggagctctggagctgggatggccaagcaaagtagccctacattggtttaggggattttatacccgtttcaaccagttacttgactagctgttgcctagaaagggggtatacccgtggggagaggtgcttctctttggcagtactcagcagctggaggaatgcctgcttaggtcttgaagagggggatctgggtggtgtgccacagcatccactacaggaccaacagattcatatgcccactgcacagtatacactgagacagcagggtttgcagaagagaaagagtttagtgatggcagggtgccgagaggagatgggaggaaaccctcaaattcatctctctgaggagttctgtgctggggcttttaaggggatcctggagggcaatgggctggaaaattagggtcctcgattggctggggtaaggaggaatgaaaccatcaggatgtgggaactgcattctttggtgagtcagctccttgtcagaccagctgagtcagtagtttcatcagtacgaaggacctgaaaggttatctcaaagcacaaacttaacgtttcataatgttcaagttgttgtctatagagcagttaggggaaactataaccttgtaacagagtctacatgattctgaagcaataggcaaacaattatgaggaaggggtcagacagcaagctgacctaattattaatcctcagtgtgctgcaagcttggtttaatttcgttccccccacccctttttcccagattaacttcataaagtatataggcatggtttcagacaccactgtaaaggcatcctaaagacagggctgactctgacaaccaagggacagatcccatttcttttcatttgacgtgaccgctgtcatgatactttacaaagaatgtgtgtgccaaacatgagggatagacgaataagtacaggtcacactgaatctaaaaaagacacttttcaagagggaacttcctcaaggagatagtacctgaattgatggggcggcatggagatggctgattattccaggcagaagggccagtttgagcaaaagcatggaggaatgaaacaatagtattctgttttcagaagctgtatatatttgacacaatatacacataatcaaaacatgtgtacgccgtaaacacaatttttgtcaattataccttaataaagaaggaggaaaaagggccttcactagcccaaatgatgcccctgtgcggttttttctttaaaggcacctcttccgttaagtgaaagttttagtatattatcacatctgtacagttttattattaaaccccagtacacaatattttaatgttgagagatggtgtaaactgagctttagagctgcaaagacctgcgtcaagcccccgcccccgcccccgcccccgggcactcatcgtccagcacaacaattgcaacaacacctgggcgttctctgcccatgtagcgaggtcaaggtcctgggagccgaactctcccttgatgttcaatctttttaaatctttcccagcctttatttctcatctgcaaaatgacgataatcgcatttgaaattctccgttttcaaaatgcaggaatttattaaaggatacgtaggctggggaaacaagggagacgaaagatctaaatctaaatggtagaccagaaaaaggaaggcaagggtgtctggaaacacaaaacagtcaacatagattttaagactcatctatactctcttcttcccgggtttgggaactgcggttgctacacaggtcacatttgaaataaaagtcctgggacggcggccggcgcgacactctcccccgcacagcgcaggctctcactgggaatctgccgggaccgcagttgccaaggcgactccgcgctgcagggcgaggcggccatccgtctgtgcccgccccctcacgccgtggcgcgctctcacgcttccccgcctccgggcgctccgcggtgccgaccattggctggctctgcaggtctcactatcctcactccatccgcggagccaatggctgggaccgccaggagctcgttcgcgcgagtcacacgatgtcggcaactgcacagaccaatcaccgcgccgagaaggcggggcgggagctctcgcaggccaataacgacaggacgggccgcctggcccacccggctccacccccaagccaggcgaggcaggttccgaggttggaacacctggcgagtcctcggtgtcggtggccggcagtcatctcgcggccgttcaggtgagggggttggaggagtggctcatgagcgaggaagggggagcaggcgggctcccacccggtgctccgtgagatcgaggggagcgggttctgggtgcggatgcacgcgctgggcgggacgctggcagtggtacccgagacggggcggaaggagactggagtgaaggtgggcctaggctaaggtacgtgctagaaaggatgaaaacggagtgaaattcttaagtgatggaactaggctagggcatgtttcttgccctttaaaatgtgttgtcttcgggagacaggacgtagaagatagttgcagcacagggtgataggctggcgaaagttatacaaaagcaggaaccactagaaggaggtaagatgtagtgtgctttgggagtagtggggttgggaagggcgtccgagaggaggttactgaaggatgactaggagttgaatgggaggacatcacctgtaagggaacgatatttccgtgggcagagaggaatgaagcagtagcaaccatgagtgatcagatactgcaaaaatgtgaagtgtaggatggcgagaatgtaagaaatgaagagtgaagaagtctggaagggcctcgtgtgcatcaatcacagcggggcttgatctttatgcttagggcaagcactcccttgaactttgagtgttttaaggaggttatctctgatgtttaaatttatatagatcgtggcattgcatcttagaaataaggtttaggaagggcaagcttggaggcagggcaagtccagaaaatgaaggagctggtgaaatccgtgttaaagtgccaaaggacagagactggctgacagctaaacttcaaggtttctgagaatccacaaataactaaatttatctagtcaacctgttccagaacaggcttccagtcatttaggttgcccaagaatgagtaaaggaaaaggaaattcaattttccaagaccttgtttcccctctcctctttaattccttgttcggttagcaacagtatatccattccctcgctcctttgtgaaaagtaaattcctgaatgttaactaaaccaagtgtttctaaattgggtaagagtttgaagacttaaggcagcagaatgggagagacttaaaacgttatgtctgagaattaggcattaaaggaggcctagtatttgggcgggggttgtgaggagcacatactgaacctttggacctgttgagtgagttcatgtgcctctgaactctctgactggatatgaccagtaaacttggataattagatcctggagtttaggggagagggctagagatagagatgatggatgtcagcatatttttaaaacagaaaatagttaagatcacccaagacaatctggaatcgttagaagggagtaaggaaggcattattgggaaactttccagcttcaattctcatattttttctaatctcctggttgagtctttggagttgctgttctctctatgcaaaacccctcccttgaccctctctccctcactctattttttaatttgtcacctccttctcctgttctaggtctcagtttagatagcacctttctctagaagttcatagcactgtgtattcccccctttattgttcttatcacataatttttgatggtttggacactagttgttattcctcactaaattttatgttttatgaactcaggggtaagggcaccagctagcacaatgaatgcacaatacttgtcagagtgaatgcatttaagttccaagaaccaaggaaaggcggtatttcaagaagagaagtatcaaatcttccagattagtcaaataaactccaaaaaaaaaaaaaaaggtttattggatttggcagctggagatcc

SEQ ID NO: 43490 - DNA, 365 bp, Homo sapiens
tatttaacataaaatttaaaattacatatgtggttcatattgtatttttgttgggcagtgctgctgggaggttgctgatactggggtggtgactggaatacagagaaattggcacaggttagagttgtagaaaaacaatgccgggtgcggtggcacatgcctgcggtcacagcagtagctgatgcaagaggattgcatgagaccagcagttcaaggctagcaatttaaggccagcctgtgcaaaatagaggcaccccctcgctcaacagtaaaaataaaaaataattctaaaaagcagcaataagccctttggaccacatttgaattggtaattaaatattcaggtggtcacaacttgtagatgg

SEQ ID NO: 43491 - DNA, 549 bp, Homo sapiens
ctgagtagctggtactacaggtgcccaccaccacgcccggctaatttttcttgtattttctagtagagatggggtttaccacgttggtcaggctggccttgatctcctgacctcaaatgatccacccgccttggcctcccaaagtgttgggattataaacgtgagtcactgcacccggctggtacctactcttttacaattttaagtgcatagtacagttttgttaaccataagcacaatgttgggcaatgttggacagcagatctctagagcttactcatcttgcgtaattgaaactttatgccattgaatagtaactccaggtttcctccttgtcccagccactggcaaacatcctgctctctgttcctatgagtttgtctattttagatatctcatagaagtgtaatcatgcagtgtatgtttttctatgatcctctaggatcattcatgtcaggtactgcaaaattttcttttttaaaggctgaataatatgctattatatgcatgtaccacatttgctttatccattcatctgtccatggatat

SEQ ID NO: 43492 - DNA, 798 bp, Homo sapiens
gaatattttttccatacgcagtgacgtgggtgggtcatgggtgtctcaatgacagtaacgttcccgaaccccggaccttagctgtcatttcacctgcgtcgtcccggacgccatttggctgttgacgtggttccgagccagcaaataacgccagcagccctcccagatccacgccggcccgtctctccgccggccccctcctcgcagtggtttctcctgcagctcccctgggctccgcggccagtagtgcagcccgtggagccgcggctttgcccgtctcctctgggtggccccagtgcgcgggctgacactcattcagccggggaaggtgaggcgagtagaggctggtgcggaacttgccgcccccagcagcgccggcgggctaagcccagggccgggcagacaaaagaggccgcccgcgtaggaaggcacggccggcggcggcggagcgcagcgatggccgggcgagggggcagcgcgctgctggctctgtgcggggcactggctgcctgcgggtggctcctgggcgccgaagcccaggagcccggggcgcccgcggcgggcatgaggcggcgccggcggctgcagcaagaggacggcatctccttcgagtaccaccgctaccccgagctgcgcgaggcgctcgtgtccgtgtggctgcagtgcaccgccatcagcaggatttacacggtggggcgcagcttcgagggccgggagctcctggtcatcgagctgtccgacaaccctggcgtccatgagcctggtaagggcgctgccccctgacagccctgggggcat

SEQ ID NO: 43493 - DNA, 1513 bp, Homo sapiens
ctaatttttgtatattttgtaaagacagggttttgccatgttgcacaggctggtctcaaattccttggctcaaacaatccatctgccttggcctgccaaagtgctgggattacaggcatgagccaccacactcggcctatacttctcttaattcagtctaagatgatactgacatttatttgaagttaagtcacattgttgtttcatataaacttaaaataaatgaaaaatctgaactaagattttttgatctggtttggaagtgaaggttagagcagtcaaggatatgggagatacatgagctgaaggttaaacagatctggattatgaacaagagggtcaaattgctttaggtaagaaaaataagaagagaaggggactgagtagttgattttaatgaaataatgaacatattttgaacttcgctttctttctctgtcattgacaatgaaaatcagacacattactatggaaaaatagctaatcttaactcattttgatttccaatttttcacataaacaaaggtaaacattacttgcagaaagggaaatatgaactttgatattcatattttatttatacagacaacttctgaaatctttccatgatttggtgttgtgggaggccgaaaaccatcatttgttccaacatattgctcaacttgtcttttcaaaattcccatgacgattgtcttctgtggttaggactggatggcatttggagtttctgcctcaaaaatgtcaagatagaatatacctaagcttttatgtctcaccttgtaaatacgctcatcctggttttgctgttcttaagtaaacatctttctaggcacttacaaatggtctgattctttactctttcatttttttctcctagactatcagcctgtgaatcaactcaatcatgacttgaatttctagggtagtacataattttagttttaatttaaatcattgcaaaattccctgaggatcagtgtttttaaaaacaattcaaagatttggcttagctgggttaagggtcatcagtgtgacccaagctgatattgactatggtctgtaatgatgactcagaaaagaaaaatccccctcgtgaagcttactgaaaatttccatgatgtcaggggccacaaggctgtaagcttttggagggtgtcatagtttcttagacctcttacacattatcctgtcttagctcttttagtattctacctccttccttttcctttctccattctttccttttgaagattcattcagcaattactaagtgctcaccctgtcttctctaccagggattccagcagcactttgctatggtctatggtcaccaccaccatcactggaatcatcatcaccatcactaccatcctcaccatgactgagtgtgtgtcgtatgctgcactcagcgctagacacttgaaatgcagtgttttgaaacccaactacaatattttaaggtgagaagtgatgcagctgtcctatttaacagatgaagaaagagattcagaat

SEQ ID NO: 43494 - DNA, 928 bp, Homo sapiens
atgtccaccctgcattgttagaagctgcttggaacagttggtgtctctgaaatgttatcacctaagggtccacgtggagatgacagtgatagaagatgaagaaactttgtccagatgttctgggtaactggaatgtgaatatccacaggtatttgttgaaagaataaatgcatgccaagagaaggggaggcacagtggaaggtgagtggcacatacttgaaaatggcccaactttcaccagtaaataaaatcagcagcatgcaatcggacacttactgggcaaaaaacacttgctgatgaaatagccataacgttttcctttatactcacttaacatatctgtgttgcaattgctacaaaactaggagaaatgtggttttttcctcatgtttcttttttatataatttttcagaattaaacaatgcctagcactttgtcttgaaactgatgtggctgaaatacttttcatgaacttaggaactaactgactaaggaataggatatgcaatgaatgattgagaaatcactagttgattatcataaaccaaaactcaatacatgtacaaagtatgtaaactggaaaatgatccaatgccttttttttttttttgaatagctgaatcagtggttgagtttgtcaagtttcatgagtttgactgtcatcacaatgcagcgtttgcatagtcctgactacatgacttacaattttccagtgaaccctctggctaaaactgctctttcttcttacccacatttacactaatatttattctagaaattcctgaaaaatcagtcctgacactaccaggctgacttctgttctctgccttgtcgtggagctatctaaaagcagccggccatggtcattcacctatagttaccctttgctccagaaacttcgctgcagcttcccctgtgtttatttta

SEQ ID NO: 43495 - DNA, 3324 bp, Homo sapiens
tgtaaattttataaatcttatacacttcagaaatttggatgattttctttattgttgtcatttcttgcgagttagtcctgaagtaaaaaaattgtaaggtaaaatagatctattaaaatcttgtgatagcccacccatcagtcctctcactggagatatataaacagtgatgtgtgactggctcttatttcttcccagtcaagttctcaaaagtgggtgtcaaaagttcttatctggggactgtggtaacttaggcaaggaaggctaaacaggggaatgacagggatcaagagagttcccacatccctacccctctctccggtcgatttccccagatcagattgataaaactggcaccaactaacttgaggaaattcctagaattacagccactgtcctagtaggttgcacaggagccagaacgacccatatctatacaaaaaaaaggtcaaacggccaccaccaggtggcgccaaacagcaatccaaatcaagataatttcggatggcacaaatgaacccacggagttctcaaacaaccagacacacagacatgtccagattgttttttaatctctcagtaatagaaaatgtacattttaactaaaggtttttggaccccaattctccttcggtgggtattaagcttatataataacaataataattgcagtaccctaatactacctctataacttagtaattcttttacttgtgagagaatagaagataaaccctgcaaaagttctgggatgtgtcacgttggtaaagtttctaggaactctgttagtttggagcacagtgtgatacccgaacgtcatttggatgtgctgttcccatctagtactgaataactcataaaactgtgtgtctaggttgggcgtggagcaaacaaaagacctgcaccagatccagattgagaagcaagcagccaggctatgcgagccttatgatccaagacccagtaggagaatataatataaatctctaggatattcacatgagacacattcctcttttgccatcaactgttctgcaactgaaaaatattatccagcttgtccccaaagcctgaccggagtaaaccaagaaaccaggcagcccaatttgcccattataaactgggtgatttctaatgtgtaggaacataccatcattaaataaaatgtgtatatataagatcaaggccaagaagttctggagaagacaaatacactgagtgagtgactcagatgcccatggtgctgagccatactgttgtaccacttttccctcaacccacaggtagggcctcagatggtgaaaaagatacaattgaaagtacagcccaagtttatggataggtcagaaatgaattccattgcattatgaacctcttcagaggtaaccctgaaacatagtgataaaggtaaatcctattagagtttagggcagcatatcccataatgtgctgtatgtgggaggcaacatgacttaaattacaaatagaccctgagtcatggccagggttgatatgctggccagctggttatggacatgggaagaacaagactaaatgattgggacaagaagtcagtgagagagatatgtagatgatcctccaggaatacactcagaggaagcagatttttttgttccacataaatgccactcagagagagctcttaaatcttttataacagtcagctctttttctagtccccaaggtctttcctccagtcttcccagtttttgctcaagaaattcatgtacacaatgattgtggtgacatgtatagagactatgcacaggaattttttttttggctaaatggtttttcacttagtcaatgcgagctaatggtcttcccctcacaaggcttatctggatacagatgtttgccaaaactgccaagagcagaggtcattgctgaggtcccgatatggcacaattcttcagggggaccattttgcatcttggaatccaaaatgcatctccctggactaacttttatgaactcagaaaaaaagacttattgatagccatgggtactgtgtctggtagccagaggattcacctgggtgcattctagtactcaaatgtctaatagtactggtttattggatattgcaaccaccaaataaagatactataattatatcaatcatatgggaattaagacttggatcatcacactaggttaaaaaaaaaagaaaagaaaaattcaacaagcaaaaagttgttggcaaagagtaagggggtggaggtatgggatggatgccagtgtaggaagctacagttaattactaacttagctttcatgacaccagtggtgactttaacagccgtagttctttgatgagttatttttccccctttttctctgcttctgtacttaaagagcactggtggtttgtaatgctccaggcatggttctgtaaagatatgacaaaactgaaactcccttacagcgatatggtgagactactgggactttgtatgtttcccacgtggagaaatgggctagagaaaggacaagattacacatgctggggagaaaagaaagtaaaccctgctgaatatccccctaatgcaaagccagactgttttctatcctgctctacgctgtaagtctgacctctttaaaatttatcatcttgacctccttgccctctacaaagttattggtgggcagaggcagaaagaagtcaaaatgtatatttctcccttttctctccctgctactccatgtctgcatgcctcacctatgcagatgctattaacggtgaatctctctcccgtggttacaatttgcctggaggaattgcctgggttccctgcatcctgtcagtcctaggagtggtgacaattttctctgttgctagatcctgggtgcttcaccatcctttcttggatcccttaacctgttcacacttttgcgcacaacttctactcaactctctttaattactgatttgtacagtcttttccctgacgttttccagctgaaaatgacagatttgctaaaaaaattaaaaatgagtttagaaatatcatattattattaattccaatagtcagaattattttcaaatttattttttacttataggtaagatcaggagctcaaatagtataaaagggtcacaattaaatgtataaatttcttacacgttaactggtttataaatttcttctaataaattctattagattatgtaagagatgccctgagagttaattttaaccctacaattatatttctagaaatcaaccctgaaataatcagtgggcaagatgtaaacaaactatatcaactaaaatattcttcaatttcaatttgaac

SEQ ID NO: 43496 - DNA, 1951 bp, Homo sapiens
gggacttggcgggaagggtgggaggtgggcaagggataaaagactacacattgcgtgcagtgtacactgctcgggtggtgggtcaccaaaatctcacaaatcaccactaaagaacttactcatgtaaccaaatgccacctgtaccccaataacctatggaaaaataaaaaaaaattttaaaaatttttaaaagagtcctttaaaaaatattgtatttactaatattttattatttgtgcctcttaagtgcttgaaactgtgcttatctttctatggtagaaatgtaaattattattttcttagatttatagcatgtatcataaaaagctatctggccagactggatcattgaggataagatgcagcaggagagctatatggatagtcctctagaaatagatgcagtgtgagtagataatatatctgaaaatatcttcgtccttctggtcaaactggttctatcattttctgctcatgttctttggccactctttgatctttggcagctgtggacaattctttggccactgaatgcttttttttttttccttagaaaaaactgcccatctgcagatggtttcaccctgacttcaagcttcaaattcccccattaaccagcaggccaagcctaccaaaactatccatcaatgaaaacagccaccatgaggctctctgatgaaactggcagtgtcttaaacaagttgaaagggtaaaaatacactatacctgtggccttaaataaaataacgtgtgtacaatgagtttctgaagtttaattacattttaatatggatttaacttagaaataatatgtataacgatattaacccaattagagacctgtttgatcatccaggggtttctcctccaggtcaggtacttaggtctgtgagaaccaaaagcaggattacagacagctttagcaactgtcattatcaccaagaacttcagaccaagagtgtgttatcccaaactagtacaaacaaaatgcaccagatatcacccccaaagcatgtgttttttaattatagttacctctttaatcattcttacattttaaaaacactacgtaacataaaatatagtcatgcctggcttaacaatggggatttcctctgaggaatgcattgtcaggtgatttcatccttgtgcaaacatcgtagagtgtacttacacaacctaaatggtacagtctactactcacctaggctacatggtggagcctattgctcctaggctacaaacctgtacagcatgttactgcactgaacactgtaggcccttgtaacacaatggtaagaatgtgtacatctaaacatatctaaacatagaaaaggtgattatgtcacactgccacgttaccatggctatgacatcactaggtgacaggacattttcagctccattgttttcttatggaaccaccatcctatatgtggtctgttgttgattgaaacataatgtggtatgtgactgtaaatcaattaatgttgaatacatgccatgcagagccctgtgtcgggttaactggccacatactgtagaaaagggaagaactgcccagggaatctcctcactttatgtaattcaataaaacttagtgctggaatttcttagttgccatgtatgttagatcactatttcacaagaaattcttcatattagaggtatgggcatctttactaagaactacaaacaatatctgaaagaaagtattaaggatagtaacataaggaagaaaaacactctgcaattttctgcctattggaagttctctctgagacagagaagacgatgactggtgtgacaccctttgccaaataaaatcatctggcttaagcctctgagcaagaataataatagctctaaacacactgcagatatcactatatagtagtaattgaattattaaattttaaatcagctcttccctattgtttgaagtcaaaat

SEQ ID NO: 43497 - DNA, 4643 bp, Homo sapiens
ctctttatgatgtcagactgaagtcaaaaagcccatagcctgaaccaggcacattgctccatttcccgtctgtgagatatttgtcatgtgttgagttttaaaatttttctctcatcatatttcatatatagcatcatatctttgaaggataattgacaaattacatttaatgagtaaacaaccaaaagttaaaatttggatttaatcttcaccttaatgtttagataaattcatatatttttatattcagaataatagcttccaattaataaaaacctggtctgatattgatagttttatatttattgagtcttactgtgccaaggttactgactctattagaggtatgaaataagacaaggtaaatagaataactatatttgttatagcctaaatattatcaattgttttattatatgagctactttagaaaagggatattcacatttactgagggggaaaagaacaaatctacttgatattattgtctattacaaacacaaatattatcccgttttactaaaatactttattccctaacaacaacataaggtgttaaaaaagcacagttactgtgatcaaattatttaagaacacattccaatattattataatgataaatggctcacttacaagaaaaaggcacactgttaagtgaacagggcagaaaagagaaaaatatttgaattacagagccaaaagttgaaagatgtctgctcgcctacagtggattaaaacattgagcaaagaaaaactagagacaagaccgggcatgaagtagagtattatgatgtaagaatggagagagaaaataattaaaaatagggtttatgcatctgccagcaatctttccctctctctgttgaaactcctttcttttcctttagggatctgcccctcttcatgccaatgtgtttgtattccaatgatagacatgacacaactttagttataaaggaaatattaaactaaatgctgccattcaaattcagttctttagggttttgtatctggaccacgtacaggggtagcaatgttattaattcctttatttgaagtatctagagttctgttagtcatttcctgtttgtttaacttagccagggctggtttattttgcttgcattaaaagaccaaaattcacataaacttgccagagcaagtacacctacttcaacaaataaacagaaaatctgaatttagaagaagaggctgaaaaacaaatccaaatttacaagcccaagaaatcaaaatagcaaaaatcattaaataaaatcaagattttagggcaggattttgtttttgagagaggggtagtatatgaagcaaagacaaagaaagttttccacttcttacatatgatttaattcctcagtataaagatgctcagttaatatcaatgatcattaatataaagatgttgtcagctagagctccagaggcaaaaattgaggtggtaattatttctaggcatagcaaactgagtatcacaaagaaaataaaataaactgaggaatgaagcttggcaccgctctgctgttgaagagaatggcacatagggctagatgttgaccagcttcacagattacaatagtgtcaaattttggtttcttcatctgtaaaatcacataatggatttgtgcaattcctaagatcataaaaagtatcttatgtcactctcagcaggtactgtatgctcagttaatgattgctaactgactcctgagaccttagtatgcagaacatacatgtgtgtttatgactaaaatacccgagctttataaaaaaaagaaaatactgcattctactaagatataattatgattttattaattatcatagaaaaaaaggcatagaagggaagatctcaacttaaatgacattttgacaaatacatattctgtatccaattctaaaaattataagctgcatttctaattaggttctgaaaaacatactaaagagctcaattgtcattatctcttaagatgctaatgagacaatgagtactggttattttattatttggggccgatttggattcatcttcttagttccctgtgaaaaactgctacatataaacatgaattcttcaattacgactaatggctttgtttcttaattgttcatgcttagcagagatactcagcaggattgcccattattgccactgtgatttaatttagttcagagccactggcaggacatattagtcataatatcatggtatcatgacatcatcattatcataaacattattactaaattaggagtgggaaatcaccagtgccgagcattattatatgacttctttaaactaaaaggaattcttccctagtgccaaagtaattcaccactgagcatttttaagagcttatatttttaaatcaatatattataaatatattttaaataaagaaaggtagcataattctggggtaaaacaatttatatttggtcctttaaataaaaattcaataagttacattttcataatataagcaattattcattattattattattattattattattattaagggtttgatatggccaaagtaaagttctcaaggcttcattgatcttgtttacttctcacaccagtcttataagaatttttccttatctgaagataggaaagtgaaggttaaattgaataggcagaaacaaacaataattgaaatcactctagcaaatcagtaaatacatggcatgcaggccttcacacccctaatccatggtgaacctcagaatgattctcaacacaacactatagtattcccaaaacacatgaattaggatgctcagggaatcttccttgcctgcctgggccccagtgttaccaaaaatatttatagaaatttaagatgaatttaaggttgctgttactagtaaatagtcttacttctccattagaatttactagatgaaggcacttctccatttgaatttactagattaaggcagccctctataaaattataatacattctttattttcttctaatgatcacatgtcaaattcataagctgtcttatgtcattaaaagtgttttactaagcaaattagcaaatgtattatatactactggacttcagagtcctatcccacagaaattgtatctaacataagaaaataaatattaacagaaatagccactatcttcttgcagaaatatcttataataaaaagtaactttcagaaagaatctgactattggaattaaaagatttccagattatcaaaaccctcagaattcttataaattctatgaagctatttaaatgcagccaatctaggaataagtgaaaaaatattttaatatacatacacaaaattgtatttactattttttcttgtgcaaaaaaggcattctgaaacaagatattagacttagaaattagagataaaatttgagtccatatacccaagctgtatcaaaataacaaaaaaaaaagaaactgctgaataacaaattatcctgggtatgggagagactcaactgatacaaggtcgtcccggtatttttcagtatgagatactgaatgtcttttgcttaatagaaagatagagataagatttaaaagcacagtttgataccagcttaaccatctaattaaaaacactaccacaaaatgaaacctaccttggcagcatgggaatgatttcatttttatcagctcagcaagacttaagtcatgttctgtgattaaaaccatagctcgtacatatgtactgtcactagcaaacttttaatccagataaaatatggcctccaagatctatatctggtgagaattccaatttaacttaagccaacaatgctgtagctagaaaaatcgttggaggttaatacatctacatataaagcaatgttaaattcatttgaaaggacatagttattttaaattaatcaacaataatgtactgttcagggtgaaaacaaaaataggcagagtacataaatataaaagtaatttatctccatacagaatttcaaattttgagactcttcctgtgttaagcaaacattttgccaacaaatacatgtgtgttcaagtatattctgagttatgtattagttcccaggttaatatctactcattgataaaacatacatctttataaaccagtttaaacctttataggaacctattcagtgtaggtttcaaaaacaaccaaaaaactagacgagtgagtagcaaataagggagtaactctgccaacttaaatacttaggtcaactccaaatagaagaaaaacacaaacaagggtaaagtttggggataaaggtcaaaggacaaaaaaagctatttcttctgtagactgaatgactcaagagacctgatgtagcagtacttttttgttgttattgttgctgtcgtgagttttgctgtatgccttccattatttctatatgattaccagaacatctcagtgtgatcccatatttagagtgaaggacaatacagaaagtggaacaggtttaaatgttaggataagcagataatgtaatgtaagatgtgatgaaaaaaaaaagtatcctagggtaggaaattgaaaccttacgagccagctcaagaaaagtccctacaggacctacctttccttaagcagaaggaagttaaacagctccaa

SEQ ID NO: 43498 - DNA, 1066 bp, Homo sapiens
tttggggttttattttcattttcattatttcattaaactacacagaactgccaacattaacacgtttgttgtattagttatctattgccatgtaacacattatccacaaatataagagcttaaaacaacactcattcattaatctcacactatccatgtgtcagtagtctggacacaaacttcactaggtccttaaatcagggtttcaaatggctgtaatcaaggtgtcaaccagctgcattcttttctttctttctttcttttttttttacatttagagtgccttactgaatttattgattccgtaagtttacatcatctgtttacaagatgaatcatctgtctgaaatggtggctgagtgtagctgcagacctcatattttgtgcagctgcattcttttctagagttcagggttctcttctgagctttgatgtttgttgacaaaaattaatttctttgctattgtaggagtgaatacctcattttttatattatcagggtccactcttgactcctaggagccactcacagttgtcagatggtcctcacacaggccctctcatatactggcagcttgctttctcaaggccagcaggacaatcttttcccacagtctgcctaaatggaattttatatactatggcattatcatagtatatatgatttatttttgccatataacattatctttgccatataacagaagctaatcatgggaatgaccttctattacctttatcaaggtttattgttgagaagcatatcacagtttccacctacacttaagggtagaagttaatacaaaggtgtgagggtgtgactcattgagggttaccttagggtgcatctaccaggcttgggtcaactctgggtagccatgataatttacccaaccttgaatttctagccttgggatggattattacacacatttttgttaaagctttcatgggtgctttcaatttgcctttatcagaggtcaaattaagtttcaaatctacctaaatgcagaattgtgcacagttgtataaattcaccaatttcaataatatagattaaggagta

SEQ ID NO: 43499 - DNA, 1804 bp, Homo sapiens
taagaactttataacacattaaatattccagtttatgtattttgaagaattatctaagacattcttacatttaacataggattcactgaggaccaattaactcattaggtaaaaccgattattagtgcactaaaaatgaaaccattctctagacaatcaagttaagcaaattttccaggaaaataattacaagtctctatgaggtgaatgttttcattaagacaggaaagtgtcccacattttaattcagggggcatttcacctcttacccaggaaagacccagcatatagaaaaaataaggtacaataatggctcagtgaattctacaaatatatctgcttcgctttacataaatttcacattcccgtaatctactacaaaatcagatttttatacatttcaaaagtagaaagggtaactattttcactttcaaaaaggtataatgccttaagttctattgcgttatgtagtatatgacattgtgtgtcaagaaaatgttgcggacagtcatctctattgcattcaaacaaaaacaagacttttctgaagggaatgaagtcagaactttcactaaaatgttaaaatgagatgaagcacttagaaaaagtattgggctgggcagcattctgtggaaatagaatgcataattctgaattttgagaatcagagaatgtgaaatgactctcaatcctgtttttcaattttggactaaagatttttaaaaaatagtcctgtgcttatgttaccattaggtgacagaattctttggcagacggtttattgacaaagaaatgtcaacaggtggactacatttcctggactttgtactcacaactgggaaataacattaacttactcaaaacacactgatacatagttctataataaatcatacctttaacatgttttcttatacagaatacagcaataacctccaagaggacatttattcagagacctcaggacacttcagagatactctcatgaacttggtccaggtatggcattccaaaatttacattactttgcactatctaagcaaataagtatatgtcattgccaaaaaaaaaaaaaaaaatagaacagaaaactccagtatattacagttcaatagtaaattctgtgtagtaacatttactgaagccatgttcaaaatactcaactagaaatttaagttgttaaagacaaatatggataatgcctcaactctattttcaaaaaattaaaaatctattctaaagagattataaatatacatgtatgtataattaattttatattctgagaaaattaaaagattaaaaatattacagttaaaattaataattctaattagaaataatttctttctttctttctttcttttttgagacagtctcgctctatcacccaggctggagtgcagtggcatgatctcagctcactgcaacctcctcctcctgggttcaagtgattttcctgcctcagcctcccatgtagctgggactcaaggcacgtgccaccacatccagctaatttttgtatttttagtagagatggggtttcaccatgttggcaaggctggtctcaaactcctgacttcaggtgatccgcctgcctcagcctcccaaggtgctagaattacaggcgtgagccaccatgcccagccttagaaataatttcatttttaaaactgctacatgggcttagcgcacactaacatttctgagctcctacaatgtgcctagtactgtgtgaggagagaaacaattttctcatttaataacaacaaaacactataatacaaatattctcataagtac

SEQ ID NO: 43500 - DNA, 1361 bp, Homo sapiens
taacctcagtcctttagctgcaagaaactgaattcttccaacaacctgaatgagcatccatggtgtcccatgaggccacagctctgacaccttgatttcagctcgatgagatgctgaacagagaactcactttacccatgcctgggcttctgatccacagcaattgtaaaataataaacttgtaatgttttaagccactatacctgccccttgaccaggaataaattaagttactggagtaggaaataaatttctattgtcttaagccactgaaatttaagggtgcacagaaattacctgggggaatcttattaataaacgcagattctgattctacaagtctggagcagggattgaaggtggaagcttcttgctgctgtcaatgtacaggttttactggctgtgcttagatatgatgtcccttaatttctcctcaacctccattacccagctcccacctttgacggggactccttaaatgcctaactaagcactcctctctgtctcagacttcaggcctttcgcggttgtccctttcctccgcccctccccacgcccggccttccgggccagcagggggcccgtgcgccacggccttgcgatcccaggaggttccccagattcccgcgccccgagcccagcactcctgggccacctccctgtccggtccgttgaagaagacctagaactcccgctagacagctccgccccaggctcttcccaagggacatccccggctcctcaccgcggactcaggaccggtggtgtccaaagacccgcgagctgcgcgccccgcggggagggagtgaaacagagacctagcgcagagcccaggtggaagttccaggttaccccagacctggcctaggactcggcgctctgagccaccgcagccagtcttttatgcatccggcgggagtttcggtttcctttctcctctcagaagcacttaggtttcagtttcccttcagcacgaattaggcgaggcactttcgtggaaagtttagcatccttcccttcaatcagaatcttaagaaggggagcatggcgagacgttagttaaaaggtatgaagttacaatagctaggaagaaccagttctggtattctattctgcagtagggtgtgtatagttaacaataatgcatatttcaaaatagctagaagagagaattttgaatattctcatcacaaagaaatagtaaagttttgaggtaatagatgggctaattatcctgatttgatcatcacacaatgtatacatgtattgaaacgtcacattgtaccccaaaaatatatacaattattatgcgtcaattaaaaataaaatgaaactaaaaaaaaccttaaaagagagagaca

SEQ ID NO: 43501 - DNA, 1807 bp, Homo sapiens
agttggagcacatatactaccaaaaccaaagtttcttacagaactaccataatcaactttaatattggttcaaggataaacaaggctcaaggataaacttatgaaagagaacagagggtgaagaaataacccctctctcacaccatacaaaagtaaattcaagatcaatcatagacttgtgaaatacttacgacctatactttataaacaggcaaaactcagcaggcacttcacaagaggatattcaaatggccaataacagatgaaaagtccaagaaaatgcaaattcaaaccacaatgagctacccccacgcacccatcagaatggccaaaataaaaaagactaacaataggctgggcatgatggtgtacacctgtaatcccagcagtttgggaggcccaggtggaaggtttgcttgaggccaggaattcaagattacagtgagctatgatggtgtctctgcactccagcctgggcaatagagtgagactctgtctcacacacacacaaaaaaagattgacaaggctgggaagcaattctaaaattccaaaatgcccacatggaaggtgggagtttaacttggaactatcaccttagaaaatatgtggacagtagttcataaagctgcatttctatgtatatacttgaagtgaataaatgcatatatctacctaaagttatatgtaagaatattcataacagttttacccttcaatcacttctcattacttttacaatttcctaagtccttaacagagccagcaagtaccccctcctcagtttcatcagcttttctcctctctggtcacactaaacatatctcagctccttggggaattctcaaatgccatgtcctctctggaaaaccttttgctcttcccttcccccagctaactattactcatccttcagaccacgactcattgcacttctcttcacttcctcagagaggtcaacctttccagactgggttggtctgttaatcattagtttccacagcactcattagttcctccttcatatccatcagcacctttgtaatcattttaccgcttcttcaacaattcaatagccaataggaaatgctccaaatggacagagtgtaatatattcatacaaagagacagttcacagcaataacttttaagcataatggtaaatacaacaggcaggaatgtctcagacattataccgagaggaaaaaagatagaaagaatatacactatatgactccatcccaatgaagttcaaagcagacaaaactaagaaatcatattgaagtctgttaaagagatgagaggagggggaggatggattgggaagtggcccgaggaactttctcttgaggtgctggaaatggcctctctcttgatccaggtggttatcacacagatgtatatatctgtgtaaaatttcaccaggctttactctgcacactggtttactttaaccacattattatatgtattttaaacctcaattaagaggtaaacaagaaagcacagtgaaggaaaattatttacacttggaagaattgaattattagggcttctaaaagttgttcaggacaaacatgcttttgttccactttaatttacccatttagtaccttgaatgaccgatttctcttgtctaagaaaatgtcttcttgttgttctcagaggaaaagactttccaacgttaaattctttaaccaggtgtgacacaacattccacaggtcttcataatccctcctaatggaatctcccaaattcaaatgtggttctgcataacaataaaaaatattaaaatctcaaaagtcata

SEQ ID NO: 43502 - DNA, 1429 bp, Homo sapiens
ataatgacaacaataataattggccttgactttcatgcaattaaattaaagtcactgaattttcttgtcaacatcctcatattatctgcagaatttgacactaataaaccatttccttctttttgaaatatgattcatatgaactctaagatatcatattctcccagattttctaccatctatcttcaccactctttttcagtgtctttttctaattcttaagcttctacctgaccactaaattctggaatatctctggaccctgaacctagatgtcctctcattttacctagaaaaacacataactggtatggtattcagaaccactcatgggctgatgtgtcccaaatttttattcccagtctaaagaatacttaaactgccttttacatatttcctttggaagtctcattgccaccacctcaaactcactatttcccaaactcattgttttcctcttcagaatgttcttctttcggtggcagcatccatacagttggcctagccagaaacctgaaagtcatcattgactcttccttctcccttctgcctcatatcctgttccttaaccctgtcagtttcaaagcctaaagaactcttgtatctttgacttctatttgttcctattgccaccaacatcttagccatgttagcatcatcaccatgtgatcactggggtggtttcctcacctctatatttggatgtctacaatgcgctctatgcacttcagccaaagaactcttaaacaaaaatgtcaatttcagcttgaaatccttcaatcacttctcattattcttaggatttcctaagtccttaacagagccaacaagtactatattgatttttctcctaccccctcctcagcttcatcagcttttctcctctctggtcacactaaacatatctgagctccttgtggcattcgcaagtgctatgtcctctcttgaaaaccttttgctcttcccttcccccactaactactactcatccttcagaccatgagtcatttcacttgtcttcactcttcagagaggtcaacctttccagactgggttgtatctcttaatcattcatttccaaagcttcattagtccctccttcatatccatcagcacctttgtaatcattttactgcttattcaataatgcaaattgaagttccatggaagaagaagagatatgagtttgtatttttctccactccttccttggtgcttatcacagtgaatatgcactgaataaacatgtgtggaccagctgcctgacagactggttttaaaatgtctatgataacaatttgacagtatctatcaagatcctcaaattttccatacctttttggcttatcatctcttttcccatttcagaaaatctattcaaggtaattcattacaaattatccctcaaggccagtagcatttatgatac

SEQ ID NO: 43503 - DNA, 2660 bp, Homo sapiens
aatcccagcactttgggcggcctaggcgggcgggtcacgaggtcaggagatcgagaccatcctggcctaacatggtgaaaccccgtctctactaaaaataaaaaataaaaaataaaaaaaaattagccgggcgtggtggcgggtgcctgtagtcccagctactcgggaggttgaggcaggagaatagcgtgaacccggaaggtggaggttgcagtgagcagagataacgccactgcactccagcctgggcgacagagcgagactgactcaaaaaaaaaaaaaaaaaaaaagcttaaatacaagacggaaaaaagggaagcggcttgctgcctgtcaatgtccaggttcgaatggctgtgctcagatgtggtgacccttactttctcctcagcaccccagatccccaggccccctcgggtgcagaggacccgttaaatgcctgagcactctcctctctcacggtggttgtccctcttccctacctctccgcgaagctgccgcccgagcccagtgggcgccccagcttccctcgcccggcgcgcacgaagccaccaggccacctccccgcccggtccatctggatgttgaaggaatcctagaacccccgcgggacagctccgctccagggtccctagcgacacccgacgtcacccgcaatcctcaccccggccgccgaacctgctaggtccaaagagcttcggagctgcacgccccgcggggaggaggtggagcagaggagaccgagcgcagagcctggcgtcggactgggcgctctgagccacacagcagccagcgcctgagtttttatctagggagttagtttcggtttcttttctccaccgcgaggccttttcgatttccgcagttttctggaggtagaatataggtctgcattggtttactctgagaatcttagggaagtaatagtagaagcgatgatatgctatctgggacatgcatgtaattgtaaagggaaagaaagcagagaaatctgggactctaaacaaggaattgaggctgagagtaaatgcagcacgctaagcactatgaaagtctgcggtgaggtgtggcgtttttcttttctggcaaggtactggacaggcaaaaatggagtaaaaaaggattaggggctttgagtttctgtcctaagaagttcattttatgaaaaatttccaatagtataactgtccagtgtgaacatttgaaagaccaatcatctatcacagagaatttaaattgagaagaagaatgctctttagttttgtcatcaagctcattaatgtttgaaattcgagtttcaaccccagcccatcatggtctttagtgctccagacgcttaattccatgacgttatgcatgtgcagaatatattgagattcaaggtggtggtgagggtgccccagtaacggcatggggtaataaatggagagaaatcgaaaccggaagttctgtcttcaagaaaaggaaagggtggaagtgacttgttcacaatagaaagagcccagaagaacaaagttttttctcagactctggaatataaagtggcttcgaaaaggaggtgaaaacattgctcacttctgtcaggatttttctttaattttatgtttggttgaaaatagttatgattctctttctcaatgaggatgacattgagaaagaacctgaaatgactcatgattaagtcatgagttcatctcagatgaattcctctctagcatctgatactggacctttgtatcataagaatgcatttgctagcagcagaaaattgggctttgctgtaaaagcattcattgagctttttatgtgccaggcaataggctaagcccttaacatgtattatcacattaaatctcacagaaatcccatgagcaactttactgttgctattttatggatgaggtaaataaggcttagagaattcaattacttgtcgatgaccctacaggtagttaatggtagccaagacttcaaaatttaattccaaagataatatctacaatattctctgtatatattatctcattccagttcttttaaatactacagtgtcattattcctcccccaaagcacatacaatttaatggggatttcctcttttggttgtagaagtgggccctacatgttcttaatataattgactgtctgctgttgtttttctctcttaaagatatagatgtatcaggtggggattccctagatgttaactccacacatcccacttcccaccgcaaagtatatgtacaatgcacataagcagactctactccaaatcaatatccagttctcttccactttaataatatgttaccataactccagcctggacattatccagaaacttgaaaatcataaactccatttccactttttagagacttcccccttgcctcaatctctcagtctccttaggagccccactctttcacctccccaggatcaactctgtgaacaggcactgaaccttcctctcactaacattctcaactgcttcatccactctctttcctctgcaccttcactgcaacttgatcacctcaatctagtaaaccattttttgcccttaccaggacattgaaggaaattgtctaatatttttcacctcagatttactgtttatgactataggttcctgatcttttttacagtggcccttaaa

SEQ ID NO: 43504 - DNA, 2086 bp, Homo sapiens
aaaaaagtatacatgttcaatatttctgaatatctttgatccatggttagttgaatccacagatgtagaagccacagaaggctgactatattatttcatatatctattgtcttataaattttaaatatactgctcattttcctatccatgtgttttttcttattgaattgcaaggccacatcttgccaaggtttcctttcatttttttaacttgccttttcttctttttaaatgaagattttgttttagtttcacagttaggagcttttaaaagtcatcagatttatcgcactgtgcctttatatttccttcatttgcccttatggatagaaaactccttcactaccatagagccaaaaaacaaacaaacaaaaaggcatgtattttattatggttatttttggttttgttttttccatttagcacctgaatttatgttggtatatggtgtgaggtttgatggcctaagtgtgtttagtgaatgcctcagagttaattcttcagacagatggctggtaagccaggcactgccatctgaagtgaccctgatggggacagggaccagagcaggccagggagcagggtatgcactgcagctgatctctcgggttttggagacttgatcctacacccttgcttttaggtgtgaacttgcattgctgggacagtagaccttagtcctttctgtggggaactgattgcattccaggccttctgccctggaaggggtctgccctatcaccaacatcctcacccctacatgattcagcaggctcttcactcttgactcacagtggtaaaactccacccctttttactcataacctctgcctgggctcactcccttgatctgaattaatatactctcataaagctacttctttttttcttcagaggaataactgaagtcctcatccatcccccgtggctttctacttgatcagtgtccccctatcaactttctgacccactgtcatccgcagcccccacctctctagctgcataccacttgggtttctcagaaaagctcaaaggacgaggcttcaccctttatgctactgaattccatttatctccttattactcaccgtccacacctatgatcattgactgatttaaaatctccccacctcccccagtcacttttcataccagacataaacaccagtgcgtaatagctgcctacccagcccagttagaagctcccaattcctcagagtggcctgaggcagaatagtgtccctaaggtcatctcagcttctagatcccaagtctgattctctttccttgccttctcactcatctgctaagcttgtttattgggcaacactaagcaaagttaatgattattccagtctttaactaggacgtgagaagctctctccccatcttcacccatttctgtgaagctttcagggactatgggcctcgcactgatagcacctccccaggctgggctggcccagacagtcgaagagtaggaccagccacttctcagcccagctgacatttggcagctttgtgattttggataagacatcttctcttgggaggtcagacaagatcaactcttccagctatgacattgcgtgaggcaatgaagaggggaaagtccatgaatggaaggtggaacttgattggatctgttttgtgggttcaggagaggtcctatcacaactcactggaggtaggcaaggtaggtgaagacttccatggaaacttctggctctggggtgcctgcttcactgatgattgagtgggcatcctaaagggtacacctctgtcaaagtaattcaaagtcctgctcatcattcagacttggcttgtcaggaatcaggtacacttggataacctagccttaattccattcaatttccttttatctcttagaaaaatatgattacagttgttcctcagtatccaagagggattggtttcaggactccctgcagataccaaaatctacagatgctcaagttccttataaaaaaaaatggtgtagtgttttatataatctagacacatcttcccatatactttaaatcatctccagattccttacaatacctaatacaatgtaaatgct

SEQ ID NO: 43505 - DNA, 484 bp, Homo sapiens
aaaaggccgatgaggtttatctggccactaactgccctgtaaatacatgattacacattcctagaatataaattagtcctctggcatcctagaatctggtatggattagggtctgtatcccaggggttctgtgtcagctcttcctctgggtttctctgttattgctagagctgaatattaaaactggccttatagcatatttcacaatagaatgaggatctggattgcactggacaagtacaatcactttgacctccttacctcattttttaaaaatgtagagggcaatcattattcaggtttaaaaataaatatgacaagttctttaagagataccaagtggaatctgcaaggcccagacaagagctccacttcttaaacaatatgtgtgtggaggctgtcaaagggtattgcaattactgagctccagttagaaattcaggccatctagagttaatgactgtgtcccggtgaaattacagca

SEQ ID NO: 43506 - DNA, 727 bp, Homo sapiens
ctacagaaaataaaaaagaattagcaggacttggtgacatgcacctgtagtcccagctacttgggaagctaaagtaaaaggatcctttgagcccactagatcaaggttgcagtgagctatgatcacaccatcgcactactacagcaggggcaaaattgaaaagaaaggaaaagagaagaagaagaatgagatatgcccagggagttaacaaaataggtcaccgtggacatttacctttgaaagcaatatttgcttaggataagccaagatgcttataaggatataagctgcctgttgacaattcaaggttgataggattctgtaatgactcacaatatttgccaaccctcccaaacctttgcttcaccaaatgtttgcttaagatgaagagtttggcattaggcacatgttgaaattcacctgggagaatttcccttcagagcgccatgaggtgacatggcagctgcccccatggtacactctgaaggaacctaaaggaccattgacctgagcatgttctcctcttgtgactttcaccaccctccccgccaagggtgtgccccccaaaacaacagtggtctgtagatgtgaacattaacatgcgaatgtgcacttcattttatcttatatgtctgcaccctaacaactttcaaagctagtttgaggctgtatgcaataaaagcatagtacaattgcccaaaatcaattaagaaaatgcagatcaaac

SEQ ID NO: 43507 - DNA, 919 bp, Homo sapiens
cttctttcaagtattctcctctatgaaatactcaatttgcaactctagatgaaattactgagtcaatttgtggaaatttcatctgttccttgacagtgagtttttatgtttgggtcaaaatgaacttaaggccaggggtatctgtaaaacactaggtaataggacaacagtccctaaagtcaagcgggctattgtcaagcacaactgtactggttcgtcagagctggctcccttagcagggaaagtttgtgtcgtttctaaagtgctttaccatactgtaatttgtcattcttgattgtaatgtatggtaaattatgcttctagaaagttatcactctgatccacgtctgatctaatgagaacagctgcatccactgcaggccgggtgcttgtcagcttattccctcagggccagacaggtgtggtctaagctccaatttaggtaggagaccttcagggaaagtccaggtgcttcaagaagctccaagatgagatcagaaattggccccaatccctctgagtcagaattctgagtcatctttttttaaggccattttttgtccgtttcctcctgcgactatcagtgcctatactttaaagtgttctataaccgtgaaatctttcctgggataacccagtccactgtacccactcccaccaacccccaccaccaaaaactatagatctactgctgagtcaatttcttcacatttgaaagctcaagaagggggagaacaagttgaaatttctattcagagctgacactccatattaaagataggaaagaaaagtttggggagttgctaagcatgagaggcattgttgataaattatcttgagatccagatattagttgagcctcactcgcaactgaaagaatcaagcctaatggacttttctgcccagtgccagactggaa

SEQ ID NO: 43508 - DNA, 936 bp, Homo sapiens
tataatttccaaaatcatctcttcaacccccttgaaatagggaactgatatatcacatccccatgtggttccacccccaacccaggatttctcccatagtgataattctgatcccagagacgtctccacagttttctgattcgtggatgatcactacaagaaccatgaatgcttgtgtcaagttgagccccaactcccttgctccaatctgtccagcagctgaacaatggtgaaagttttccttggctgcattctggggtaataattttatctaaggtacagctgtgcattgttctttaggtcgaaaatctgggacatttgcccccaaacgtaaggtgaattaaaccagactgccttgcaactgcctcaaagtctgtctcaacacagtgactcatccaagagaaacagagatgtgtcaccaaaaatatctataaatttttttcctgttttactagaaactccttagggatagagtcgagggactcatgctgtgcttagagctaaacttcctgaaaatcttctcccagggtcctggaggcaaaaagggcagtgcagaatgctccttagaagggagtgtggaggaaaatgcatgcttatattagagaacccatgtctctgaaaccctggaattcaaagagctttctggactatgccctcactggattcggaactaccaggctttcatcatcaagaatccatcttgccagcatggggctgaagtttctgcttcctgaataccttttcccccatcaacttccttcagtaactagtggagaaaaatgaaaatattctgggaggtggcatgacagaaaaactgagtttctaatgtcaccctttgcaatgcatcacacacatttagatatctcaaatgcctgtgtctaggtgccttgtagagtgaccaaccatcctgatttgcctcggactgaggggtttact

SEQ ID NO: 43509 - DNA, 952 bp, Homo sapiens
cgccggtggaacttgcctgttaccttcttacaattccccccgcccctgggcaacgcaaaagccgtcctaagtgcgataagagcatggagtgaagggagttatttctggagtttagcagcattcctccccaggacacaccctctccccctccccagcagcccggcactccgacacactccgcgcacacgcgcccctcggcgagacgcggcgcattcgcgcgctggagaccggcggcctctcaccgagcctgagtcgtggccgctgcgccgccaggaggcttcccgggagccggcggggcccaggacctctcgagcgcagcaggcaaggggccggccttttggcagcgcggctgccagttaattttctccgttgcattctgcaaacgagatcgcattcagagcccagaagttgcaagctgggaataagcgagatctgaaagacccccaagaggagcttgtttgggagtgggggcagacggcgttttgcgcccaactggtaagtggcagcattaaatctatgcagacatggaggaaataaagctttgcagcctttccaggcagtggcatgcaagtactcgtgcgaagagtactgtttggggtgtttagttgtagtggactcagaataccgtgttccgccacggttttcctaatcccttcttcggactcctctttgggggttggcgggggcgggtcctgcttcgcgggacttttctgttgttggagttagggtgggggaggggagaaaggcgtgaggttgaataatctctcctacccacctcacccttttttttttccattaaaaaaaatgatacttttagagaagcttctctttcatgtgtttaacttgcctgctgcgatttgagcccaatgagtttgtattttctctaattactttgtaatcggctccatcctcggttgaaatagaaggaaactttcacaaagcaatcaatttc

SEQ ID NO: 43510 - DNA, 831 bp, Homo sapiens
gtatggatgtgtgtgggtgtgtgtgtgtgtgtggtgtgctgtggggtgtgtgcgtgtggtagggtatggatgtgtggggtgtgtgtgtggtggggtgagtatggacgtgtgtgggggggtgtggtgtgtggtggggtgtgtgtgtttgtgtgtggtggggtatgtatggatatggtgtgtggggagtgtgtggtggggtgtgtgtgtgtgtcctcttcactgcgtatcccccttacttatggagtgcacaccattagatgtgcaggtgaactcagctctctgacttaaggttacatgacttggaagtccaagaagttctggcagatagaggtagaaaatgaagttggaaatcatgagggccattaaatgacaaatttggggttttttattttactgagtagagattctaatcatctcatttttaacagggaaagtgtgctctaggaaaatctagccgacacagggagggcaacgatgaatttgagaaggaggagatgggaagacaagaatggattgtggtagtccaggccccaggcaaagaaagcctacactggatggtagacacagaaataaataggaagggacagcaaacattccagcagagttacctaaacatgactgttttcaatgtcaataaaagactggaaaacatatcacagtagagtcactggaaggaataccaggcagctatccaagagaatgcagtgaacgtatgtattctaaatctactgataggcaaaagtagccaaatgccaagtgaacatgccatgtgaatccatttgtataaatatgtacataaatgtaaatatgttgatatgctgtattaaactt

SEQ ID NO: 43511 - DNA, 758 bp, Homo sapiens
caatttaaaaaaatcctttgcaatttttttcttttctgagacagagtcttgatctgttgcccaggctgcagtgcagtggcatgatcttggttcactgcaacctctgccttccaggttcaagtgattctcctgccttagcctcccaagtagctggaattacaggcatccaccaccacgcccagctaatctttgtatttttagtagagatgggattttgccatgttggccaggctggtctcgagctgctgacctcaggtgatccaccagcctcagcctcccaaagtgctaggattacaggcgtgagttactgcacccagcctcctgtgcaaatattgatacaagcattacatttacccacactggatttcatcttgttgattttagctcagagttcttttttaccaactgtgttagccaaaccatgtggtgtgaaaggtaaaagctggatttcttttttagggacttgggacaaaaaaaaaaaaaacagttgcaaaggaagccatttatgaaaatgtccccttattacccagggaacccagtaatcttatccttgctgcctcatcattttatgagtttccacaaacaaaatggtttttatttgtatttaaccaagtgttaagtaggtccaggaacttgaatgcaattcaaggttgccttctgggagatattgctgtgattttgtaatttttaggtaactataaagaacagaatttatcaccagtaaaaacagtttctgatttagtaatttattaaatgcc

SEQ ID NO: 43512 - DNA, 3093 bp, Homo sapiens
ggcaatttgaaaatgaaatcgaagagtagaaaaaagaatagaaaaatcaagaatgcataataggtgttgtttggaaaatttgtgatttaagataattaagtatatatatgttgccattttaaatgtatgtattatattggttgctgtcaacaaaatatgaacgctacagcatctgaggttttccagttgtccaccacaatgattaacatgtgagaatcttcctgaaaaagttcaatgattaacatgtgaaaatcttcctgagaaaagttcctatgtggatgagctctaaggaatgaatatagaatgttctattccccacaggtctctgcagtgaatacagttaattgggagctaatcatgaactgctttatatttttccctaattgtctttttttttttttttgagacagggccttgctttatcacccaggctggggtgcagttgtgtgattatagctcactgccacctcacatttctgtgctcaacagaattctcccccctcaaactcccccgtagctgtgaccacaggcaagcaccaccacatctggctattttttgtacttatttttttttatgtttaatgtttgtgggtacatagtaggtgtatatatttatagggtatatgagatgttttgatacaggcatgcaatgtgaaataatcacaatgtgaaatcatggagaatggggtacccgtcccctgaatcatttatcctttgtgttacaaacaatccaattacatgcttttagttatttttaaatgtacaattaagttcctattgactatagtcacccttttgtgcagtcaaatactgggtcttattcattcttctatttttttgtacccatcaaccaccctcacctcccaccttgccccccactgtccttcccagctctaactaatttttttagtatttatggagacagggtctgccatcttgcccaggctggcctaattgtttcttgagaataattgttgtatcccccaaacataaggaggagagaagtcgttttacatttctgatgatgctttctcagagcccagtgcaaaggagaacaccagtcactgctggcgggtgtctgacattcagtttggctgtttcacttgtcctgtgatagctaactgatcttgctgtctcatcatgcattatttgcacgattggcagttattaaggtacaccaggctagaagggagtccatctggctctccgctgggccctgtactcttggcccaggatctgaaccatagcctatgcttaataaatatttgtggaatgagtaagaggttccatctatgagatgaaaaccactggtggctgataagtattcaaatggcatatcttctgtaaatgttacagaacgtcaatgccattaggtgcttgaagagaagtttaaaaatattcatatgcaggaaatgagatcatagaatttctcataaaaatgcagtttgatcaaattgaggggatggatacccacttaccttttcatagtaatagtaaatttgttatagaaaacacattttaccttccttgtctcctaattcgaggtcatgtgaagcttagctagaaggagcaaagtacattttgttctgcctgaactgtctctagtgaatacagttaccctgggctttattatgaatacctggcctgttccacaaaagcaatgaatagtgcttcaaggaagaaattttacttgttttatttcccaagaaactcaccaaattgagttgtctctactttcctttcaaaactataactaagtacagtagtaatgtcaggtcacttatgattttgacctgtgccaatctttgaatatttgaacatttttatctcctgaaaaattacttggcttgagggagacacagttggatgagcaaagaaaaaaagaaacaatcaaatgattttctgatgctttcgaatgttcataggcttgctttgaaatccctctgtctatatcaccccatcctgtttttgacttctaatctcctttaccaaatactatgtagcaatattttgtgagtcatccaaaagttgagtatatttagaccaccgtgacaatcaaacagtataaacagaactactcatctgtctgttcatcatcatcccacgcagggagttaattcctaataaaggagtttatcagatcaccctcaattacatcactttgggataatttcatacccaaggaaatttgaggcatttttgccttggaaaagagcaggtgccttacgaaaaagaaactagatttgtgagaactgggcttatgtttcaaatttatattctcaactttactctgaagagatggcttggaagaagtgacggtaacacagaattgccagtttgcttggcaaggtcaaactattccatatgttaccttgcaagaaaaatatgttaatttaaaaaatatcagagaccaaatgagaagttgaacacacagctgatttagctcagatttttgtttgttgttataccgattgccatattagctccctcttctaccacctcaaccccacccccaccaccatacagctgctcgcttgctcgttacaaagcatatttccccctgtatattaatgtcatattcagcaaatcaggaaattttgcaacttcccttctgatcctaatctggctatttttcttgagttcagtgtcatcaaatcagaaccagacacttttgttaagggtatcacattcaaaattgcacacaaacaagccccaccttatttttatgaaaagtctgcccagttacccgctttgtcccgacactaatagagccaaggctcagggtttgcaatgtaaggaaatgtggagtacattccagcatgctttctatgatgagtagatgtttgatagtacacctcacttatctgtgcctccccagttggggagcctttttcttatctaaaaggccttgccatatcaaaggtaaggatactgtttggtaaattcctctaaataagaatgccactaggagaaatttaaattatatgtaaaggaataaaagttgaaaaataaagggttttttgtttgtttgttttgaaaagttggtttcaaacttaaaaatttgcaagtgtcattttctgaattgtggaaata

SEQ ID NO: 43513 - DNA, 2338 bp, Homo sapiens
ttggttggagcggatagcccaatgcctgcccagtaacagggctgcaggaattaacacggtggacgagggaaggtacagaccattttcggtggctaaatgagaaataatactaagcgataggatatcctgtatgtttagattacttgcctctgaaaacgagctccaattctttttcagaacaagtattgggaacaaactgtggatatttaatcacttaagggtactttcttctgggaaaatcgctcactcttaatttttcagttgagttagacaagggctaattgcaagaggattaaaaccttgaaaactgctttgttcagcttattgtttcaggtttccctttggagtgtggatgatgtgtttatttgacataatgaataccaccatccgctttgttccgggaaccaaaaggctatgtgcttgcccaaggaatttctcagttgtttatatgtaaggaaacactgctctgtgttattggatgggaccattacagctctttcttaaatagggaatgcagagagccgtgctttcctcactcacatctgagcagagaaaccagaaaatagccttcagcactccaaatgcctgcttgttttcaacacaagagagcaaagggaacatttattgaaaatgtgtgttcttcgcttaggaacccagagctttactttgtgttattggcacatctacttagacctatgttatatgtgtatgtgtgtatatatatatatatatatatatattttttttaagtattagattggagtgcttggcatgaatcatagattagagaacattgacaactaaccagatagtgaactctgcctctatcagccaaatctaactgccaaaacactgaggaataaagtaaccactaattaagcagcctggagttttgtttttgggttttttttggtggtggttgtttttaatacataccctgccataggatgagggcaattgtgtgaaatacatgctttgcggtgacttccagtgatgcaacatagcagtctttttaaacagctgaaaactctctggtcctttatggtttccaaaaggtactccttaaatgggcataactgatgggggattggctagtgagctacagagaaggctgagtcagagtgacctgttggagctagccccgtgtgtgtgtgtgtgtgtgtgtgtgtgtgtgtgtgtgtgtgtgtgtgtgtgtgtgtagaaaagggggagccgtgggcaaggggcgggggtgaagggaggctgcaagcttggcagaatgtttgaacaagacaaagagcagttccagcgaccaaataaggaagtgagtgctgaagtatttcagaatagaagtgtgtcagggactcaaggcaattgcggagagtaaaaataggcaaagaagaaagggcaaaggatttttgttttacttgttccacaaaataaacagggaaagaagtatctctggtctttcagctggagtgagaaaaacagatcgtatctatccctttctgttggctttttatagacatgtgtctgaagagatgtttagaagctctttcagtggcaatggcaataataagcatgcttttgttaaagacagaaaaacgcaagttgtgcattagacgcaccatcacattccctttatgtgtaatgcatgaaacttttagcccaagatgatggaagtttccaagaaccaacagaaatatctggaaacccattttcagacatgtcctgaacactgaattataactgtatcctttgagaaaaatcttacctcttaacaagccagttaaatgtccattagatacagtgtctaacttaaatatgttgatagttactgaaaaagatgtcaaaagaggcaaattacgcaaagaaactgtcagtacttgttttaatcttctcaataccatctccccaactctccagagtggccaataatatgtcactgatcctatggataaatgctgctcttattttgatactttttttgcagtacgggtggaagagaacaaagatttggaaggagaatttcagatactcctaaacataatttgaaacaacctttttttgtcctacaaaaccaacattgagaaattatttctattaaccaagaaatcaatttacttatgtctgcaactaggaataaatagaagacattcatcctgggtaagacttttgaaagccctcaataactaaattgttggcaactctaggattggcaattgaacaaatctatccttctgttctcatgcaaaatacaaaattggacagcccacacttgaatcagaaactaccagaacctgcccagaagagtttgggtagagagctaaactggagtgcaaaatagggaacacacaaa

SEQ ID NO: 43514 - DNA, 2926 bp, Homo sapiens
catagaatattaattctggaacgaatgagtccagttcctctttgaaaacacttctacagaagttcctgtgtagatgagcgttaaaataagtgactcagggcctccagtagtttatgagctaagaggatcacaggataggatagggaccgggttcctcagatgttgctagatcaaatgctttactcttctcaccctaagggctcctgaatttagctttttattacacagaacccagtaaactaattaatggaaatctaaaaattatccttcctcttcttagaaaagaaatatactgcatgatgatttgtgcttttcgatttaatgtcacacaatcgtttttacactgtatgtgctttccctccccacagccccagtcccagccccagtctcgcagttccattccttcagggcagcttccattctaccgtgagtttttattgctttcccctaaaacgctgccctggagtcgcgtttattggacactctttagtctgtaaaggaaaaaaacacaaacaccggaggagaatcatcctaacaagccgacaacatatctatgggcctaaaaaacttaaattctttcccgttattagcacttctcgatcgttccaggaaagcccgatttgtagcttggctgccccaggaaggggcctgcgaccagaaagatgcaaagggcgggacaaggttacgagtgggtgcggggaagcctccctaacctgggggccgcgtcccagagctgcgagccacgcctcctctctcccgcccgccgcgccgccggactcttattttgaagggcggcgggtgaaggctcggagcctcctgagtcacccggcgggcgaggtataaagcccgatacctgccccgcgcccggtccgcggagcccgctgcagctcccgctcgctccggacgcggaatcgggcagcagcgggaggcggcccggagagccgaggtaggcgcggggaatcggccctgaggctggtggaagaaatgtgtgaattaaagggagtgcagcgtgcagggtgggccgcgagtcgggagtgcagggctcgggacagggtgggggcggggaggacaagagactcgtcagcgcactttccacccggccggttccttcccgagccctctccctcccccggcccgcgggagcacagatccctgaaagcggagctccagataggaatgtctgcatcatcttggcagggcccagacgggagaagatgctctgctgccacggacgatccctcccgctctcctaactcttctctgaacacctcgcacccccacggccccccgcccctctcttaatcttggccacgctccctgaggggtcagacctggggtgggagagcagagaaagcggggctggcagagacaggggtgagggccgggagaggcgatgacatcattccctggcagctggcggggagagggtggggacggaggggtccccccgacctgagccgagccctcccttcccaagcccatcctcctttctttgggatggttcaccccacctgggcgccattcaaaggaagtttgcgcgtaactcggggcgtcctttccccggccgggtgctgtgcccggcccgcagtcggtgtttcttctgggcctgggggcggcgtggagccggcggctcagtcccctcagtcccaggccttggcagccgctttgttcacgccgggcgcgggccgaacccgaacctcagctgcagcactggcagcgcgcaccggccacgcgtgggttcccggccacggccgggccaacaagggagggtcccgtgagcagccaggctggccctccccgggcctgggtgagctcccaaagctggagcgcagggctctaggccggccccgccccggggctgggggcttcccgcccgtttgtctcattttaacttttgggggcagctctgtcccgaatggtgagtggtccagactctagaaaggggtttggtcgcttgagcccggattgaggcttgggacctttgctctcttgctggggacggaagggggcgcgctgggcaggagagggggcgtctcggtcgggtctccctgggctcgggcatcttcccaccctgcggagccgggtcttgcgctgcgtgccccgaacaggcccgggcacaccgagtcccgttactggtcttcaggcgaaattccaggacgggtgtgcattcatcaacctgggagtctctaggagccagagatgactggctctacattttaatgcgtaatcacagagaaactagcacgagaaaaggacagagggaccgacccaagcttcagagacatggaataatatgatcctggttcataagccttgaaaagctcccctccgccaggttaaggaatggtgtcaccagccttggctgtgaggataatttcttgatttgtgttatgcaggctcctgtcaggactgtctccttaactcccactacctaaggaaaagatagccagagaattgtccagggatttgggtttgggttgcttctagaaagacagcatctttcttgctattttttttttcacatccccccaaaacaatttttttcccccttcagacttggcagactttgatttagataagaggtttgagttaatttgattttccccatgtctgtttagatcaatggatataggagatagtttgaagctaatgtacccctatgcctttgtgtgagtgtaagatttataacttgagggaggcagttaataaatagcacatccttgaaccataaacatacgagatagacaagagctagataataaacagtttttcccccaatccctaagctttacttattttttttactgattcttgtactttgtcattagaaaaaggagtggggttggtttcccagtgaccgcattcattaagaaactgggcatgtacagcaagtagcaaaatatgccaacatccacaccatctctgg

SEQ ID NO: 43515 - DNA, 1307 bp, Homo sapiens
ttccctgggtgttctctgcagctggcctaagtgccaagcgatgtccacaagctgagctcactcctggaatacacgttcctggccgttccatctctgaaggtgtcacttctctttttccccccagggaccctctgaagctccagcaactccagaaccaaatccgactggagcaggaggccggcgctcggcagcctccgccagccccgcgcagcgcgccgccctcgccccccttcccgccgccgcccgccttccccgagctcgcggcctgcacgccgcccgcgtccccggagcccatgagcgcgctggcctcccgctccgcccccgccatgcagtcctccggctccttcaactacgcgcgccccaagcagttcatcgccgcgcagaacctcgggcccgcgtcgggccacggcacgccggcctccagccccagctcgtccagcctcccgtcgcccatgtccccgacgccgaggcagttcggccgcgcccccgtgccgcccttcgcgcagcccttcggcgctgagcccgaggccccgtggggctcctcctcgccgtcgcccccgcccccgccacccccggtcttcagccccacggctgccttcccggtgcccgacgtgttcccactgccgccgccaccaccgccgctcccgagcccgggacaggcgtcccactgctcgtcgcctgccacccgcttcggccacagccagacgcccgcggccttcctcagcgctctgctgccctcgcagccgccgccggcggccgtcaacgccctggggctgcccaagggtgtcacccccgcgtgagtaaccgccgcggtcctccacttccctgcccctccgcctcgggtcgccctgggactcccacatctccatacacgcgctcccatcagcctgcaacccagagcgccccagtaacatttcacacatttctctccgtgcgatgtaaaaattcttaacggcaatttgactcagtgattcttgcgtagccacttaacattatcaaaatcagaactttttcctctgaattaatatgagattctcatcaggaactattcaaaatctatgcagtgccctctcttaatcattatgggggggggggtgcttagctatcatttattgagcactgtgctaagcaactcacatgtattatttcatttgatacaacattcctaagaggtagcattgccccagttaaagtactgaggagtctaggagttaaataaattgcccagggtcacatagccactaaaccgagacacgaatccatgctctcaccaccaaactatgtgttttattataatatttcatgcc

SEQ ID NO: 43516 - DNA, 807 bp, Homo sapiens
aagtgaaaaaccttgccacatgtacagatagatcaggaaaaaaaaaaagttagtgtatttaagctttgaaaggggaaaaaatcctgacgataagccaaacactaaagcagcagcttgcttttcctccaaaaagccccctccccttttagcccctgaggaacattcctagacactgattatccttaactggtactaaattttcaggaaaataactaattccactcccatagcaacaagcatcactattttcatgtgtgctgagagtacagatctagttacattgtgacctgctggtggtgaccttcagctcctgagatcatgctgtctttacttagccaggagaactggggttagaaaaaaggtacaaggggcattctctttgccctagcatgagtaactatccactgggtaggttcactgtgaatcacgtggtttgagagtacgcgtgctttgggcatctctcctactaaacatactgtggcttcagtcagtagatggcttatctaggatctaacctggtaaagtaggaacaagcagtgccgctttgtttctagatgtgggaacaacaaggagcctgaccaaagatgtccactccctcttcctccacaccacttctgatgacctccaaacaggtcaggcagtgtacatggagagctggggacagcaagtggatagataggagaacacagagcctgagtgtctcagaagccaagctgcctaactactgctgtttgtttccaaaacctcttcatccttttaaccagtcatttaagtttactttaaatgctgtagccctttgctacatgt

SEQ ID NO: 43517 - DNA, 1174 bp, Homo sapiens
acacagagagaacagacatcagactgaagaaatgcatatggatagaggggtgtttatcagaaagaaaaatacagagacacaaaaaaagaaaaatacatgcacgaaaaaaataccaaaacagggctggtccgatggtagcgggttatcagaacctattaacagtagtgtcactaaagttagtatacaacccccaactgctaaatatgagtggcttttaaaagaaaaaaaaacacaagctgctttagcagctttgattcgtgccacgcactactgttcatcaggtcaaaaagtggtaatttctgaaataccaatgaagtgtctggcagtttaaagtagtccttcctgtagtaagattctcaatttactatctattatttacttttagctcaattctaaaagttttgcatgcataaggaggactaatgggttttttaaatacacctaaaaaaaagaagattttagagttaaacaaatatacctcaggttatcaggtgacagatacaggcctgtttgcctgcttgtaagtatccaaagtccttatctggctgtgttaaaaggcaaaggttgactcattgactaatctcttacataagaaaacggatcccttaaatttttaagagtaaatgtccaaaatgctctcatgtccccttagtttattagcatagtattctttccttttctcactttcaaaacagaaaaactctaaattctggcttgaaaaaccatttcctacatttaaaagaacagggtcacttacttttatggagcagcatctcccttctgtggccttttaaggtattaccatttgaaaataaaaagcagatggtatactattatttccaaattaccaaactgaaataaaatttcaagtcattttgcattttaagttctacaggcatatactccacagcttatctgccctgtgggttagatgaactgaaaactaggggttacttacatccattcttaaaaacagagaaattttatcttcctttaaacctctacacaagatttaacagtaacccatgaaactgctgtagacaatattatttagccaccactgtctactttaattccttgtccatgttttaaaaatcaggttcctggctgggcacgtggctcacctctataatcccagcacttcgggaggatcacttgagcccatgagttaaag

SEQ ID NO: 43518 - DNA, 2865 bp, Homo sapiens
ttcaaacctgaccatcaggagagatgagacaacacaggaagctataaaaatgctaaaactacaaaccacggggggaaaaaaacactttttactaaaagcaactgttacttaccacttttaaaaaatggttaaatgccaaaaaaaaactacacttcaaaggaaaacaaagcattccctatgtaatctaccattttaatactctaaaatgtaggattgtttttaaaagctaaaacaattctttattttctgtctgaccttgataaatatgcttacaccaacactaccccatcaagcctttggaaacagtaagcgacccggggaattatactttctagatgaaaaccaatcactcatggaacacgattcaaaggaatgcagggcccaaaagcatcctgtgtctctcttactcttggttttcacccgaagacttgtgtccacaaccacctttgaaagcccaactaatggcttcaatccagtccagcaaacactgatggcttggggtgacacagtaagggtcaccactcttcccctcctttgttagaatggtaaggaatatgagcttcaagaagcattcactgacactctccctgacctataacttacagaatcttttttcttttagagagcccaatagtctcccaaccagcactgaacaggtgataccaaaccgatcaataatgttaacttaaaaatgaacagccacacctggcgtctatagtcccaggtccttgggagactgaggcgagaagatctctagagccagtaaatcaggagttggggtccagcacgggcaacataatgggaagccctctcaaaaaaaaaaaaaaaaaaccagatacacaaaaacagtaagagccacaagacgcacccctaggcctctattctccccatgcctccctgatagtaaatgaagtataattttgtccattctggtgattaaacaaatagcatcttcggatctaacgtcctatttctccctaaactcaatgaagagttatattcacaaaatgactaatccattcataataagccggaaataaaaaaccctgaagtttaaatgcaataaaaaagaatttggcagaacaaagttcaattgtccatttgcaaaactcaccaaaacaatttaataacattaaagcaaaccaggtatatctcaaaactggctggtactcaaaagggtttctctatcaaacactgctttgtgcattcgcgcagggccaaggcacggcccttgggcaaaactgaagggagccgttggtacctgcactcccacctttcctgcctgaactcctttcgacccagccctgtctccgggggccgagaactcgcccttttccctacattaaaagtaaactgttacgtggctctctcccacaacagggaagctcctcagcgttagcactagccgcagggcggagggtgcgtatagcggggcctcaaaagactacgaggtctcaaagaacaccccaagtgttcagccctcggcggcaagctgcgtggccggcattctgcgaggcatagggagatcgcgggtttctgcacgagacgcattctacccttggaacgggagagcgcctgcacgcggctacatcgagtaaccctagagccctaaaggccagacccgctctttttacaaaggagattttctttaggcgcctggaccgcggccatacaactggacaactccagtttggtacctaccgccgaggtcaccggcggcggctttggccccttccaggtttctggcaatgaccgccagtcggtagcctttccgggccattaactgggccacagctctgccaatgcctcgggagcctccaaaaacagcacacactttgtccatctcggagtcacaaactcggaggaaagagggtagggagtgggagcccctctccaggttccctcaggcttttaaacaaccgcggttccaaaaaaaaaaaaaagaaaaaaaaaggcaaaccgcaaaaaaaaataacgccgctcgacacctcctgcagccgcacaatagtaatgcaagacgccgtgaaaaggaggaagagctcgacgtcgccgcgtcgacgtcatcacgcacggactcttccgcgccacacctaacaaatacgccgacgagagctccccgccggcggaagaatggcctggagagggcctcgatgcttgctgggacctgtagtcttgacgcatgagagcaactggcgcaggcgcgctgctcggtggggaatgtacttgtggcactgagggggatcctctgtccccgctgggtcatatcagtcgggattcgagccccggtgaccaatcgacccggtttgttcggaactgacagggttgtcaagacgctgggctttccctggcaaaccaagacgacctgatcacgtagttagaacccagagaaagcattactgggcgtgagccggtcggggctccggtatttgcccttcgcccaggtgttgttttggctacagacttgatgtcctacctgttgaagaagtccccaagaatcgcacccacaccaaaacctaccctacctgttcctcccccaggttgctgtagaaatggacctctacccgcccagatgttaccattcatcgcgaagggtgtcgtgaagatgaatgccctgtcgaacatcatccagcaggaggtcaaggaattttaactgaatgattgaatagtcttgcaagatctatgaaacaagcttcggctgctgtagagaaacaaaaatgggttcctgcaattctaaataagatgtactgggtgctctgagagttaataagctaaaaaattcaatgtttgttacaattatagtgtaaacagaaagcatttctgatacaatattattttactagattcagaaaagtatgagccatggtc

SEQ ID NO: 43519 - DNA, 2169 bp, Homo sapiens
tgtgaacctaccaagctgaatacaaaatctcatgtgctttttagatgagtagcttcttgaaagagggtccacttccttcactgggttctcaaggggaactttcacctaaaatggttaagtgccaggtgtagtggctcacgcctgtaatcccagcattttgggagatggaggcggcaggatcacttgagcccaggcatttgagaccagcctgggcaacatggtgagacctcatcttttttaaaaaaacataaaaaataaaataaaatggttaaaaactttctgtttttaattgccaactctttgaatccagaaatgatcacattggtttttgtttccctgtttgtagcacagttcctagggcttgtgaatgctaaataaatgagttaacaaatgaatcaatgagtgaatgaaataactcacttaaaaggaatttattgctataagcaagaaccagtgtcgatacagctatgattaagatagacctggtgcctgttttcgttgggaaaataatctggcaaggaagacagacattaaacaattaatcatgccatcactatttaattccaatggtgggaagaactataaaggagaagtacaggctgctaggagggatcataactaggggcattgatccaatatggaggcctggggtcagagaaggcttcttctttcaggacataatgttctataaagtaaatgaataataacaaagaaagattgcaaagaatgataactacagctactatccattcattatgttacaaagccaactaggtgataacataatttatacatgaagaataaaattctgaattaaaaattcacccttaataatgaaagagattgttagtcaaagtagagttagtattacgcctagatgagatcacaggttggacatttcaccaggaagtaccatgggagagcataatgcctgaaattttatgaaactcttttttttttcccagccaaaaattttataatggtataaagccagctctggatacttaaaatcaggccccaaatgcagcacgcctgccaagccacatagaagaggagaactcagtgttcctgaaattagttttaagactggcctcaatcctctgaccccagcctctcactattccatttccatctctttgtttcagggccttcccccctctatccttctggctgcatagtctcacgtggctctcaactcacctgctgcatttcccagacttaagtgagcctttcccatccaggccctgcggctactcagactcctagatctgtatcagaggcacgggcctggcagccttcactgcacttgggctctgaaagacgttctcactcttgcaagtcacctgggaaagccagaatcgatactgtatggtttaacatttgaaactgacttgcaggtaatggcttctgcatttccagaaggcacccgtgtgcctgtagggatctcattttaaggatcactgctttttgtttctcatctacaggctacagagacccatctctcagtttggattttgattaaacagttatgcagagtagaaaacttgggccatacacaaaacttaattaaaataagcctccacttgggattaatgtatgttattgactgaatcgtgtccctccccgctcccccctctcctgccatattcatatgttcaagtcctaacctccaatgtggctgtatttggagatagtgcccttagggagataattaagattaaatgaggttctaagggtagggctctaatccaataggacaccagagagcttgtgctgggaatctctctctctctctctctctctctctctctctctctctctctctctctgtctctctctctctctgttgcctccctgtacaaggccatgtgaggacacagtgagaaggcagctatctgcaagcccggaagagaagcctcaccagaaaccaacacgattgcaccttgatctcagactttcaggctccagaactgtgagaaaattaatttctggtgtcgaaaccacccagtctgtggtatttttttatggcagtcccagcagatacaatgtgactgtttactttcttctctactacaggcaagctgcaaagtgctgctaagtaatatcacacagccactgctgattgtgtgagttgagttggggagaggttgttactatgagacctattcc

SEQ ID NO: 43520 - DNA, 542 bp, Homo sapiens
cgaaatgccatctcaaaaaaaaaaaaaaaaaaaaagcagtaactaggggagcctgatgagcttttagaatcttactttttatatccagaggctatatcagattcaattgcgtggacaaattcaagagtatttaatactttaaatttgacagcaaccaatttgtgtcctattagcaatgggtaatatagttttctggctttcattttatcaatactttcaatcatgtgttcatacaatcggtttactctgtaaacatttatttcctgttctattccaggcaaagtgcttggctctggggcaaagggcccttgccctcaaggaatttgcctactgatctgccccacacccactgcctctggttgtgctatttgggttgttagcctttttaatttttttcttgtttaaaaaatatagcttatttatttatttttggagacagagtttagctctgttgcccaggctggagtgcagtggtgcgatcatagctcactgcaaacttgaactcctgggctcgagagatcctcctgccttagggtcccaac

SEQ ID NO: 43521 - DNA, 686 bp, Homo sapiens
agatgggaatgtgtgtcgatttggctcttcactttaggaagtggaatggattcattctgccgtttactgaatgactactgtgtgccacacactcttctaggcactgggaagagagcaataaacaacacgaatgttgccctcatggagctgatattttaatagccttggaagatgggctatgaaaggctcacgataaaatggtgcccaaagccaacatgtgacttttagtcctgtttgtggtatagactcaccgagcaatgtgaagaaactgagtttcttgcttcatcacagctgagggtgagataggtgtgctgccctttctcaagaatgtggggtggaatcgtattcattgtttgaaaactcagaataataagagatttggcatttatgtgttcgtgcatacttctctcctcaagctgcaaagttcaaccaagaggtatttggcagaaggccttttgctaaagcaatcacctgacaatgtgagtggggatctgagccagccaggttctacctccactggagaggtttgattaggtgatgagcacacattattcataaaattgcagagcggctgtaatttaccacatcatggctggaaatgatctgcctccgaggagcaatgtcaatgaagggtcatcttccctagtgtcagtagttcttaaactttagtttccaaggaagcactg

SEQ ID NO: 43522 - DNA, 780 bp, Homo sapiens
atggagaaaccctgtctctattaaaaatacaaaaatcagctgcgcatggtggcgcatgcctgtaatcccagctagtcgggaggctgaggtaggagaattgcttgaacctgggaggcagaggttgcggtgagccgagattgcgccattgcactctagactaggcaacaagagtgaaactccgtctcaaaaaaaagaaaaaaaacaaaactgctagttaactcttagagtgtcacagacttgtaaactgcatgatttgtttagtatcaaataaaaaccagagcctttctgatttaaaccaacactcctttccccaggttttatctcatttatgtggggcacagaaagttgcagcctttccaacataaacctctgccagcaccagctcatattaagtaaatgtgtgggatcaacaacggagcgctgttgacattttttcaggcccctcccatgcttgggtcatcaggatccaagcctctccctgagcttccagctctaaaattatatgactctagttactttggcagctattcagaggaaaaagaaaatagggaggaaggagggaaaaaaagataattactgaagcatcgtccctaaaattctgatggcattgggtaggaagggtgtttataaaatagtcgtgatcacagcagatagacatggcagtgatcagagaagcgtccttgaatagcccctgatgttcacacctccatactgacatttgttatcataacggccttggtggttaaactgagatgtgttcttaagcaagaggccccaggg

SEQ ID NO: 43523 - DNA, 662 bp, Homo sapiens
acctatcaaagaattccagcatgcccaggcccatctgtcctgtcattacattctccatgttccctatctgatgtgcatcccccgctccctgaaatgccatcacctgtctgagctagcaattccttcttttcagatgaactgaacagcaggagcctgctgttagaaaggagcccctctaagaggaagggaccggaatgcagaagccgtagagactgaggacatctggcaactgaaaaggaatgcactgggggagggaggctgcagtgcccatgccagtgcctagggagagtctgggcaaagtgaaccatcactcaaaagagtcacacaaataccacaaatgagagggaacacaggagagatgccctcagggcttgaaggaaaactgcagatcaatgcctggagggagggagggaggctttgtgaccaagagaaagcaaacaagtaactggaccaactccagggacagaaggtgctatccctggaaagcagaccaatacagcaggaaaaaggttgactcttagagtaagagattcagtgaattctggacaaaatttcaaagctttactaagagcacaacagatgagaggaaagataaaatgatttcatttgtagggagagaacacttttttagggtaatggctcattttaaaactggttttagg

SEQ ID NO: 43524 - DNA, 1182 bp, Homo sapiens
aaagtgctgggattacaggtgtgagccaccacccggcctaaaaaatatatttttaaaaaagaatagtggtagatgttattgagaggacaaaatgacaaaaacaagagctaagaaaagtcagttcgtagcaaacaggaggaaaatttcagagactggagtgaccagaggctaacactaactgcagggagtaagaaagcagaggcagagagcaggggtaagcgattctcttgagaagtttagcagaagtaagaaaaaaggtagaatcataatttgaggggagtgtagtcaaggaataggcttttggggagcgtaaaaagctgatcattttcctatattaaaggatagccaggggaaagggaataactgacatgcaaaacagtaaagatataatagatgtgaccaagttcctggaggatgaaaggcctaggcagagaagacagcaaccgcaaaggaagaaaaacccttcccaactgtgaacagtgaatgtgcatacaaatttaaaagttcaaccctgaaaattaagtataaagaggtacaaatacctattacttttggagcaacagatgtacagtctattcatggtgctggggagagagaccaatggataatttttaaattggtctcagttcacttcactgtgtttactggttctgacaatacatgaagttttatatatatgtttccattacatatttgttcactgaatgcacaccataaatcagaaatgtctgttagccaaaagtatcattccaatgacaaattttattttctacaacctgattaccagatgtagggatactataaaagaaatatacatgtatctcaggaggttatgaacatggaattgtcattaattctaagtgaaaatttgtcaatgtgaaatgacacactgacagaaattccacagtgatgtgtaatcagctaataaatcagtgaacaagtatttcccctaccctggatacttaaagcacgtgtggatgtgcatgggggcagggtgggggaatggtgatcgccaagaaagaatctggcacagaaagagaatactgtaccaaggatattgaccatcaggactttgcacgtttgtttgagatcttccttcctctcaacatatggaggaattttcgccccacaaatatgtgaagcctaataggtacattatcactaaactttattttaaaaagc

SEQ ID NO: 43525 - DNA, 630 bp, Homo sapiens
caaacagtattttaagcactcccctattagttttgttatctatattctccagttatttcattcatgccacaaggtgaggtaatgcctgaaatttaaatctgtcctcaacagattcttgcactggatattcaagaagtcttgctttcatttactgtttccctatttgaactttttagaatcagaattatttatttcttctatttcatgattttccaaaagatgacttagaatgtctagaaattccctcctgactacaaatgtaatttgttgcactgactacagtaaacttgtatttttaagttacaaattcagatacttttacttaaataactgcaaacatggcaagctaccctggagttgccaaagtcaatatgtgaagtctgtctctagggcaacagactaaagagtagtaaatgaggttttgaactgcattcctgttcatttctgatttagcaacaggcttctacatgctcctattatgctctggccatccctttgtctgatctcaaaattacatggagtgagttttgggttgctgttctaatatgttttaagacatttatttcaatctgtcttgctgttctcatacatgttatttctaattttcactacccagcaaatcatatttgg

SEQ ID NO: 43526 - DNA, 6238 bp, Homo sapiens
gagatcgagaccattctggctaactcggtgaaaccccatctctactaaaaatacaaaaaaattagccaggcatggtggtgggcgcctgtagtcccagctactcaggaggctcaggcaggagaatggcgtgaacccgggaggcggagcttgcagtgagccgagatcgtcccactgcactccagcctgggcaacagagcgagactccgtctcaaaaaaagaaaaaagaaaaaaaaagaggcaattaggccatgagggctcctcccatgtgaatgtgataaagccccttataaaagaggcttcacccaccattaggctagcttgcccatagagggccatgtgaggacacagtgttcctcccctccagaggaaccatcttggaggcagagagttgccctcaccagataactgaacctaccagcaccttgatcttggacttcccagtctctagaactgtgagaaataaatttggggtatatttgtttttacaaatttcccagtctctagttacagcagcagaaatggactaagacactccactggagatataagggtattctctaattctatgtggaaagcagattatgtaccaatgcatgttaaagcacacaattatctgctggttaaaaaaacatacaaggatccaatccccccgttggagacacacagagcaacagtaggaaggatacatttccagcaagctgtgactctttaagtaaatacgtaggaggaagcaagtgcagattaaagtacagtaactgtgaggcatatgactgcagtcatgtttatgagtgacttataaagagagatttcaatgagttgtacatataacccatacagcaatgattatattagaaaaaggaaattcatctctgacattaatcatcaggctccagacactcaacagaatcggcccacaatatggttgtattattttgcaaaggaaaaaaaaacgattatctgaagtctgatttgaatccacactatatcaaatgaggaaatatgctcaagtcacgacacagccaagattaataggtgtttccacccactccttaaacagttttaggtacaaaaaacaatgtcacttctcttcctaagaatatgttaagcatagaaatttgcagaaatgcataaaaaagcattcctttccatgctctcattttctggtgttctgggtagctttaaaagtatgaacactgaagtacaccaatgctgtcagttataaaggatttgtattcatttctgggagctaaaaacagagatgctgctatggtttggaatcatactgctcatctcttgggtttaaaaaaaaaaaagcttgcggcaagattattttttaaatcattccacatttatcttcataaaacaatacaaagtgaattgccaaataagcatatatgacactttaatttactcatctattaaaactgtttcaatttaaacatctgaatgaataacagtcattctcctatttgcaatatttttcaacatgaggtgtgctcagtaacatcaacatacatcaagtataaccattcactgatttatttgttaacaaattcttattgagaacctactatgtactaggcagtgttctacctgctggggatacagacaggaataaatttaatcaaagtcctggttctcatggagcctactgcctattgtggggtagtggggatgggggtaggagggattaaacaaataaatgtataatgtgattttagacagacataagtgccatgaagaaaaacaaagcagtgcaaggctagaagattggcagtagagtgaggggtggggcttttttggatatggtggtcacagaagacccttataaggaagagacatttgaaaagagaccaaactgaaggaaaggagcaagccatgttgagacctgggtaaaagctgaccttccttccaggcagggcaaagactaagtgcaaaggccctaggctttggtggtttgataaacagcaagaaagtctgtatggctggagcagaatacttaagctgaggagataaggtggaggaaaagggcaggactcagttatgcgactgaagtctaatggaccattatataacatagttttgagcaagagtgacatgtcacactaactgaggttcaagggagctactctgggagacacaagtggacagaaggttagttaggagactatgtcaatacatagagcttaacctgatatcctcaaaatgctttcaccctttaggttttacagggagggtggaaggtaggaaactactttttaaatttcattatatctaaacaaatacacgtaaagtcatgtatacacgctgtaacacacattcctctcagtgactttgttagtcagaataactgaagagtattgtttcagataatctcagtcaagcagccttaaaatcgtgcacaaaacaagatgaccatcctcatcccttttattataactaaatgaaagtcatgtaagactgaatagttcttttgtccttaaacaggctatccgaaaaacagaagcatactgtctttcattgtcaattcatggttcacaaagcctctgaggttggctttcgtccttcaaaagcttttaatggacaggtacatttaagccttattttaaggattgtgagaaatggaatgcactgggagcggtccccatctcccttttatgaaaggaggaagatatcagcaatgcagagtgacctcacctataaggaatgcatcagtgacatggaacaaaggtggcttccttcgtaaggaaacccaatctgtttcagaaaactgcttcattacttttgactgatttagggctgcgcagcctactagaaacaattccattctttaacctctattttattaacaaaactgtgatatcattcttccttcaaacattaaagaaaagccttgcatattcatcaatcaaaactatattttattcagatcacctttgatcatacatgtgtttgtgccaactaagtgtatttttcagttgaagcctataaaagataggtggtgtgcctacaagagcgaggactctggtatgttccgcagcgactcaagaaccacgtgagatgtgctaggtaaaggcaattcactcttgtttcaggttgcacttaagagggcctgcgttttcacattttatagcatgttgagttttccagcttatgaattctatcacagcttactttttcaaacagtgatatcaatgcaaaacaagttctttgagaacagaatgaattcattcatggctaacccagatgcaacaaacaggacacagagttgctaaaatattacttctctctttcaagattataaaatatcttgtcacatatttttccccaaggtaatgtgtcaaaaatttactttctggagtcagatatacaatattccataggatcagcttttaaaatgttttcatgaccattgaaaagggctatgaaaattgctactattctcattctaaagctactgatagataagatagttgtaatctaattactccctaccatctggcacctgggtgccaataattagcaactctgcctgattgccagataatagtcaactgaccaggaaagttggttttaagtatcaaactgtgaatcaatttttgcctcaatctatctttaaccaacctattctatttttttggcttaatatcccagtatgtctagtaatgctgccaagaaacgatgaccttcagttcagggacagagaataaatacgtgctgatggactgacgtattcataagcaaaacacaggctcttttttcatacattctaaatttcaacatatatcactgaacataaggcatgttaaataaatcctaaactggcaacaacccacagtaacaggcaggatgggtggattatagcaaaggggaagttaaacaaaaatatgactctagctagttgttaatgataaacaccctctgcccaaatactgacctgataccatgaaactggatggagaaaaaagccctaggggtgggaggtgggggtgactgagaaatttacatatcaggttaatgtgaaaaataaacttgcctctcaaggaaaagtttggatcgcaaagaagaaacttaaataaacctagtaacacatgagaatttacataataaatattcacatagaattcccacttcttacacacaaagctcttcattcatagcatacctagaaaccacagcgtggcacatttctaaagttaccaaaccttcctagcatgttgcttctcaaaatctgccattcttcttaatccataaggaaatgttaggtagacctagtgttacttatttgtaagtatcagatagcttagtctcctgagagaagtaataactcaaggtatttccatgtatatagttaaattgttgatacattaacaatcacagagaatccagccttgcagctttctgagctagagagcccatgggcttttgtcatgtttcatatcacagctggctggcttatgatttgagacttggaaaggatcccttgggactaatttattctaactgcccttttcttccctctttccgctccattctcaataattttaatttaattttgaatgtgcatgttgcctctcataggattcaaaatgtagaggtgctattgctaaccacattacctgtgcttcctaccatccacaggattacccacctctggaattacttagtatacagatgatctgcatcaaaagaagccattatacatgtaacattttgcattctaaaagatttgcaagcagagaaattataaggtgtttggtaaagatcaacatgacagttggacagccaattcctattagatcaatttcattttcctctatgtcagaatgatgtgcctgggggataggagataacatatcacatattttaacttttataaggcttttgactcaactcagcagaacattctttctaataaactaggaaaacatgatttctagaccaccatggtgggtgcaaccaaaatgtttcaagggccattctcaagagaattgttattcaatatccaattacagtcaagtttcataagggtttacctagcctttgagtactactgtcattgctgacttaaatagtgggaagatgaatgtgaataagcttaccaaaatatacatgtggttagacactccaacttacaaggatgtgaatgtgttccgatggaccttggaattctggaatgtgagtagtcatctatcagttccatcaagaagtatttactgaactgaccacctactactttttccacagtcatgagcagaaaagaggtataaaattcaaaagagctcctgatctcaagttccttataacttggtacaggagacaacactaaagcacaattaattagagaacaataccaaatggggccagagaatattcaaaataaatgtaataaacaaggtatatatgtgtttaagatcaggtatccatatgatcacaaatatgtattaaagcaattgcattttggattggcatttttcaattcctgttgatagtggccaattgctgacactatcgtaaagattacagaaacaagtttaatccggagggtagtaaaaactaaccactcgagagatgggggaaactgaatttatctaaggaaaagagaaaatctgagatctaggcaaagcatgaaccagcaacgtagtgagttatttttaaaggtacataacatgaggatgtaaaaacaaggagcaggagggtcccatgacagcccttccacaacttgaagccccattcagaactttatcaccacactaagagctcttctggacctgaacccaagcacagcaagcaggggttggatagcgtccaaaggagagtgactaaaatgattaaaatgttaggaaatgggtcctatgaggacatgtaaacgaaactcagttattcagtccagataaaaagagaggaggtcagggctgcaccacagcctgcaaggtcaggaagaagaggtacaggggagcacctcttttccattaaggatgggatgaaaggaatgagagtacattgcaaggacaggaatttatgtttaacagaaaaaagaacctcctctggctaggaagatggtaaggcactggaataagtttgtatcaacaagcttttgaaatgtcctttagaagagactttctaaaaacccagtagatgaccattttcaaaaaatgttcacccagtgtcgtttcttacccaaaacagtacatgaatattttagctacaaaatcagtacgtgaatattttaactata

SEQ ID NO: 43527 - DNA, 1322 bp, Homo sapiens
tcccagttataaggctcaagtttagttgagtttcttggcaagtaatttttctcatgctaaagaagaaacatgaagtaaattaggaaaagcatataaaccagaaaaataatactaacatgatcaaaatctccaaataatttacctatgaagttcaattttgggagcttagcagttcagataaatgagaattacatagtcaatttccatgttagcaagaaaacttaaaattcaaaagacattaagttgagtgtttgagcctctccttaaattcctctttatcagtgaacaaacattcaatgcattcctcacaacaggtaaggcagtgtcaacaactaagatacagtattccaggaagccatgccttccctagtctaattaacagggaaacaaaacctttccaaagatgcaaatctacacctttattaagctaaacagacctacatcaggtgtctcagaaattatcaacttgatcactggttctgggattaaaatattcgagtccaaataagtaaactccataaaataaaggaaatctaagaaaagcactgtaagcagatcagtttcacaacatgtgggctccaaataaggaaaagaaaacctccctatcccagagttctcactatctttaaataaataaatatgtcaaaagaaacctgacagccttaatgatgaaactgttttctgatcaggttttccagtgattaaaatggtctatatacttaaatacttcctatcatttacaaaagatgagcctgagaaagtagtaggaaaactattctgttaaaactgcctggtatccacatctgcgaattatgggaactaatgctatcccaatgggcagttcctgtattaaatgaaagacatcacttttgagtgcttactgaagacatttgaaaaaaatattctcatctagattaattgttctttaaaagcagattttaccagtttggccaataatttagaattccttcttcttacaaaaatgaagttgttttaattactgatgctcttgactactttttatttttgcaaaaatgagaaagcacattttatcaggaatccatcacctgcaacataatttatatttattagaaatacctatatttctaataaatacagattatttatatatatttctaataaatacagaaattttgtgtgacagttgtggtagctgtccaaataattagcttcatctaaaattatttcagcccaaactcaaatcccaagaaaaatcatttcgatggaaatacttcatttcattcactataaagcccaacataaagctagatgttttagtgtagtcctaagtgacattttgt

SEQ ID NO: 43528 - DNA, 3760 bp, Homo sapiens
atagaatgattctaagcaacataaaaattaaggcttgatttcctatttatgatttacccacacacatacttacaacatatatactacatatgtactacatacatgtaattatgactctgagccccatcaaaatgataaaataccaaatttccattttaaaatgggcacagaacaaaagctggtttagatttcattcactaattgctacttgtttcccaaaatttatcttaaaagataacagagactatctagagataattttcaaaacaataaaatttattatttatatccaatctcattccaagatgggggaaaaaaatattcagaggtataatctatctgttccagtatgtatggtttcctaagcaatgagttgacttcgaaaacaccaagctaaagaataaagaaaaaatgtggacattaccacctttattcaccaaactacctctgtaggctacttaccctcactggggggctccaggattgcacccgaggctgctgtccgccctgggagctctgcagatcttttgagctacaattagccacagtgctgctctgagaccttaatgcatttgtgcagttggtcccacttcccccaccaggaccaggtttccaaggcctctgtttgatgccatccagaagtctgaccagcaagatgttactgggaagctcctcgacacccgagccaacaagagtcctgcactcgggacatctgagttcatttcgagaacctacgatccccagcaaacatcgcttgcaaaacgtatgctggcaaggcaagaccttcgcagaagcatcaaggcgctctagacacaccggacactccaaaagatccaacaaggctgattcatccatctttatctactttactgagaaaaaatcttcagaaatgttcatagttgtgtgcatcccttaaaatgactcatgtaacatccatttcagactttgctctagagtcatggggaaaagggggaaaagagaacatgagtgttgttatctagggaaaaagttcaaaggagccaagaatcaaaaagtacccaaaagtacactattccctgtctgaatagtgtagctttgctttggaatgtgggttcctaaactccaaagtcaacaactgaaaacaaaacaggctttctaaacaacgcaaaattaacccctaaagatatctagggattcactgggcaaacacaaggcacagagtattacataattcccgcagaaggatttatgaagtgcaataaggaacataatttcttaagctctgaaagtggtatcagctgccttaataaagtcttcaactcataggagaagctgacagaggccattgaaagtttcctctacctgaaatttacttttatatccaactaaattcccttttttaagccactttagcgtttaagaaaccatgcctcatgtaatcgctcgtggtaaatgatcccaatattaaatacatatgtttcttcgctgttattaaaaatagaactgtttaattttgcccaaccaaaaagagctgaaggttgacaattctaaaagacacagatttgcttgaaagcagctaaaacagaaaagcgcccttcagggcagtagttgataaactctgaaacacatttctgaacggcctgtcctaatcccattcagaaaagctggcaaaattatcaccaaaagaattcgacaatggaaggttggactggaaactgtgggcatatgaaaatgaggccattcaggaaaaagcaagccacttactgcgccgctctccccccaccgccaaaataaatgtaaaagtgaatgcccaggagaacgggagtaaaaagatttggctgggagcattaacagctgttcttgacaaagccggagcgggggagccccagggctgcacccccgctcccacggcgccaagcacaggtactcccaagcccgcagggaggcgcggcggccgctcgccgcagacacaccccggggccaggtgtcggcggcacccggcaggagccggtcgcggcctggggctgcggcccggccggtcccggcgtggggatctcaccctacagcctccctcatctccgcctccctttagctcaggccggggacacaaatccctctacacgactgcgggaagttttcaaggacttaaaaataaatgcgcaggcttaagttgcgaaactcagccccacagagtgccacggggaagcagctttctagcccagccaagataaggcgacagtccccagagagaccgcgccatccgggaagcagggggtgctgggctgcgcccggggagaccgcggcacggagccctggcagcttcctgcccggagaaggcagaggccgcgggctgctccgcttccgcaggtcctgattcccggcccacggggacccgagggcgaggggagagagagaccgacccagggcggggatgggggaatgtcgagaccaccgccttctccgcggctaggggtccgccgacgctgggtccccgtcgaccccgcgccggccgcgcgccctacctcgcgcctcggctcctcctctttgttcgcggccccgcagcggctgcggcggctgatgcagatgcggccccaccgcgctcgccgctcgcagtgtctctgacgccgcggcggcaccgggagactcctctctgctgcccccctcacgcgcgcacacacaccacgccgccgccgccgcctcccactttcccagccaaggagggcggaggaagaggaggaggaggccgggacgcagccggcgcccggggcgcaagggggcggccccgcgccacagcgccttccccgggagcgggcgcggcacctctcggagccacccgccgccgcgccggcctcccgcgctgaggtgacctgcgcccagtaccccgccggagcccgggggcgggattggggcggcggcctgagggggcgctgcaagagcctagaggatggggagcggggcccccaggggactacgaggggaaggctcggggacggacgccttctccctgaggagaacgcgcctgaaaaatggagccaccggacgggaaggcggcgggagtggaggctgggggaagcaggaagaagccccgggacagggtcccgccgcctcctcctccccccggcggggctgggagccctggacggacccttcctccccaggctgggcgagtcgcggcgcgggaggggctgggtccgcggaggcggcgggagcagccctggcgggaaccgatcccgctgcgctttgcgtctggttgcccaccccggacacttacttggtagagtcggagcgaagtgttgccccttagggccgagagcggcgtggtgaatcgatggggacagtgccgcggccacctgtccgcacccagccatcagtcaccccaggacccaaaccggagcaagcctggaggaccgctgaccccaaagcccaagactaggaaaacggtagtacggacttccaacccaggctcgggggctctgttatccctgccctaagtggggagaattgagtctgacctcaggtgggctggcaccgcaaagcacgctgagaggcgcctcttttatctgagcctgggtggctgccatcatcgcagtaatctttgttttggttgccccaagcacacacctgtaaaccgaagtggagttttgaaaaacatcttgtccataggttttgaggtttttcagtctcgatttagtggagaagcaagttaaaattttgtcactgatctaaagttgacattactatatttgcatttaccatcaatttacaaaaagttatcccaaat

SEQ ID NO: 43529 - DNA, 665 bp, Homo sapiens
ttgttagaggaatttggattaaacatgcttttttcctcacatgctaatctggaacctaattcatgtggaaagccggtcatcatccgctggacatgacgattgacatcaccacttaagatgccgtctccggcctggtgtggctcctgtcaggcgaggccctggattccgtaagcagagttaagacccatgtgaaaagttcaccctagtaaaaggtgcagtttcttgcctcggtccaaacgtctcagcactttccaatcacatgttgggcaactctcctgcacagcccactttctagacctgaactctgcccacttgttagggcggctgtgtgctcagggcacaacctttggcttctgctgccagcccctgtgtcacttgctcatcagcttctcgggagcaggacctgtcttactctctgtttcacaaatgtttagtagaatatctggcacatagtaaatggcaaatcaatatttgtggaacaaaacttaatctgcatgtgactttatccttgttcccactgctgcattcctgagaacagagccactggtaacctcccattcagcaaacatcctttcctgtgtccagccttggaagtatcccttggagtaaatctctctgtaaagtccccttgcaagaaacactttttaatgccaggcacggtggtt

SEQ ID NO: 43530 - DNA, 1752 bp, Homo sapiens
gtttattctgaataactggattgtctttttattcttgtattatttatatactttatagttttaaaatattcctcagtttgcctcatgatcctgaacccatgaggagggttatccttgtgctcttagacatttctggtgttctaagaaatcattggtttttatttgatagttaatgaatggcctggaataacatatttcagagctttcaggtcaactttggggtaaagaaaggaacctaatatttactgactgcccaccatctgccagatgttgttggcatatgtgtgatcctcaccccaacctaggaaggttctgtgttatcatctccaataaacaggtaagcacaaagaaattaaataacaacagttttttaaacaccctgctcctttgtcccttcatgatgtggtaaaacaaagacatatcaaaaccagaggacttgcttgtcaagtttctaatgcctggaaaatgtcaccttggtacttcaagtcttattcaaggaactattaaacagtttatatggtttttcagctcataaattaataaaatcccttcaaatatttcccttaagtgaagtataggaatataagtattgttccaagtcttctgttaaaaattgaagcacagaaatgggactatgactaaattaactgaatagtaaaaaagagcttgtgattcaggaattcagggagagagttcgtgagctctgcagaggtaacctgtatgtgcatgctccaaaatccaccggcactttcccggcagtccaaagtgcaaatggtttctgcagctcatgattctggctccaggccagcgccatgctcacttgaattgcagccaaacaccctcggactcattgcctgaacatgtgactcaaatgctcgcgttcccgctgctcagtgtactctcctggagaccccctgacatcaaattcccaaggatctcatttcattttttatagacaagtgtcttcacccttccaactctaaagatagatgtgaggtgaagatatattcttcagggtttgaaagctctatataaagtcccccaaacatttaaaatctggagattcatctctggaaaacagtgcatctgatcatcttgatttacagcctgtactggaagtttttcttttagaacaaaagctatttgcaaaccattcctgtttgtaaataaattattttcctaaatatcaaaggaagacatcagaaagtacaaaaagaaataatagatggaataatttcttgaaatttacccaaatagataatgagcaagacaactgatagctctcagaataaatattctctgagagtaagactaatacgatcatgccaatagtttagtttgacttattttcatagcgctgcccaaacagatatggagaaaggaattattttgccatgagataagacttaatcatctctgggaaagggaatccacaggaacatttttgcttatgcaagaaagatcctgtttatactgcatgattctttgcagtttttctctcccatcccctgtggctgtgtagttctatcctatttgtggccctgcttctagattgaggccccataaagcaggctgcacaatgcctgcagcacattatttcttgaagaaatcccagggaaaatagacagtgaaacttagcttccctggtcttagaaaagggcaaagaaatttttgtttcccccaaaggccagttgaaaaatgtcgtgttgccccagaagtccagccctggcccttccttgctgcaaagagtca

SEQ ID NO: 43531 - DNA, 1360 bp, Homo sapiens
agtagcatgtcctataactgtaattttccaacctgatggccaagatgatgatgtctgacattagttgggatggcaattactagaaatggaaatgaagccaaggccccacttgaaagactataatgagtcacagttgaaaagaacaaagagaagctcatttcaggccagggtaacagcaagtgcaaactctactgcaggaaagggactggtgtatcaaaggaaaatgttagaatgagctagagaaaaatgttttgaggtcagacagagaggcagtcaatgccatatgaaaccttgtagaccatggtaaagagtctgaatattagttaagcagcagaaagccactgaagtcttaagcatggctgtgatttgacataatttataatactaaaaaagacttctggtttctatttggacaatggatttcacacaggcagccacagaattaggaagagaagttaggaaacaattggttgatatgactagtagattgatgaaatagatgaataatctgtaggaaagaactagagtaataaagttgagtatcatcagcatataaattatatttaaagccttggggtcagattacttgggaagcaaatgcaaacagagaaggcccaggacatagccttaaaatatcacatttatcttctggagacttccagctctggccatgagagagtaataatggccagacttaacttccacaggaaacaactagaaaactggacaaaatacatgacattgtgtttagatattaaacaataagcagcacaagactgtgatccctgtgagaagggaaatgaatgaagtaaaccctaccactaaactggctttctgcctggagaaaatatctggactttgggtgcagccttgctagactgatgagacaaagatcaaagtccagggaggtagaactagaaaagagagattcattaaaataaaacaaaaaaaacttcaaaactttgcaaggtagttttcttgagtctttgatgagcacaggccatgaatatgcagaatgaaacttcacaaagctaggccaaaacagctggggagttgtaagctgaacaatgctcagagctcatgcaggtaggagatgatcaaactgaccgggagggaggtgtttcctcaagatcacctgtgatgtacagtggaggccctagagggtcatgccttggaaataagttaactagctctagaatgaagacaactttacacttgtcctagcaaagcttaaaaacaaagtttaaaagtgtaaaatagatccacaagtaacttgactaacttaaacccaatactctttacaggaagatagtaataacaaaaaaatcagagacctaggaatataatattcacaaggtcc

SEQ ID NO: 43532 - DNA, 988 bp, Homo sapiens
ctgccggctgaccaacacttactgatctctgagataaaggcacacgaattaggaaaaatcacattagacaagtcttgactcaattcctggcacataaaatcatggtatgaaacggttggtgtttcaacactaagttttggggtgacttgttaggcagtcataaaaaaaagaccaatagctaaaaatataaaaatactgaacctaatttgagataattacccaaacatatacaaattttgataatctgtttataaagcttgtgaaatttaagtttttactaaatcaaatatagctcattttgactcattagaacataccttctaaatttccttccagtttcaatgacatctgtggagatgcctcactgaactcgggactttttgtctcaacaggagaatcaacaatagctgatgggtttatttcatgtgaaatacattgtacttttttttctccagtaattaagggtttgtacttttccccttcgggagaaatctctgtgaaaacaaaaaataaaaaatcatgctagttctcaaaatgatgcattttatctgtaatggcattgggggcaaagttcaaaaagctgcattactgcaacaggcaattactagttaagctctgttacatattagaagttaataagtgactacagtatatgaaagtcaaatttcatttcaattgtacataataatttctatggtggtcaaaatggtttaccttctttctgcttttggtaaaattaatatgtgtattagaatactattttttaaattattaactagttgattctgtttatatgaagtaactcctagttacttctaattgctctgaaattctccacactaaggagagaggaggtttacctcagaacatcctgagacaggttcaaaaaagaataaaaagaaaaaaaaactacctcagaatagcttaatgcagttatttaccaccttctcactcctattaatccgttgaagattttactttccaggtt

SEQ ID NO: 43533 - DNA, 1822 bp, Homo sapiens
tacttctctccaaatttggctcccctccatcagctctacaatactgctgcatcataaaaaaaggtcattaacttagattggatgccacttttaatccttcataaacatttctaatgaaacataccaaggcaataaaaaatatttctgcttcctaaagcagatcttaaagaacaaaaaataggcctgcaaaaaaagttatgataaactcttaaagtagtacaacaattaatgccttacatatggaaactgtgtcaaatcatggaaacagaaatctaagattacagggtaaccagctaactactactcatattcgcttcctaattaaaatttatcagtaatttaagattggacacaacataagcaatgcaaatgcttgcttatccatactaagattcctattattttaatcccattaccgctctagtttttaaaaataccgtaatgtccaagaatcgctttgttaatacagagtgtcttagagaattaacatttaaatgagattaaggtattttccctgcaaacacttaaggtatctgtgtaatctcaatataagcagttctacgcacatctcatttccaggatgatttttaccattttgcatgtcattccttcccccaagtggaactcacctcagtgacacaggacgttagtaggaataacggtgatgactaataagcatcagtctaggtgtggcagtcttcctacggggcttaataaagcagaggtaccatcccgcattttgaaaatgacatcctgaaagagaaaccaagactgtctaaccagcagcagctcacagtccagactgaaagggggcactgagactctccacacctgacactcgtcttcagttgataccacgggtttgactccgtcctgtctcgggcgacgcccgtaagacaggtcgacactaccccgacgaaacaaacaaactggtttctgagccccgtagaaacggcggggtgcagcagggggagtgcctccgttaccgcctctccaacttcacagaggtcgttgctagtggccacggcggggtggggacgggcggcgttcgggactgggaagctacttgactgccacgtgctcctgcctcgcaacagcggctctagattccgagttatggggacaactgctcgagaggccagggtagggtaaggactccgcaacctagggtcccaaaaccctggagcgaatgcggactaagggagagcggccggcgcgtcaccggcgctggcgtgtgacgtcagcgcgtggaaggcggcacgcagcggaggcggctgggaaggagcagtgaggctgggctagaaccgtagggtcgggcggggtgctgtgcgaaggggcgggcggggtgctgtgcgaagggacgggaggggcgggctctgcaggcgggaagacagaaaggacgagacgggagagatgaaaaggatggagagagtgtaaagctgttaagagtcatgcagagatgcgggagagaactcactagttgaaaccaatttggaatataaagcatataaaattttcccacagctactacaccgagaaagggacttttttattttacatgaaagcgcactacttagggatgccacattttaaagagcaattttgctttaaaaagcaagtcttttcctattatatcttggatggttgaaacagaagaatgtttaagtcttgagatatttttaaaaagctgtatggggttttctacacctttacatctaatgtatgtataaattacttgtctgtatgttgaagggtttggaaatgtacagcagtctaagtacattttttcactgcaggactggcgaaggtaggaagagattcc

SEQ ID NO: 43534 - DNA, 2327 bp, Homo sapiens
ctagcctgcaaaacagtcggtggagcacgtatatgtaaaaatagaaaaggctggcaagaccaggtcatatttaatattcatgaggcacaagatatacaacacgcacttaatattcattaatcagtatatattcataatatactaaatatacaggagatattaaacgttcacgggtcttaattctgccacccagtggagacactcaaaagtgatctcgccaaagaaatgcaaaacctgtacctgcccaccaggctattagcatgctactgctgtggccaccattctttcactgcatcgccctgccctgcatcggaatatagcaccttgaacacgggatcaggtttactgaattctgtgacccacgctgggagctcaataaatgtttgctaaacggaaatgaacccaattcagaccgtgtagaaaccccagattatatcttttctccaaacattcaatttccaagcagtatttttgaaaatgcgtgatggctaaattcgagttatcctttttgtatgtatgttaggcacacaaccggcgatgacatacaaggcgaggtgacaccactgcactcccagcccgcacgtcacctataagcacagggggcttttggtgctggtttatttttgaaggctggtacttctcttcgatctaagttttaggaacctgtgctcgtcgacggctgccaatactttttattttcaaggctgacgctcgccagagtttcacaagctgctcccggacgctgtggtctctcgctagagtggatccgaactctgcgtgacgctgggaacggccagcgtctgttgcctcacgaaaacatctcccacaaggtggccgcctcgcgcgaggtcagcagcagggcaaacagggatgcgtgagtgactgacgtgagctaatcgctaatgacaggcttcacagccccggcggccctcagagccaggcacctcgcacccctcctcctcctcgagacccagtcccggcccgcccaccgttcccacgccgcccaataggcgccgacgctactcagcgagtggccggaggaggaggtgttgggacggccggacgctgaacggccgttcacgtcaacgtagtgacgtcacgcgtcgacgctggggcgtacctttcgggctcctgactcctgccgcttctcttccccttccgtgggtcagggccggtccggtccggaacctgcagcccctttcccagtgttctagttcgcccgtgacccggaataatgagcaaggagggtgtggtgggttgaaagccatcctactttactcccgagttagagcatggattcagttttagtcttaagggggaagtgagattggagatttttatttttaattttgggcagaagcaggttgactctagggatctccagagcgagaggatttaacttcatgttgctcccgtgtttgaaggaggacaataaaagtcccaccgggcaaaattttcgtaacctctgcggtagaaaacgtcaggtatcttttaaatcgcgatagttttcgctgtgtcaggctttcttcggtggagctccgagggtagctaggttctaggtttgaaacagatgcagaatccaaaggcagcgcaaaaaacagccaccgattttgctatgtctctgagctgcgaggtgagttgcattgtatgagcgaagagttgtcagctctcctgttcacagattttgggtcaactgtgaggccacagcgctcatcttggtttctcttacaatgtacctacataatgttgaaaggtacatcgtgaattgggatgctaacccatcctgattaggtatataccctcagacattctttaaaatttcacacatctgcttcaggaaccgtcgaaggacctctgaataaaatggaagtgggttccaggagaagattaactttaaacttagaggagtgggttttactttcgctaaattttccccaatttaaaaataatattcagtttttctatctttagatatatatgtatgtaaaatattttttgtgtatatatatttgtggtttgatcttaaacttgaccagaaactgccttagaatctcagaaattgactttgcatgtggtatgctttgtttgtatggcattttaaaactgcggagcatatagaagataattacatatgcattgtgcatattagaaactgagatttctgtttcctttagaaagaaattcctgttcatggaattgaatcaacagcgaccataccttttacacagatatataattcaaaagttcagttctacaaacgtaaacttttggagctatgcagttcagttactgcagcatcattgtggcttgtataattgttgaatctt

SEQ ID NO: 43535 - DNA, 800 bp, Homo sapiens
aattgttgctaaagatagtctgagtgctgataaaacagttgagttggttctttctgtgactaagaataatgaagctctttgtttgatattaactgctggtagaaaacattaataaaacaatccaagaaaggtgttttaggaaacacagtattctcgtatgtagatttataagcacagaaaaatttccaacagtataaagttgtggtatagctccaagaaaagtattcttagttagaagaatttggctttgctacagagtttcaaaggttatgtgtgcgcatattgtcttcagtagatgacaagttgattttagttttattgttttatctggcattttccaataacattggtagtattctaatgagtaagacatttgactctaaagtcaaatttgacaacatatattcttaagccagtttagaaagtatagaatggtggttacattgtaaatctttggcagagtttttgtaagaaattcttaaatgaagttaacatatcactgctaccatttaatgtctgtctgttgggaaaaggtcagagctcttttaaatgctctactctgaattatttttagaaataaacaaataattctaaagttcatctgatatttattctaagcagggtcatgttcttaatacatttgacacttcacattctgttgccaactactttgtaaacatttctacacctgtgtctccagactgcttcagccagagcaacttagttaacctattatacttatatgagggagtaggagactgcccaaatttgtgcgtttatataagagtaaggtaatgcat

SEQ ID NO: 43536 - DNA, 1000 bp, Homo sapiens
tttttttatggctatgactcacatgacattactgtataaaactagtacattctctcgtaaaaccacacaaacttactagagtgctgctctcatttttctacattagaaatgaaaaagggcattgtctgcattcaaaatttcctttttacatctctgtattactttttcccctttatatttatcttaaaaccaaaagaaataatgtttctattgttttactgtagttaccactgatgctaccgaagctgtattgtgagtgtttcaaaattctcaaaccagttttgtgtgttgtacttggagcttagtcattgtcatacgtagcaggacctgattaagaaggctgtgccgcctctaagccttgctagattgtagccactagcaaccaggctgcaataatttccctttgatgacatcatccactgtggaagaacccagttgcttcagcgagtcgaactacagttttaacctcatcaaatatggcatctcccttgcttgctgcagcagggatggaagaaatgtcactttctttttaagctagcaagctttttctttttctttttcttcttctatttaaaaattctaatcatggatgcttcttccgacccttatttgccttatgacgggggaggagacagtattcccctgagggaattacataaaagaggtaatactatccccttgctgtgaattctctgttggtatgttttgcatgcggctgggcggtcctctagcttaaactggttctcgtttgtcctttaaatactgcagtacgttgtttagttgccctgggttgttagtaaggggaaaatgcaaccttctgaatggttgtgtagccatccctgattgttttctctgtgcagattagtactgcttcagatcacgtcgggctccgactccatcttctgcatgaaaatcttctttctaactctgaaaatgaattaatctgcttttacagccaactaaagtcgtgttggttggcatctaaaaagtaatgtttttc

SEQ ID NO: 43537 - DNA, 427 bp, Homo sapiens
ctcctttacaaaatactcccctcatattgcagacattaggagagatgcaaaaggaaatgataggattaataaggaaaaagaaaggagcactgcttatatacacgtttactggagaaaatgtatgtatgtaaatttcattatgtacaaagcagctttcacttaactttatgaagtgattaaatggtaaacaagattaaaagagtggtaaatactggcatgagttattcaaccacagcagtgatatcaccagttgcgcaattcaatcagtgtaccaacccaaaggagccatctgacccctgtttcagtgccatcctctttcagtgccatcctcctaacatccctaagggacagcatccagttcttaagataggactagggaagagaagggtaaagtagagatgggaaggaatcaagaggggaaaaaaat

SEQ ID NO: 43538 - DNA, 563 bp, Homo sapiens
gaaatgctccaagaggagctgggcagaagatgcagaggagctactttcctggtccaaccccctgcagagcgcgaaacagcggccctgggcaggatccccgcagcaaaccgcagcccctggacacacagcaagcttaatagtcactggatgaatgaaaagcgctgcctcctggtgccctggctgtcacccaaagcgccccgcgtagcccgcacagcctttccggcagtacctgcggcccctctccgccgggcctgcgcttcccgccaccgccgaccattctgcagctgcagcgccagcagaattccccgatccgcggccgcttccgagcgccgccaaccgcttccgggttcaaaagcctccaagccgaatttcagcgccgcccgggctcgccaatttaggggaaaggctccgcccattccccgccccctgagacctggcaccggacgcgttgaggccccgcccactcccgtgctgggcgcgtgcaaggagcgtcttctgtcagcgtagtctgcatctaggctttctggagcatcttccagggtcgctccagagaccccccagac

SEQ ID NO: 43539 - DNA, 1063 bp, Homo sapiens
ttttaacatcatacaagattaagctgaaaaataggtgattactaaatttgatattctggagatgtgatggtcatggaagatcttttggcataatccctccacctgttgccttgggtttggtccttcttatttcctgtctaggtaattgaagtggcctgcacttggacttccttctcaatagcccttcatctgctctcacattgttgccagagtgctcttctcaaaacacaagtttgatcaagtaatgtttcatttaaaattctgggctgggtgtggtggcacaatgcctgtagtcctagctactcgggagggtgaggtgggaggatcgcttgagcctgggagtttgaggttgcagtaagctgagattgcaccattgcccttctgcttgggcaacagagggagactctgcctcaaaaaaaaaaaaaaaagaacaaaacaagaaaattcttcattgcctcctcattgccatcagtctaaagtccagatttcttaactaggtgcctaatgaagactggtcttgaaaaaattgtttgaacttgcaaaatattgtcattggaagagttacaagcagggtttttgtttgtttgtttgtttgtttttgccttctatgaatagagactggaatttatttttgttcagactatgttcagaaagagaccattctgctagtcacctttggttatgcagaagtagtaggaggatttaaatattattcttgtggctggctgaaattgacaagggtcccagtgaaaatgctcaaaatgggatgctaaataccctctttaataatgcaatacttataactaaaatttgttgagccagattctatgtgccaggtactcttgtaagctttttatttgtattaatgtaatggctgatagtaattctgttacaatcccttgctattgatgaaatggagacacagaggggttcaatagtatgcccaaggacacacagataagtaaccagtagaattcagattggaatccaacacgtctagctccagagtcctcactctcaagcactgtgtgatagagcctccattgcataagcagggctaagc

SEQ ID NO: 43540 - DNA, 500 bp, Homo sapiens
gaaagtttttatttgggcggggggggtgctgtcagagttggacctaaacaaatacatggccatttagggggcatccctttggtggaggttgaaccagcctgctgagagcttggttgggattaaaggattgggttgggccattgggctccaaggtcaattctttctattagctgttgtaaataaatctgttaatttgtccttaaccttccaatcttctgtaaagttttgttaaaggtcatggttaggtatgatgactcatctcaaggccagagaagagatggcaaaggccccatctatctatcttcctctttccaattgctcctctccacatagaagcaattggattcccacccagcacagtgcattctttcaggtctccatgctttgtcgcactctggacttggagggcctgttgttgacctcccaatccactttgttttcagttatactttgctgcctgcagctggggcttacacattactaaggattttcttcatggc

SEQ ID NO: 43541 - DNA, 531 bp, Homo sapiens
aatttacacatttgaaacctgagctcccgagaccataagctaaatctgaagtcaaaactttcaaaaaaaaaaaaaagtcacgttaatcattctcacagagttctgaaagttttgccatagaccctttatctttttccttccctacaagtgcctggtggcttcccttctacgaggactttttgcagtagaaacaaggtcatgtctttcttttattatttgcctttgtgttgccgccagttttaggaccttacttagaaattcccagtacatggactatgttcaccaaaacttgtaaatatttgtaaacctgtgttctctaaacggttgtaacgattattgctacatggtccatttagcaatgaatcatggtctgccccgtgacacattttctctcttgacctgagccattatttcaacatttcattgttatttaatttaattttttttttttttttgagatggagtcttgctctgtcactcaggctggagtgtagtggtgtcttcttggctcactgcaacctccacctccca

SEQ ID NO: 43542 - DNA, 1943 bp, Homo sapiens
tttttgctgttgagatgtttgagttcctcatacattctggatgtgaatcccccattggatgagtagtttgcaaatattttctcccattctgtaggttgtctattcactctgtcgattgtttccttggctatatggaaacattttagtttcatatactcccatttgtttattgttgcttttgttgttagtgcctttgaggtcttattcataaaatcctttctcaaaccaatgttctgaagcatttcccttatgttttcttttagtagttttatagtctttcgtcttacagttaggtttagatgcattttcggttaatttttgtatagggcaagaggtgggggtctaggtttattcttttgagtatgactatccagttttcccagcatcatttactgaagagggtgtcctttccccaatgattgttctcggcacctttgtcaaaaatcagttggctgcagatatgtaggttaatttctgggttctctattctgttccattggtctatgtgtttgtgtttattccagtaacatgctgttttggttactacagctttatggtatattttgaggcgtgctaatgtgatacctgcaactttgttcttttccctcaggatttcttggctctatcttttgtaattccacagagattttaggattgtttttcctatttctgtaaagaatgtcattggtattttgataggcattgtgacagttttgaaaaatagattatagcagatatgatgctatgtgacttccaggctaggtcacttgctctcagagctctgagtcaccacgtacaaggtccagcttccccccagttttgcacagagacaataaggagaaggcctgtgattacagatagaaagaaatgttcagtgagtttctcgttgtttgagtcatcccagcccagccccagacatatgaagtctccagatgactctaatacccagacattagagtcacctctagacattttagaatttcatccaaggagccagctattatgaaacaagtcatccttactgtgttttgtccaaattcctgtcccacagaatctgtgagtataaggaaggtttgttgtgcagcaatagataaccagaacaacacacagactcagtggctgcatatacaacctgcaacttgtaccgccatcatcacatatgccagcatggatggcagagtctctgtcactgctggccctggagcactggagtgctaccactgacccccctcaaaaggatggatgctgcatggcccctgctctcctattcgatctctaaggaggttatcatcttatttgtggagccatatgtttgttacaagggaagctcgtagagtattaagctttttcagcttctagagtgagaggcaggctctgtctcatggggtgggagattcctcaaagacagtagaggagtttagagcctgagctgcctgaaagaatatccgccccagggtgcattgccaaagtgtgaaaatgggtagagtaaactactcttggtcagactctgcagagaacacaggctgaagatgctgtggtacaaagcatctaggctccaagaaggaggtgctaccccctactggggccagctgaatgaaggcaattctttagggttgttaccccctgcaatttcagtttaatccttggactttaaggtagtacttaagtttcccatctcgcatatttcctagatcatgtattcacatgctcaaaatcctccagaggcttcccatctcaaattagagccacagttcttaatattgctgatgagatcctgcaagcgctgcctcgactcccctgccttcgctcctttgactcccaactcaccaactatactggatccttgctgttcctagagaaacccaagcactgtccctctagggattttacacttgttcttattgaggccttcatacaaagacccctacatatgaaacagagac

SEQ ID NO: 43543 - DNA, 1451 bp, Homo sapiens
taggatatcttagttttctgtttcagagatagtcttaatcagaaagacacttttaataacataagtgcttcaggattattcaccaaatttataagcattttttggttttcatctgaagattattacttgaactttacaaaagaatgattgctttgcttcgttgagaagcatcactttctgatgagtcaggatgtaccaatatcaagatgagggatatttttataaaaacaaacatctatttttttcctggccaacttttctactcatcagaattagtgcactgctcttcacttgtaggaatcctgatgagacacgcaattacctagttaccaattaacataaagaagatcttgtggaacttcgggaatccctaatcagctggtctgcagaaaaacaacacagcccacaggcgcgcatgggggaattatgagaaatatttggaatcactgtccacattttcttatccttacacatttttccagctatttgtcttaaatttaatacacagtatgaagtagaaatagacccagggttattagatcagagaaactgatcagggtaaatatgtcctattcatttctacagactgattgcttaccgggtaagaagagaatgtaactccataccacaataggatttgttcccattcagtttaagaacagattacaaagtaagcactttcataattggtgaaattaaattcctgagtatttagtaagaacaaggaagattttatttgcacaatattctcataaaagtaaaaaacaactgagcctaccttccatccatatctggatctaacatttccttcaacaggtggtgataaagaggccacgaggcactcagagaagcacagcaagtaagtagaaagaagtgatttacacagagagttcaaaaggatttctaccatttagttaaataatacctagagtccagactcttgtgaccctgcaaatgctgggaaagaggatttacagcgaggttgggcggggctgatgttacataagaaagcagccactgagccacgcacactgccagatgccaggtcagccaggagctcagggatccaaggcccctctcagactcctggtgcagcgattatagagttcagccatttaggagagtgtgacagagtggcggcagatggcccctagcagaaataagttttgaatctggctctgaatcccaccctcactactgcctctagaatgtcattaaacttaagcagaggagaggaatgtcagaaccaagacaaagaactgtctttggttgagagggtgtttctgtccacttgctgtgccatgcaggacgtgagacgggatagggagatttcatgtgtgtcataggctgatgtggttctgccattgtaagatcagccctcttgacatagtgactgtttccgagaataatcataatgaatcacaaacctgttagcacttttttctcctcct

SEQ ID NO: 43544 - DNA, 2544 bp, Homo sapiens
ctgctaagtatccttaaaaataatgacagttcgatcgtatcttaactgttttctacaatgtgagcagataatacacctacaaacctttttttgctaccttgctttataaagcttgcaagtttttttttcagggctggagaagacagcttaatgatcaagcttaaaataaatcggttctgcaatcactctgtattttaatccgatgaagcacgtttccccattccacgccatgaagcaattcgatgtcaacttgttatggagtcaaatgcgacaaactccgagagcttcagtagcgaggcggcggctcgcagcacccacagccgcccgcactcctgcggcatcaggacacggcgccctcccgacgcggaacccgcattcacgttctccggagccctggccagcgcacgctcctccctgtccgggtaaactgaggcacagcgatgagagagatccagagcccagcgaaagcccccacggctgttcggcgtccccttcccccacgacacctaggaggctcgccggcagctggcagtggattccgcgctcctcgccctcggaaggttacggttcgagcccaggatgcggcagtccccaaacggccagcccccgccccgcacggatctcgaagcatcctgcgaccccctggagcccgctgcccggaccctgcggcgtctcgcagcgcagcctccgccgcagtctcagccagcccaaacacccgaaagttcggcggccccggcgccgactcggccgccgacccggtgcggggctggctcccacccgtgcccctccgccccggcccgccgggggcccccgctaacctgacaccgccgcgccactcaggtggccgccgtgcacccctcgccatggccagcccgacagcggccgctgcgccgcactctgcgccggacgcccggtagcgcctactgcgggcgagccgcctccgccggcgcctcacagcgttgcgagctgcgccgccggctgccgggagcgcggagcttcccacctacaggagcctgggccggccggggccgagcatgcccagtgcggctcgccgggcggcgcggaggcgcgggtgtagccgccgggttttcgcggcagccgcgggcgggggcagcggggcgggcggtgcggcgcgagccagtcggtgctgcggagcggccccgcggaggagccaccggaggctgtagttgccggggagtcccgcattcagtccgctcagcctctgggccgggcctcggcggcccccagagccccacacccgcaggcccagggcctccgcggcagcgcgggactctcactccgctctctctcccgcccggggcttccaccgcaacttctgtgggcgtcgcatcgcacgcgtgttcaaggacacccaggaaaaggcttcttagggtcccatcctggggcgctaaatgggaaccagtcaacccacccccaagcctaccctgtctccttgcaatcaaatgcaatcacgagcaaaccaccttgcttccgaaagcttctcaggccttcccgggcgactgcgctgtaagtcttaaacgtctcttaaagcaaagtccacagatggaagagtctggaaaaaaacccagcgggccgttccctggtgactttctgagtggtggggttccaggaatttttttttcattttctttaaaaatattatttgtaatttccacgttttttctaatgaaccataagttgattttttaattaaaaagtagagtactctaaaattattaagtacctacagaagtttcgctacacgatcctgcaatgttagtggcttcttctcctccttatctccctttttttttttttttttttaattttaaaagagaacagagactctcaatttctggggcgggaccaggctccttcccccggctttttagtgcccgccctcttggccacaccccactccggcctttttactcccgtaccgccctcttcccggtgggttgctgcgaaaacccggaaaggtggactttccacattgacgctcccggcggctccggcagccagactgggcatgttccgccgccgggtcaggcattgctgtgccaagagaggagctttagcaactctcagtctctctgctcctctctgttcctggcaaactggcaaagtagtgcctctgaccccacgccccgaggtcggacctgcagaagtgggtcaggacccgactgagcatgctccgggcagtgccaggctgccgcacgcggctgcatctggttgcccaaggttgatgtagccgcggtctctcgtcacgacatcgaagctcgggaaacggatggaagcagggctctagagaggcacgattgcatcgacacgtgggcaggtcgcccatgccaagggccatgttggtgggtgggtgcgtgggatctgtcgtatgagtgagtcaaagcctgattttttcccccaaaaagattgaaatgagatatcatattttaacattagttttatggcatcttgaatagcaacacattttagctcaaggaatttttcagctgtccttttgagaaacgtaaattttctttgttttta

SEQ ID NO: 43545 - DNA, 1403 bp, Homo sapiens
agcttcatggcccacccctctcccatttacctggccctctccactgtacacccatctgcacgctgtgcatgccccttctcagcttcccaggaagagcctttcttgatagcacgccccctcccttccaaggccgtgccccacagcagtctgcgcctctctctactgttgctcctactctgctccagcagaaatacccgccttccgtttcagcccgagttctttgagaacaaaggctgtgtctatttcatttctgcacgcagagcctggctcaccgcgagcgtgcacaggggtacgcatggatgcaaccaagcggtggcttgctagggaaccctccttagaggctgtgcgaggaatgccccaccccaaaggagagatggtcaccccgtttctcactcatggtccggatgggagaagggtttctggctgcgctcgctgccgtgatgaaccgtgcgtaattcatgtcttctgacagccaagcatcaagcttcttcttcagtggttgaggactagaaaaaccaaagagcctcgtcaagtcctgcctgctaactcctcactctggcaacgccaccgcgagatgtgtccccccgctgcgtctggcttcccgcgcgcggtgcccggagaacgccgccgaaactccccggctggacgctgcgttcggtctcccggtcctaaacgggtctggggctgtgtggcgagcccggcaaagtccacgccgcacgcgctcctgcggccgccagggcccaggccggttttgccccgccgcgggcctcgccgcgccccctcccgccccgcgccgtggcctatggccgcccgcggcgcgcgcctccccgtcccggatcatcgccctcagagcgcagggcgcggggtagcccaggcgcgaggcgcttgcagccccaggccaatgactcttgacctcgccgctgggaatcaccgcaacccggcgtccgcgttggccggcctaggcgccggcccagaggctagcccaggggctgaccgaggggaccggaagtgcccgtgatcctaatcctcgggaaccatctggcggcgacttgggtccactgcagggggctcccgagctgcgcccagccgggagcggccccaccctcgttcccgcgcgctccgctggcctcctctcagtcactgggactgtgcattttgcccgctcagaccatggctatgctaaatacccatctttcgttagtgaaactctgggcactctcctgggaagcatcccggcgaccaagacgaatttcaacatcactttctcgaagatctcagcattttggagtgacgatggagttctgacaaaaatttttgaaaaatcactctgagtctcttcaattttagtgtctaccctcacattgaatttctgacctttcgttaaataagaattatgttggaag

SEQ ID NO: 43546 - DNA, 2339 bp, Homo sapiens
ctttgtatattagcctttgcacaactgtcttgtgctttttctgtttccaagtgtctcccacctctgcagtctgagattgcttaaattaagccttcctatgctcttcctgacacacagcaagacctcaatacatttgtataaaaattaattaaaatgagtgaattaagaagggaagttattgaagtggttagccaagtactaaagaatcagtttttacgtcaaaatatggcaatagacccaaagtttggggaaaaaatagaaatgattcagaaacctgagaaagagaaaaagaaataaaaggtgaaaagctcaaggaatctgggattcaagaatcaaaatgtgaaatccaggaatctgggcaccaagaagaagagcaagaaaggagcttgaacatcatcagggtgctaacaagatatcacctgggctctccttcttccaggacacccagacatgatttcacacaatttttcacatgcaatggaagtcttcgtctcccccaacagccaaaattttctgggtttttttcaagtatttttcccctgtctccgtgcttctgttagtactgaattagtttgggtcatgaattatttctctattccatatagcattttaggggtaattctcatctcctaccttagttctttggaaaaatccatttaacacaacatttgcatgtataggagacactacagaatatctatgaggattaatgaggattttaattataaacattaataaaagcaacttccaactgaatattacatagtcctagtactaagtattttggctctccgtgccacccccaaactttttcaccttctactgtactcaggctccacacattcttctagttttaggaatgcagaatttctcagagcatgtcaggaaaaatattactcctaaacttagctttgagtccactgtgcttatctagatcaaataaggatcttcttctcaacagatataaggggttgtaatataactggagagactctttatcaaagataatcaaaattataaacagtataaatgttcctaattaggccaaaacgttgagagactatattcctaacttaagataaaaattgggttgaaaatattgtcaaaagttagaattaggtgtagaagggttagagataggcttagagtttcttgacaaatgtttaacaatcttgcgttctgctttaaagaggtctggatttggttaatgaatgataaacagtcatttcctcatctgtgaaaaaaattattcattctgctaatatttgtcatgcttctatgatgtgccacgtaatgttctaagcttgtagatatatcagtgaacaagagagataaaatacgtactctgatagaagttagaggtttatagggataataatggtacttatttcataaggttgttgtgaggattaaattataaaatgtatgaagcccccttagaacactgcctggaatgttgtagaagtttcaatgattataattgaggcagcgttccttccgcgggggcactagctgcggggagtctgttccttcagagccctgattcagcgatggatgaataaacgtacactgacacacagatattctgctctgccagtcccgctgagggtcccagtcgcttacaggcttcctgctgagccctgtaaacagttgccactgggccctgatcagctagcgaggctctcgccatttattcagtgactaattaacaaaagttgtgagtaaacaccactagaaggtaaggatcaaaggccaggttccgaggcctaaagcaaacatcatttgcaggtaataaacttctgccgacccccgagtaggaggcagtaaagtacccgcggtaggacaaaggtcagtcttaagccaatataagtaagcatgttagtaagagcaacttcccacattcctttgtacttgcaccctaatctttctggctcctgcaaggagagcttggctgccttcagccaagcaatctgaagctatgcaaactctcagatcttccaagagagtttttggctattactataactatcttaatatttttcccaccagcctgattgaaccccaacctataatcacaattattataagatgattatactctgatgagaacacttgatcaaagtacagtgatgaagaataggaaagttcttgacacatagggatgaaaataatggaagcttatcatgatccatccaattcaacacatattgattgagagcctatcatatatcagatagtgttctaggagcttgaaatacagaaatgatcaaaaagaaggaactcagaagttgtcagaacatgtttcttacctggtgtatgaggtccctattctctctcta

SEQ ID NO: 43547 - DNA, 1410 bp, Homo sapiens
aagtagctgggattacaggcatgcgccaccaccctggctaattttgtatttttagtagagacggggtttctccatgttggtcagactggtcttgaactcctgacctcaggtgatctgcctgcctcggcctcccaaagtactagaattacaggcatgaaccaccgcacccggccaaacatcttaacaatattaagtcttttgatccaagaacacagacatctttccatctacttatgccttcttcaatttctttctgcatgaataatattttagccaaatgtttccacaagctcactgcccttctgcccaggcaggtcccaaatgcagctcagcaggcttcccaggttcctcagagccctccctctgctctctccatgactcaatcaccacgggacatctcacaccagaataaagccaaggagctaaactagagggaggaactgtgcccttaacgtgatttttggctttattgtccctggctaagcttctttgtttatttgtgtgagtcagcttcacatttcctctagaattgagactgctatcaaaacaggccctgacatgttagccagcagccagtctatacataagacaatggtcctcatgactgaaagtcagaagagatgctgaagtctacaattagtgtggggctttcacaagctcttgaggccccaagacaaggggttggaatcccaggtttactactgactcactataaattacctatgtattgtctagcaggttgaatggcagcccacaaaaagatatgtcaaatcctaatttcaagaacatgtgaatgtgactttttctggaaaaaaaaagataagatatttttagatggaatgaaaagataatacgaaaaaaattttttttccaaaaaatatttatctgagatgagatcatcctagattttctagatgaggtataaatccaatgaaaagagtctttgtaagtagccaggcacagagggtcaactatcacatgttctcactcataagtaggtgctaaaaaatgtatacatatggatatagagagtgcaataatagacaatggagactcagaagggtgaatgggtgggagggaggtggatgatgagaaattagttaatgggtataatgtacttcatctgggcaatggattccctaaaagccctgacttgaccactacacattctacgcatgtaacaaaattgcacatgcactccataaatttatacatttttttaaaaaaagagtccttgcaagagacattcagggaaggcagagattgcataagccaccacaagccaaggaatgctggcagccaccagaggcaaagaacgtaatctcccctagagcttctggaggaagcacagccctgccgacagcttgatttcagacttctggcctccaaaactgtgagataataatttcc

SEQ ID NO: 43548 - DNA, 2149 bp, Homo sapiens
taagatattcaggtgagtcactggggtggcaaagttgaagctcatgagttgcctactacctgcctaaggccctcctagccgaaaaccacacctgcaccccctgagctccgtccctctcctgcctcaccttccatctctccgaacacttcttggagaattccgcgaaattgacggaagagtccgggtgtttcttcttgtgctcttcccggcaggtctgcacgaagaaggcgtacgaggacattttgccccgcggcttgttggggtctcctttacccatgttgacagatccgcgtccacctgacggggccgaggggggagaggggaagccggagggtcggcgcggagcccgcagctgccagggcgggcgctggcggggctccgcttcccgcccaaatccgctcccgccctgcccgcgcccccctcctcccgagggcgtcctcccaagggcggccgcccgcgcccccgcccgcgccccggcgcacaccctcctcctcctcctcctcccggcccgagcggccgcggctcagcccagcaagtggctcccggggcccgagacgccgccgcccgcccttcaccgagtccggtgactccgcaagcgccctcaaaacgcctttcctgacagaaatgtcccccagctcccacgtcgcgagcctcacttaaccgctaagcacctcgtgaccgacattgaaaactcccagaaccgggcccggtcaggggcagtttccgcctcctccgactgcccgccggccctccacagacccagccctcgccggcccgcaccccaaatgccgctcgccgggtcagaccccgagagccactgcgccgagaccgagtagaggctctgagggaatggggaaaggcaggtccacgaacccgagggtattggagggtattcttgcctggtgcgagcttttcctcagagtcccgcagagcggccggacccaacggagacgcttccctcacggggctccggcgtgaactggtttatctctaacgcaatcctcagcctcttgttttgcagagttctccgcgccacggcaacttgacgagctaggccacgggccacatccccactaatctgattggttctgacgattattcaaacccagatagtccccgcccccttgccacggaggctaacgattggtcagtgtcttaccagacccgccctccacgccccagcctagcaggttcggtgggtcgcccaggtcgttaactcccagacccgttagaaccggtcaggagaggaatgtactgctcgatcctgattggcggcgggaagagggtttgaaaaatggcgggcctcacgctgactggttggggctgtaaacggtgggagtggttggctcgggaaggaaagccccgccagatttaaaaatacttagtcgggagactgggggttggtctcctggcttggcgacggcggcggctcggtttgctggcgctaaggtaacagaagaggtctgccttgcccttcctccgaccaccatttaggtcctgtctgtcccccgcgtcggctcagccctgcagcgttggctcctgggagctgtagtcgctctgctctgttgccctgcagggtctcccgtgcgccgcccagagaataataaatgaggagagcctggagtttgccctgcaaaaccgattgcccagctcctcccgctgtcgctgaggttgtcgtagaactcggggaagtcaaggcagggaacctcggaaagggcgcggggggccgggagggaaccgttcccgcgtcccgtagggtgttaaaaaacgttctgaaagtaagatgcttcccgccgagggagtttccctcagaaggctcctccttccttccctctttgtctcgggtgacaaatactgggaggtaaacaagggcaccctccgggtcccgaaggggcggaggcggcgccttctcccccggccccgccccctcctaccgggtccggaattccaagccccgagtgtctcggcccccacgccgcaccctgcagcggtgcgccgggagctcggagccggcggctgccctgtctttggctggcctggccttcgcctgggcattcactgtctcgtcctactagtgtgatagtttttaaaaattgagaatcgcataaaagcaatgcatgctccctatcccactcccaattgcgtatat

SEQ ID NO: 43549 - DNA, 1565 bp, Homo sapiens
actagtaaagatgcagctttcatattagccacgcccatccctctctccgccctccacaagcacgtccccgcaagcgcgcaggaacatacacgcgtacgcgcgcacacacacgtacacacgcgcgcgcccgcgaacacatacatacaagcaggcgcgcccaaacgccggcagcacacaggcgcgcacgcgcttttcaggactcaggaaatgcgctttctgctccccgcgcccggtagagctaatgcagggaagtttctgggaacattcgaccagcgtttgtattggtgaggttccaagtttcctttaaaatgatatgactccgcccttctccaaaaccgtttgaggagaaatggaaaaggttgggcgtggaggtgaaaaggagccctgttgtcaactggtccgtactccacctcaggaggcggccaacttggtgcgcccaagaataaaaacatttcccttgtaagaacatgcaagtgtttagaaacgcccccccacccccccgcaaggcgtttgtgagggggacctgtcacagttgagaagtcaggatgggcgttttcctcccaggaggtgccctattaatttgcggcctcgatagttggtcaagccgggatgttagctgcggaacctccaggaccgaagagcgccaattctcctgagttctccttggtttgggtttcccacaaaagagtggtcacaccaaaaactctgtctccacaaatgcgaaacgggctcgaaacttttttttccccacacgatcacttcccacaccactcccatccctttatgtttcgcctcaggagtcgaggaacttctctgaaaaccaattctacgatattccagcagctaaacacagcccgaattccctagaaacagagagagcgagagaaaacactgtaaaccccaatcacacgctcctgttttcccggtactgaaaaaaaaaaaaaaaaaaaaaagtgggtccgtggccgcgctatgcatgctaggattagtagttcctccgtccctcatggcgcggggtcagggcggagctcaggttgactctgcagcagagaactacaattcccatggggccgcgcggcagaaagaaaggggcgggacgggagggggcgcgtcgcgcttgcgcaggtcccggggccggagggaggcggaggcgtagcggtccaactgctgaagtccccatgtgacagtgagcggggtccccgctccaggagacgctcgagtctgcgtcccggccctcagcactgtccactgtttcggtgccagcagagaccagcaggcccgggacagttggtgtttggccgtgccgctgtctaacttggtgtgcagagtgaattgccgctgccggagcggagagaggcggagcggccaggagagaggggatttctgtcagcgccggcctcgggagctcggagacatgaacggcttcacgcctgacgagatgagccgcggcggggatgcggccgccgcagtggccgcagtggtcgctgccgcggccgccgccgcctcggcggggaacgggaccggcgcgggcaccggggctgaggtgccgggcgcgggggcggtct

SEQ ID NO: 43550 - DNA, 1394 bp, Homo sapiens
actatctgaagttaaacataaactattcctaataatagtaataatagctaacatttactgaatacttactagatgtcagaccctatttcaagtattttaattggattagcctgcctaatcttcacaacaatcctatgacgttggtgatacagataagaaacacagacaaaacagttgcccaagatcatacggctaatatgtacagatgcaggatttcaacccaatgagtaatccacagcttgcaattattaaccaagaatctaaatagggtttattaactaacctatgtgctctattgtgaaataaaactaaatgggaggaaaagaatgctgggcagggaaacagcttttgtttttcaaataatacacgttacaacagacaaattaaatacagaaattgtttgtaatgccacaacttgaatacattcatcaagctgtgatgttcaacatagctgtttttaagatactgcttcaaaaacactagttctttattatcagagtgatacatgattgtttagaaattctataaaaccgaaaatactaacagttcatatctcaaaacacactgcagattgggatactttctaactcttcacagaggcaatagctactggttatttgaaagttaatgttttatcttattataatgcctggaaattctggatatccaccaaaaagccttaaatataaatgcattattctagagaaacagagaatactgaaattatattctgatacaattgtgatgagtctttgtctcaaaattatctgatttgttgtgtattcaaaaacacctgctacttgttgagacaaatgaaactgtttactttcttatattcattattaatttctgcctcagatttccttcttttaataaacacacaaagtgcagagcaacaagaaaaagttactgtctgagcatataacatcaaaaattgtgaggacaagggggtaaaatatctaatttaacatgagactaccctcttagtagttgatttatactgctgcattatttttacccaccaaatgaaatcactgactcaaaactgtaagtataaaaaattgtttagaatattatcaatattttttcagtcttattaatctagtcccaataaaacccaaaactagagttttattactaagctttgtgaaaaccagagaacttcccaacatcaatgagtattcaatacatccaaagttgaaattaaaactaagccagcctttaatttcaaatagaagcaatttattattaaggaaaaaatccaagtattataaaaataggcataattatggcaaatatttctttcacaaatgaaaaattcagatttaaaccccaaatgaagaatacattctggttgacttcaggtaaggctagaaattaaacttttaaaaaaa

SEQ ID NO: 43551 - DNA, 2232 bp, Homo sapiens
aaagacaagtttgacaagttttataacccaagtttgactactgtagcagctagcaatccatcgtgatcttaactatacttgtgtttgcattcatattactggaaagtggtaaagaaccaaaaactgtctaggaaccaaaataacactcgacccgaaaaccaacacttggacctgaagaaagtaacccttgtcatttctcaggtttatttcacaatgacgctgggttactacttggagtcctaaaccgaactacaccccaatggcctagaaacagaaggaacacacccagttccgcctcctgacagtgattcctcactttaatgagccaccactactgtcactcaagatgcttcgcactgtcattggtcgcaaactcttgctggtcggccagtttcggccaactggcaagcactggttgtctttattttcgagaaaagtgaaggtgaacagggaaaagagacaagagatctaaaatatctaggttgactcctgtacctgagcgacctgcgatctccaccgccgccgcgacgaattggcctctgggcggggacttttagccaaaaggaaaatggctcagccgggaactggtgcccaggccatggagaagctgattcaaactttacttgtccacaccggtagaggtgaccgcgatgagaataccagaaacagcactacgaccctcagaactcagggtacctccagctgcaggggccagaactgccgactatcccaattttgacgtttcctattgttgccggaagtgacgttaggctccgactcttaacggagacgcatttttatttctgttgtttacgattcgctatagattccttgtttctcacttcgtagcacgagccactctgaccatcaagatcagaaaaacttctcagctgcaagttagaagtggactggccattgaggaggctctcagcggagtcgctcttcacaggagtcttgaacgcggtgtggaatcggcagcgaggaatcctggagcacagagaagctcccagctttgaaggtcttgcggtggtgcgtggcgggcaggaacccacaattccaaatacaaacggtcggcgcgagaagcgcttctgggcgcaggcgcctggctgtagcgactggttgcgggaggctggactctggtgactgtgtatggttgcatatgctccgttttcctctccctgtcgtgctgggcctttgaaaccggcttctttgctggtggctgcttggtgagccccgaggagacggcaaggctgcgcctggtattgggcggaggtcgcctctctccgccgtccttacagagaccccgggcggagacgaatgaccagatccgccttttcattcttttaaatcaaatggcgggaggggagccttgcttatatacccaactagtatatgcttttagtcacaacgaagtgggaagtatcgtggtagctcatcctatcagaattaggttgtgacttagggttggaaagttataggcttactgattcctattggatcctctggggtgaggatacaaacggctcctgactataaggaagacaggacagcagttcgtgttttccttgttggcatttccccagcttttcaaatatttctccacctttattgaaggctacagatttttccctcactgtaacaagttaatcttgaagttgttattctcttttactctggaattatggccatgctagactgtttttttcccgaattatctgcagaccttttaattttatgtgtgaacacagcagtcccgttgaactctttacttgtcccttactcctccccactcccgcccagctttctcgatgctttgcctttctcagacctttctcctatctcttagagaagtatttccctaatatcttttgcagtttcataaactgtttttctcatctttacttttttgtttttgatacgtgtttttagataatatcgagcattatgtgctatgtcacaaactcttagccattgactgttattagagtcagtgtagttgcttcattctaaacaaaaatcactctggtccagtgacattctattgggaggcattgttttaatgacctctaacagcaatgagattgagcgatgttgaaaatcctaaactgctagagtacactattttcacaacctctcccacaagttcaattgcgcagatctgacttgtagacaaggaaggaagctagaaaggaatattgagagcttctttattattgaatctatgctgcaagc

SEQ ID NO: 43552 - DNA, 2655 bp, Homo sapiens
tccctggatgaatactacattacttttaaatgacaaaaactgtaatttcttttgcaccaacctgatagatacttaacatattagtagcaatacttttggttacaagtaacaaatccccaacttaaattagcataaaccataaactagagtttttggctcacatatctgaaaagtccaggtatgttttgatcaaggcagtctctcagtttcctgtgattctcttggctgttccctcctctctattctggtttccatcatattcacaaaatggttgccaatagtagggcaaccagggcaacaggttacttggttcacatccaagaagagagacagtgtcacattctataatcgttgaacaaaagtcttgagatttactctgattgggccaatcactgtggccaggaagaagacaaatgctgattgatctgggtttgggaaaaagcccttatggaaccagtatctgttttaagtgaggtaagataatatagcttgaagctgagatagagtcaattcttccaaagttcatggctacagtacaatggggaagggatatttctaaaggaaaatctgagtgcattttgtaaaggtgaaatacattctgagtatgtagtaaaatattattcatcaagtttctctacatggagtctattttttaacctctgaaaaatgtaaaggaaaacagaggttcagagttcattgtttgccaaattgataaactgtgtgtgactcatatctggtttggcaaagaaagttcctttctcctctgtagtaatcaaatcttcattcatttcatagaactggacatacatacttagccatgtgaaagattcaaagtactgtgtaattaaatggcacttctcactacgagtcctagggagaagttctgatatgcctcacataattaatttaaaagaagaaagaccaagatgatactcagtcatattgatttattttacccaattttttctaaggtttacaatgcccatcctgagactgaaggcagggcatggatacatttaaaaaaaaccagaattttgaggaaataacaaattatgtttaaggagttattatctacaaatcaatttatccttatcttcccttgtagattctattattatcatatcatttatcaatagctattattacctctcctgccactgacaacacagctcaagacatccctttacttaatatccattggatgtgaataaatgaattctgttatctgactgtttagctaacttttttcaccacctaattttaatttgatgtccttatgatattgacttcttcattacagtggttttcttttaaatccatgaagaaaaaagctaggagaaaaatctgtctttaatttgcttacttttaggtgattatgtttaactaaggacaactcaagttgcagaaagcatcagataactattttcttgcctggtggtgacagcctacagctgtcatgctccaatgcccaactttattgctaccagaggttctttatccaaatataacctgtttacctttctctggtgtctaaaattcttatctgtacgtttatctcttatttgctttagccttgtcccaacaagttgctttttagggtccttaatacagcttacagttagaaacatttccaggtacttaaatgcaaattaaatgattgtttcaagcttagaaagtgaaatggctggattttgctcttctggccctggctgtgggtctctcttcacctacatgctacaaagttcaacttttgaaaagggagaattggtgtggaactttacgtgctgtcccagaagggcagacgtgggtgagtcattgctgtgacaacatgtggatagaagagcagcccttgaagagaagggttagaaaggttaggagttgggaagagtccagtgactatgaaattttccttttttccagctgagaatcagaatattgtttcttcatcaacttaaattgaagcaaaataaatctaaccccatgagttttaattgctatgtactgaaaatctaagggattgtctggctgacacctttccctttattctcatacctgagaatcagaggacgtttcctataatctcttcctcctggcactgttgattggtccagagacaggcacaatccctgaaatgtatcaagaggagtccttagaacagttttagaaatggaaactcagaaatggaagtttctatcttttaatatgccaggaatgtacctataaagataggagtgctgggagcaattaggatcatgttttctaccctgagaatgagagaaggtaggagtcttcactagtctgatatttaagtcaaactagtcataaaatatattcaaggtccagtaaatgtcatttaaatctaataagaaacataaaaaagaaatatgaaatgcaattaggtggtgaaaaaagttagctaaaccctcagatagcagaattcatttattgaaatacaatgaaaatattaagtaaaggggtgtcttgagccctgttgtcagtagcaggagaggtatcaatctgcatgacccttctttcaggtctctcatccttgccccaaatcacacaagtcaataagcacttttaacatactgagattgtaatactatttccttcttcagttaaaaaaattgactttttggggaggtttagaattaa

SEQ ID NO: 43553 - DNA, 902 bp, Homo sapiens
atagaaggtaagatttaaagtaagtttttaacttatgtaactcacatttttcaattctacttgatatttgattttaaatgtctacataatttattgatttgaaaaaattaattcaaagcagaatgtatattgaaggctactagtccaaaaaattgtccataaatgaaaaggttatactatttacacgacagaggaaaaatacagaagataagtgatactgggcaaaccgacatcatttactgattagtcactgccagaacatacaaacaagcttatgcctgattacagtttatctctatcagatgttcattgatgttcactactttgtctttaatacattatatgaaaatctagaccagagttattaatattcaaattactccttaaaagtgaaggcaattgttttctatagcagaattaaaatagggcaagatatgacaacattccagtacttctaggaaatccatatcaatctcacatggaaagatttggcttcaagctgggaggtctggagttagcagacaggatgagtcacttatacgatatttttttgagaaaacgactgatttggaaatcttgtgctttcactgttactagtgttaattactgcttgcaaagagttttacccaaagcaggtgtatttaatgattcttaagatagctgacaacaaaaaaagcaaaacctcacagctatttttatgtctgtgttgttatgagtttcagcatgggtacaaaaacatttacagttgtggctgtggcaaaattggttttatttccttgatagctatacatagaagactaagtaatttatggagatcagaataaaaaagttttattgaagggtaggcacttttgaaatttggacaagtcaataaagaagtaatttgaaaaaaatattacatt

SEQ ID NO: 43554 - DNA, 2026 bp, Homo sapiens
gccacatttgattgtcattggactccagctttctgggagaagttgtttgtcaacagtaccttacttaacctactttaattttccaagttttgtctgcaatttcaatcatttaataattactgcagcagcactgtctttgaatacataaaggaattttgattacattaatgctgccaaatgactacaataaaaggatttctccagcagtcttgcctttctttcggttttacagctattgggctgtcagaaggaaacgtatcagtccaaactgtcttttggagcttcaaggtagctgctctcgaggaggcagcggaggcggcacccagggccccctggccgggctgccttcaggttgttgcttgttgagagcacgttcccagttgacagattgattcccctgtcttacctctcagttgttgctggtcagccacatcgcactggatgaacagagtcttctgaggttcaaactgctcatccagggcagctttacactgtacacctgcttcaagattccaatccaccagcgctacctatagacaagaggagaggaatcgcgggcctgcgcagctcacgaaatagacggacaaacaataaacacacaagaggctcccctcctggacctgaaatttggcaattaggtttgggttccctcccagccacttctgaggtgtgctcacagcctcagcttcagcaaattttggaagtggcaaagtgggcacgccgggcgcggcctccctgtctccgccagtgcacctcgggcggcggggcgagtctcggagtgtgtgggcagagaaatttccgcggctgggcgccgggcttaccttggcgcccttaagcagcagcgcctctgcaaaggctctgcctatgccctgagccgcgccggtcaccagcgccactttgccgttcacgtgcatggtgcagccactgctggggcgggcggtgggcgagctccgcgtctccgcgcggccgcggcttttatgcccccctgcgcgcgcgcgcgtgcagcccggcggggcgctcccctgccagtgggcggggaggaaactgtcaagccagcgcccgccggggaacccacgactgtgtcacctgccccctgagcgttctggagcgccaagcttcgcgatctttgccttccggactcgcagaccggctcaaagcctcccctcagcctctggctccgtgattggcaggcagctgacagaagaaaagttaaaaggttatttctgaagaagagtttccttcagtgccctaaagaccaactggatagaaggagagcggagcagaggcttggaagcttggatccctcctcctgcactccctcccggccccgactccggaacaaaacaagcaaacaataaagcaaacttgttgctcttttgtctcaaagttttgtgtgagttcccatctcgtaatcagtggggttgagggtgacggggagcagaagtaactaatatcattgtgttttcttagttacattttggacaaatttttacggatactggagatgagaagtggactctgctctgtcctgaaaacctggaatcataacatttcatggctaggactagagtgtccttggcgctgtgtttctggtcagtgtcaattgtgtgtcatattgagatgcccccacaaaaactgtcatcatcaacaggcgctccagagccgctggtagcctaccaaattgttggctcaatggaatgcttacttgttgaaatacaccaactttggaagctctgagtcaagtttgggacagaggttccttgctctccaggaactccagggctagctgtatgcggacttgcataaataacaagggctattccactgactttgtctctttttctcaggttgtcagcggcaggctgcaattttaattctgtaaacgtaagtggttggctttttttttttttttttttttttaatcttgagacaagatctcgctctgtctgtttggctagaatgcagtggcataatcccagctcgctgcaacctcaatctccagggctcaagcgaccctcccaccttg

SEQ ID NO: 43555 - DNA, 876 bp, Homo sapiens
acgtggagctaatatttttaaatatttttatagagatgaaggtcttggtatatcatccaggctgataatcaactcaactgtacacctgaaatatgtgtagtttatagcatgccaattatgtttcaatagaacgttaaaaatgacttaaagtctggatctactttttaaaggaaaacataaagtttggcaaccctatattgactccaccatgccttgggaaaggcagcccgcatcagtggcaggaaatattggtaagcaataaacatcatctctatatgagtcaacagaaatgttagaggggtgacaaaagccacagccctggactatgagatctctcatttctctattttcattttcttgactgtgcagcaatggccttgaggtcattacatgagtaaacaaaaccttatttgctctgacagttatgtcagttccaggaaaaacaccagcatggagtgcacccacccatgctcatagccttagccactgaaacacctatggagacactgcagaagaggtaccattctcgaccttgatgcagtctcctccagaccttattaatcacactcagtgtttctgcgccaattatggtttcagcctggcctcttaacaaatgacaccagaaacttgagttttggacatccaggcacatggttcctctgcagtgcctggagtcttctcaggggtgctaggagttatgtgacatcccccgagaaaaagggattcatccttctccccagagtcctacaggatgtcacaacaactttcccctcctcagggtgaactctgagcctacaaagaaatcctggcattcaggccacaaattaggatcacaaagtgaaatactctttcctaggtgggttttgacagcaaagc

SEQ ID NO: 43556 - DNA, 1436 bp, Homo sapiens
ccagtgaataaatttattttttgtctaaggtttagggatccaaaaagtgacactaattaccttgagatgaaatcaatatacccattgctaaatctcaccagcaagaagcttccttgatatagaagactggatatttttccatgattcctgctgtaagaaacaatatcctggcagttgttatgaacctttttcaaaaatacatttttatgcagatgacctcgcaaactgcaaaagtcttgggatgatctaagtgactgtagagacagttctgggcctttcagctggtaactttcaggtgtaattaggggctgttctgaatcgaaagtgtggctgttaaggacttctctcatgtgatggaaacactgagttataaccagtagtaggaaatgtagtgtgtgtacctgtgttttttccagcagaatatttttatttatttgacaaatatccattgagcctccattctatgtcagatacttgtctagttgcactgaaaacttagttcctgagccatgttcatgtctttgttctgtgagtccccagcttccctgttccctattttctgagtttcccagtaaaccattgaagaatgcttcttaaagaaataaacttgaattgaccttaaattataaacaagttggatcagaagtaaatatttctaaactgtaaataaaggaagttaattactatacaaagctaactttgtacctggattacgccctacagtgtaatgcatgatgtggtaacttgtgattacaaatgtagatcattaaattgggagcagaggttacatattaggtggcattgcttttttttctctatctccaagtcatttgctttttaaatgttttgccaataaagatttcactattttgtaagtcagctaatatttttagttccatagttttagcaggtagattgcacccgtattgatgtcttatgcaatcagtaaaaactgtccacaaataaaaagaaaaaaatgtaagggttctgtatacaagtttttaaaaaacttatgcttgtcatgccatttagttttattttgtaaattccaagaattaattgatgtactttttatatcatgtcttttgttggatatgaaaatcagttatttcagtctctcgttagaaataggtacaaaatatcttgtgtcttcagtacatggaaagcaaagggaaaatttttctgttaccttgggtatctttgtacctttaaaagatatcatgtactccaaggttaattaattagagtatcttggaaataatatcacttaaatatacaacatcaatataaaatcaataaaacattagctcttgattttgaaaatgtctacatattaaaaataaataaattctgcagaagtccaacaggttttcttttctttttttgttttgttttgttttttaggattttctttttgagacagggtctctctttgt

SEQ ID NO: 43557 - DNA, 1040 bp, Homo sapiens
attaaaaacactgctccatagactgaaaaggacagagagagtgtaaaatgaaagaaagttgttagatctctaaaattgtacttacaggaagcaggctgataaaaccacttagcagcaaaaattctaccttccatgaaaaaggaagaatccatagggtagatcttaataccatggagggcaattccaggtcttaaaaagcaattaagaaatgacaaacatttacctatttgtatttaagttctactgaaccactgtttctgccctccattttaccttctttttgactgggactgtcttctgctgttattctattttagtcttaccactttatattagtgttctaggggttgacaacttgtctttagtttttcagatccacagttagagaggaattgtcccctgggaactgtacttaaaagatttcagccagaagcctcatctgcgcctggacctggtttagatgatgaaattttgaactttgagcttgatgctataatgaatgacactcttgagaactttggaaggtagtgaatgtgtgttgcaggtagaagggacatgagtcattgggggccagagggcagactacggactatggtaggtagatcatgggatggttctccctgattcctctctcctggtgtatactccctcatataatctctttccattgatcacgggctggacattggacttataaccaatataattcagtgaaggtgatgggatgtgactcctgagattacattatgatgtgtaacattccagcaaacttagtttagagaacttctctgtgttggtggccttaaagcaagatgctatgtggtgagatacagtagttgcaataactgtggatggagcgtctagttcctgacatagtctctcataagaaactgaagcctcagtctttcagccataaagaaataaattctgccaacaacccgagggacccttgggagcatattttccccctgtcaaacctctgatgagaccacaaccctggtaacacctggattgtagcctggtgaaacccttagcagagg

SEQ ID NO: 43558 - DNA, 1622 bp, Homo sapiens
tagaactcacatttcattagagaggcagacactagatgaataattaattgatagtagtaagtgtgatggaaaaaaggggtaatgagagttaccagtcctcgagcccatcctataagcccaggatagaactttcacaatgtggagtggcaggtgcagtgggagcttctactctggtggccttccctgcccaaccagatagatgccccatatgacagaactggggagatgggaacaccccttacctaaaataccacatacttccattgtttttatttagattcagcaaattttttgaagaaatatttatcaatgcattctatgccattttagtcaaatttcctcaaaaaatggttatttttaacaattgtgtcccattttattgtctttggaaggaaggatttgccagactcctcacacagccattcaaaagcctcattccctgatttaattaactataaactcttcttccccccagactacttaaattttacttaccagtataactagttattttatatgacctaggtctaaaaggaagttagtgtaaatactgaattgcttgcttttaaaactagtatctagctactataaaatgtctctcaattgctatctaattttaccctagtgttccataggtgattctctgtactatcaattgctacaatatttcatccaaataagtaatatctgtatgacttcatagtatttattcacatagttattatgcactgcacaactgagaaatgctgaggcactaaatctcccattattaccggagaagatcttgtgtaaaagtatgtataatacaggctgctgtctgaaatctgctttaatttcaaaaccccctttcccaaatcatgtggattactttattgataatgaaaaacattttttaaataactttttataagtccacattctatgaaataaaacaagcagcaaaatatactgaaatagaggaggaaataaaagggctaacataaaataacttaaaagtatctctaaagctttagcaacctatgggtggctctttggaaaatattgcacatctctcaaaaatgttactgcctcttccacatccggttctactttcattttgtatgtaggttacaatggttaattttaacctggtcgtgaggtgcccaaatatttggttaaacatttttttttggtgtttctatgtgtgtgtgtctttggatgaaattaacatttaaagcagattgctcttgctaatatatgtgggcctctcccaatcagttgagggcctgaatacaacaaaaatgttcatccccccttgagtaggagagaatactttctgtctgatgttgaaatgggacatcagcttttcccctaccttttgactggcactgaggtatcagctctttctgggtcttgagactactggctttggactggaactataccattcactcccttggttttctggcttttgaacttgtactggaactatgccctcagctctcctatgtctccagcttcttaagtcacatgcagatcttaagagttgccaatatccataatcatgtgagccaattcctacaataaatatctctatatttggttctgtttctctgtatttcttcttcatcagagtagaattt

SEQ ID NO: 43559 - DNA, 1412 bp, Homo sapiens
ttcacaaattttggaaaggcaataaattacagtttcctatgggggatgcttttctcaaatttttattttagtgttcttgaacttcgttctcttaaggataatatattgaaccattaagatgatttttacttctaaccatttcagcataggaaaattcaacacaataagttatcttccattcatgtataccagtttttggagccacaaaacccttagatatgtctcctcttttaatgaaagtatgatgaatggaagaagattatgattatgcaaatgtagcatatattagagctgtattgcgtaaccctcaattttccctagttcaatgaacttaaacctagtgttagggatcaatgggaagacaaaccgtggtttaaggaaagccaacacattccattgataactaatgagtcattggtctgggagcaggtcttgccctcagactgaggactggaaaatagaggaatgaacatactatttctatttgtatttattttatctcaaataggagcttgaatgatcatgtaggggtactttatcaaggatgcctcccccaggttacttagacttgagggtaagttagctttttctatttctgaaaggttgggcttccgagtgagccacgttccaggctataaataaaagcagagtgattttaagaatcagaatacaaagcaggtgatgacagtggaaaactatgctgcctgggatagcaaagtcaataaaaagcagcacttagaggggaatattatattggaaaggcagagtccagaaagttgtttcagtggttgttaagaatcacttggagagcatgtcacaatacatgctaaaatccatgatctcaaactctgacaacatgaatcagaatctccagatgatcttgtggatctgatatttcaacaactaaaccaaataagtcttatgtgcaggtgtcttgaaaatcaatgttctttatcttttctcttgtacagtgactatggctatacattgaaaacacttagtggtgagcatttaaaatgatctatacacactcacctccagcccagttgaatgaaaatctctaatgtgtgcagcctggggattattgcctataagaaattccccaggtgattttaatatgcaatcacgtttgggaatcactggcaaaattgcagttatacatcagtgtttctcaaactttaaaatgcacagaaatcacccagataccttgtcaatttgaagattctgatttagctatggtgggacctgagcttctgcatttttaacaagcttgtaaatgatgtaaatgctgctggttcaaagatcattaagtagcagtggcctaaatcatgtgactattatagaatggaacagtgatcagttctgttacctgaccataatggctaaacaaaacaaccaaattataaattaaa

SEQ ID NO: 43560 - DNA, 588 bp, Homo sapiens
ctcccaggttcaagcaactctcctgccttggcctcccaagtagctggaactacaggcatgtgccaccacacctggctagtttttgttttgttttgttttcttgtttgtttgttttttagtagagacggggtttcaccatgttggccaggttggtctcaaactcctgacctcaagtgatccgctcaccatggcctaccaaagtgctaagattacaggcatgagccaccgtgcccataatcattaacttttcttcaaacagttgtgtcgtctgtcataaataccgaaggtcccatcatatttactcaaaatactaaaagactaaagagaaagacactgttttttcatgacctcattaatttctcagtctggatttaaggcatttttatatgccaaatcattatttaggagacctattaaaagccatcattttctcacaggaagtgttaaaataaataggacgttttgaaaactagtcattatattttgtatctagaagtagctggggataagtgagagtcatgtagattttcccatgtttgtcgagatccacttgtcttatgatactgcttctgatcaaaatcatatgaa

SEQ ID NO: 43561 - DNA, 3039 bp, Homo sapiens
tgtcatcaagtgctcaaaatatcctctaaggaactttcacttaatttgcttgatttttaaatatatatttttaattcacctgatatttgaaagagccacaaatcccacaaattactgtatttactctgtggagcctggggaatttaggattaactgagcagttggggtgtggggggtgggggtggaaagtgttaaactaaaaataaaaaggtttaaaatgttttccaaaattcttgagcataagaatgtaggatttagtactctaattaatgggattagatggtttagaggagcttgaaaatggataaactggaatttttcacagtaaagtagacaattctaacttcatttaccttaaagtagaaaaattacattaactcatctgtatctccagagtgctgacacaaagtggatcttgtttatactaaatagaatagagaaaaaaattttcaaagactgggcaaagataaagctgcaataaaagtcatcagtgcttgaaacactcaaatgttccctgaagacttgactttaaatttccaatttaaatggaaaaactcttaaacagcatcacatttacaatggtgcacgccagttatgtaataggaggatagacataaatgccaaaggttaagtaaataaattggtatttatacacagctctagaaatggtattttgaaatgaacccttggtttctgtttgatttggaccatctctctttctcttactaatccagttcaatcaaaacaaaataaggattcaataaagactgaatctggttaacgaagttcctatcaatttcagtaatttaaaccaatctgtttctttgaagttatatttaatttatattgagttattctattaaattttttaaaatcctcaaactttaaaaactcttttaaatatgccacagttcaccatagaatacggatagaacctaaaataaaatgtggcttttagtgagtgaccaataattgcagtagtttttattgttattaagagttttaatttaaggaagattacataacacggaaatttatcattgaacttacaaagagcggctgtaaaaagggaatgaatcatttttaaaatgtcttcatcacctaagtttgcttatctaaagggaatctttagctgaaattttaattacctgatatgtacacctgtctagatcaaaaactttgaaaagaaaacttttttttttctctaattgccacactgtttaaacaagaaaatgataatcatttcttctatgtcaaacagatgtagatctttccagatgctgatagggaatatcctgacatatatagaatgtctttagctagtgagtcatatcaatataacagagtcataagaatggaatttcttcaggtaattttccattcaaacttgtaaacttatatgtgacccaagagtgtgtgtgtgtgtgtgtgtccgtgtgtctgtgtgtgtgtgtttggggtctatctagaaataaagctttgtaataaataataaatcaaaaaaaattagaaatttgtccatactattcatttgttttaattattttcttctaaagtttcatatttgtagaattgttgcttacattttatatactagtctcatgaatggatacagtctaggagatgcaggatatttttctgaccccttcgtgggactagtggcaggggagctatttactcagcccaccccactcaaccccttgcaggagggagtgagcgagagaatgagtgtgtgaaccaaaatgagtgagtgtaggaaccggcaggctgctttagccccagcaggagcaaactgtgcaggccctgtggcagcgtccaggtgggggtgcctgtgaccacaatgccccagagagcatgctacaaggctctcttagctccaccgtcatgcagacagcagcatgttattagctcagtgggccctttgcctcatcgcgtggggcagctatcttctgccagcaagggcaaagggccagtgtgacagcctttttgggtatctgcacttggtgtttcccgaattcttgttcagtgtccaagaggaatcaggtcatgacaaactgaaggatggtgaatgtggagaattttactaagcaatgaaagtggctctcagggaagaggggagctagaaaggggatggggagggcaggtcactctcccctgaagtcaggccacttctctgcctctctcttctgaagtcaagttgcctctttccagcatccatctacttttcctctccaccggctgagtcaggggtcttcataggcacaggatagggagcagagtaggccataggtaatcttggaaaaggcaacattcgattggtaaaaagacattattcacaaagaaccaattgggagagagcaggcacacagagatggaagttctcactttgggccacagattccaggctttttggctcaaaggtaaggttttgccagggactcacctcggtctgcctagaatttctctgcctcctgtcactatcacagggattccatgtttcttcattaagacaatgatgctaaaagaacaaataaaattgcttggttttggtatgttggggcttttcctcactaacatctttgtatagtcttgaatggcctttttccaacgccgccaccaacatctctgtgtagtcttgaactgcctttttccaacccccacccccgatagaatgtttgatttctcagtcaaatggaatctgcttcctttgcatcctattaaagaatgaacataattagccaattaggagaggatgagaccaaatcacctgggatgaggcagctttaaggtaattgcctaattcaagacaaatatgttttcatcattgtgataggcagtataatgccctccctcacactcccaagatggctatgtcttaatcactggaagctgtgaatatgataggttatgtggcaaaagggaattcaggttgctaactgactgcccttaaaatagagagattatcctggattatccatgggtttccacatggataatccaagggtccttttaagtggaaaatggagctagaagagagtc

SEQ ID NO: 43562 - DNA, 2166 bp, Homo sapiens
tatccttttatttatcagaaatcaccatgttaaaatgcaaatacttaggatcggtagcctcaacccttatcttctaaaacatctttagctatccatacaaagcaaagcattaataggaattggactgacgttggaggtggaaatactgatgcacgtgacagctttaaggacttgggcggctaattccccactccccactgctcctcagatcctccaaaaaaagctcaagtcctaactttgaccaggtttgacaaagaagggagaggaccaggcgttttgtaaagtgctgcttccaaacgccacccgtcaggacagattctaaaccaccttaacttgctgccggtttcaagtgaaaataaatggtacataagtaatcaagaagtcgcagtcccagacctctgaccaaagaaccgaaaaaggacagcgaacgaccggttcccaattctctgaacccaaaggtcggagaagcaatttagaagaggagggggtgggtcttccacaacaaaccccgcccctccctcactcgtcgctgattggtggcggcgttaggccgcgacggaggggcgggcccgcggctgagtctctccctttccgcgccgccccgtgcgcgctgtgggtgtgtttcgggaagcgggcgcgcgcgcgctcgcgtcggaggaccggaaaggaggcggggctgcggcggcgcgcgctcccggaacgcgcgcaccgcagacggcgcggatcgcagggagccggtccgccgccggaacgggagcctgggtgtgcgtgtggagtccggactcgtgggagacgatcgcgatgaacacggtgctgtcgcgggcgaactcactgttcgccttctcgctgagcgtgatggcggcgctcaccttcggctgcttcatcaccaccgccttcaaagacaggagcgtcccggtgcggctgcacgtctcgcggatcatgctgtgagtgaggccgggccggcggtgcaggacgccgggaccgggctggggcggaagccgaagccgggccgccgcgccggggctgccgtgccggggccgcgggcagggcgtccggatcgccctcctgagcggcagttcgcccccgagggcggtcgtcaggggtggacgtcgcaggcttttccggcgtcccctcggaacttgcacccctccaccgtaaattcccgggcttgctcttaaattttaattttgagcgttcctcaggtcggtgcctccgcttgcttcctgttcctcacttccctccacccacgcctggccaatgagggagcaacacaacagcagagccggcgccgccgcccgcctgggctggcgcctcccgcgcgtccggtgccgctcgtggtccgcatgcgaggccctccaggcgctgccgccgcgctctgggtcgggcttccgtggggtttcctggcggctctggaggccacaggacggggttgtctttgtgtcattcatcacccgagtttgccctgtttgacattccctttacagttgttgcctttgcaccttcagaaggcagtaaacagttggagctgctttgaagttggccagagatgttgggcactgagagaattaagcatcttagccttctgatacagcgagatttttgttttgttgggtttctttatttctttttcttttgccaaccacttgaagaagtctgcgaaaacgccaaaaaatgcagttcgaaatgacagtgccatttcgctattgcctattttgtccttgattttattctctggcacttttgtctttaatcgtcgtatttttccatctcttgttctcatacccttctactctatttccgtcttacacaagttctttaaccttagtttatttctttgtcagaatcgccaagaagccagttatcaaatagcgagccttctccccccaccttttttttttttttttaaattactgtactgatgtttgttagatattgttcgaatagacctggggtggacatcagcactgccattgtcagccctgtgagggttagaagagcttggtgcatattaaacactgaacagatgttagctgttgttgtcttgagcaagttttcttaccattctgggccttaatttctttttgtttaagatggaagtaatacctaatttttaggttgtgagaattatttgaaatgtgaaaaatattgtcagtgggtctgagccgt

SEQ ID NO: 43563 - DNA, 761 bp, Homo sapiens
tgaaattatttgctgtcttctccatttgactataagctccaagagggcagggtctttatctgttttaacttaccgttgcttctccgtggcctaatacagtgcctggcatatggtaggagttcaagaaaagctccattcatcctgctcctcattggaacaaaatgttgccatgctatgcaataaatgagaaaaaatttcaggaagttcaatgttaatttttttcagttgttagcttcctttcgaatcaactataaaggtatgtagttaagaaatctactattttattaaaggtgtttcttatggattccatttgcaaagtcagtattgacttttgacttagattactgctgtttattgattactgtgtaactaattaacccaaaacttggtagtttgaaacaggagttgacgaactttttctgggagttgacaaactttttctgtaaagagtcatatagtaaatattttagagatctctgttgcaactacttcactctgtcatcgtagtacaaaagcagccaacaacggtacacaaaaaaataggtgtggctgtgctccaatacagctgtaccaatggacactgcaatttccgtttcagatgattttattatgtcacagatattattgctattttgattctttttgcaacctttcaataatgtaggactcattctcagctcacaggctatacagaaacaggccatagcctagatttgacccataggccatagtttgccaacaataatatttttattatcttt

SEQ ID NO: 43564 - DNA, 2499 bp, Homo sapiens
atacatttgggggtgtggggggaagggtctttgatggacaatttcttttctggtaacaacagaattccttgaagagtgggtgctctggttggtaaacactacagcacctacaggcttgaaagtgtatttacgcaagttccctctttcaatacaggcaacttaaacacagaactgtcccccgcccaggctgatgcaatttcttttcgtctcattatggctgggaatatctttctcacagcctgcttcttcattttctctgaatcgtatgcactgccaccaaattctggagccaattctgccctagaaagttaatacgttagcaacctcagatggaggaggaggggtctgaaaatgactcttctggtcattaagcaaatgaaagaaacaagcatagtacaatgcgaaaatgccaagataatggtacgtaaaggctattaacaaggtgtagaaggcaggaacctaactcattctggacacgagggcagttaagtcagggaacgcttcctggaagaggtgataccttagcttagtggttctcaaccctgtctgcaaatcgaaatcacctagggagctttttaaagaaaaacagtggccctgattccagcagttagatcacagtcacaggaggtgggccccggcaggatgatttttgagaagctccccagatagtgtgaatgtacagcaaaggttggaaccttgaattctaagtggcaggtaaagtatgacaacacgtggcaaaaaaagtaaatgggaaaagagtaggctatggctgggacactattagtcgtctacaaaattgcaaagaagtgaaggattagaaacgagaggtggagacgtacacagcccgtgaaaagactgtcaggcagaaaagcgtagctgctacttgattaaagcacaaaggccataactatggtcagcagcagggtggaaaatacattgcgctgggggctgcatgaagggaggacctaaaatgcaacagcggtaggtggggaggatgcagtaaaggccacttgcaagagactgagcggcgctggagactcgggaagacctagagggcgggaccgcgaggcccggcccagcccggcgctcttccgtccgccctgccgggtgactgcagcggggcgggctagtcatccccacccgcaagctctcgcggcgcagccgcccgcccaggccgccaacccgcacctgcttcggttgcattcttaaagggccaagtgttgacgaccaggggcagagggctggagcagcgcactagggcctggcagagcagaaacggcacgagaagcacaggcaagttcgacttccgcgccatccctgaccaccgaagagaccagcgcgagaaaagtcccggcagccagcgatcgccgaacaattaatccccagtgccccgcccgcctggcgcccacgcccgctctctcgggggttcgctcaggcgtccctcaactctcgcgagacgaggcgtccctgggcccgcgggagagttgtgtcacggggcactgagctgttccctgcgctaaggtgcttcttcctaagtgctgttcagatttttaaaatagccagacaagttgctgcttttcctgtggttaaaatagatttagcttgatattgggaatttaatacaaaattattcaactctgggttgcagggccccaggaactttagccgattgctgtgtactatggatttggttcttttactgtctttttaatttaaagttgaagttgaaaagtttgtcaaactcagtatattcttggggatcccaggcctcggaggtctgcaatagttatgagtgtaggtgaagcgtgtttgcttaggaccggattgattttagattttttttccattcatagcgtccgtcattttcgcaccacagctttttgtagcacttcctctcattataaatccctgagctggaagaaaaacagaaacggcctatgtaccctctacctagcacactgaagtgcagcttcctgcacctccagggcaagacggctacctccattcctttttaaatgtatttttaccttcctgcctggcactattaagtgctaaataaatgaataagaggaggaatggggattttacgtgcttggtggaggctgctcagttttgttgctgggcagacgtgcgaacatgaactaataatccctttgggtgtctggaatgcctgcccaggttgccaaggcaagacacataatcacataatttttaaaagcatctataaatctatacaaactttaaaaatatgaactaggctgggcacgatggctcacgcctgtaatcccaacactttgggatgctgaggtgggtggatcacgaggtcaggagttcgagaccagcctggccaacatagtgaaacccgtctctactaaaaatacaaaaattagccgggcgtggtggtgcatgcctgtagtcccaactacttgggaggctgaggcagaattgcttgaagccgggaggtggagattgtggtgagccgagatcgcaccacttcac

SEQ ID NO: 43565 - DNA, 612 bp, Homo sapiens
tattttaatattctaataatttgttaacctaacttatttaccacctaaaaaatttggttggtttcccattgtctaccagacacagcctgagctctttggtggaccatttatgacactttatagtctgatcctgagctctttgttgtaccatttatgacactttatagttggatctaaacatccctttccattcttaccttctgtaagtaccaaaaaggatgtgggtgagtaaacatcacacacttttggatatagcttcacaacactattcatcatttctaagtagatcatttccaaatgacatgatctgtttgcataaaagtgatctttgcccatattgcctgctaaatgttttccacttgcctccactgggcatggattatgacttaggttaattcttaactcttcttgtaaacctttccttgttctgggtactccagtcataattaattagtttgtcttttgtgttcttatataatttaaaaaatatttatatttcagtgctataaccagtactatggtaatttgtaacaatttatctgccacaaaattgtaaattcttcatgatcttgaaaggttcaagctccatgtcttgtatttatcacagttcct

SEQ ID NO: 43566 - DNA, 853 bp, Homo sapiens
cctcaaaatgctatagcggctcacttatcttctttccccttgacatggcattgtctgagattcatgaaatccattaaacctctcctagaatttcaattcaggtttagaaaaaagaacaatctgattgtcccaatttttttgttgttgtgttagagaattagacatctgtcaactcatctgataacaggttacccttggtaacatgatggctcacgcctggtacaaaagttaatcatctaacaatgatcccttcagtaggtgacctagttagaaagttcccttagaagagcttctgggtatgtagacaacagcattgaaattgaacaaaaagcagactcatgggaatctctaaaggaaggctgtcactctgatacttatcacaaatttgtcacagtcatttgacaatagacagtttaaaataatttttcaaatatcctgagtataactctaattgcgtagaaaagaagcaaatctgaaagaaatagcagtgacctgttctctgagcttgattgtttgcctaggctattacctgaaatggaaaactagagaggacgtgatcaatagcaaagcactacccctggcaagtcttcatggtcttgttatcactggaccgtgcctggattacttaggaatataagactttgaaaggagagaatttctttcttttgcaaacacagagctgaaatcctcacagacataacagcgagaataattccacaaataaaatcaaaatttcttacctattgctacttttaaaaattacagttttacctcacatatcaaaaaataacaacaaaaatcaagacagtgaattcattatgtctatgttctttcataaaataatatatagttt

SEQ ID NO: 43567 - DNA, 833 bp, Homo sapiens
acaggtggggatcaagctgcatgggaataaggaaataacaccaggcaataacttaaatctttagggaacaaaatgaacagatttcgaaattgtaaataagattattataagctaaatgtttatgtccccctcccccccaaattaatatgttaaagcctccagagtaatgatatttgaaggtgaggtcttcaggagttaatcaggtcataatttggagccctctttaatgggattagtgcctttttaaaaaggtctgactgaggcaggagaatcacttgaacctgggggttgggaggttgcagtgagccaagattgcgccactgcactttggcctggcgacagagcgagactctgtctcaaaaaaaaaaaaaaaaaaaaaaaaaaaaaagaggcccgagggagcttgtttgctccttcttccatgtgcagacacaataagatggaaccatctataaatgggaaagcaagccctcatcaaacgcccaatctgctggtactaggatcttggactttccagtctccagagctgtgagaaataaatgttgtttaagccactcaatctatggcatttgcgttatagcagcccaaactgagtgacacaaaaattaatattaaagtgtataaacacttgctcttctttcttctcttaccttctttttaaaaagtcttttaaaatacttatttaaaagacaaacttttgtgaagttatagaaatgataatgtattgtttagtttgtaatatgtaggcttaatatgcataacaataatacttcaataaagggaggaaagggatagaactatataggagaaaatatttatctataactggaatt

SEQ ID NO: 43568 - DNA, 1278 bp, Homo sapiens
taaaattgaacaagggctggaataagtatatcttcaaaaatttacaaaagacaaatgagtgtatgaagggaagctcaacatcaccaaccatcagggaaatgccggtcaaaaccacaatgagaatccactttgcaactattacgatggctattaatttttttgtaaaaaggaaattacaagtgttgtaacaaatatgtggcaaaattagcacccttgtgaattactgctaagaataccaaatagtgcagctactatggaaaaccatgtggcaattcctcaaaaaattaaacataaaatcaccatataacccagtaattccacttgtaggagatactccaaagatttgaaaacaggaaaccggaacagatatttgtacaccagtgctcacggtggcattagtcacattagcccagagttggaacaacacaaatgtgcattgacaagtcaataaaaaaaaaaaactatgttatatatttacaatataaatattactcagccttaaaaaagaattggaacctctgatcatactacaatatagatgaaccacgaaaatacagttcacccttgaacaccggtttgaactgcacagatctacttatatgtggctttttttccacctctgccacccccaagacagcaagaccaattcctcctttttttctcctcctcagcctgcttgacatgcagacagcaaggataaagagctctataatgatccatttacacttaatgaacagtaaatatattttctctttcttttaattttattttctctagctttactgtaagaatgcagtatataaaacatataaaacacaaaatctgtgttatttgacagtttatgttattggcaaggtttccaatccaaagtaggatattcatagttaagtttttgggacgtctaaagtgacacatgaattttagactgggcagggagtcaatgtccctaacatccgtgttgttcaagggtcaattgtatttatgctaatcaaaagtcaaacacaaaagagtaaatattgcataattccatttcatagaaacagaaagtatattagtggctgtcaaaggacccaggggtggagagaatgggggattatttcttaacgggtacaagatttcagtttcagacgataagaaagttctgaagatggatagtggtaaaagctgcaaaacattatgacaggccttaatgtacttaatgccattgaactacacacttaaaatatatgcatacccccatttaattctttattgtgcttcacatacactgcgtttttc

SEQ ID NO: 43569 - DNA, 664 bp, Homo sapiens
gaccgccacatggctcccacgctgtttccagagatagaaatcagatacccatagcatcaggcagagagtggaacaaacaacttgaaggagagtgccgcagctgcaaatattgcaccaacaggcaagaacgcgcctggagtctctgcaggcgcccgttggccacctctgctgaagtctctcttgtactcagggctctgactaataataaaaggtcagtgattggaggctgtctttatctcagctacttaaaaaaaaaaaaatttatgtcaagtgagcactttacatgttgttcacccacttagccagtgcttcctttgaagctgaaatagattgcttacataaaatgctcagagctgcctccacaaagtcttctcatgctgcttgcctcccttaaagctgcggcttcctaatcctttgatcccgataccgctgaactctttgagagtgaaacagaaaggacagagttgagattttagtgtgacaagtggaagaaaatcaattttgacttcccaaagatagaacgagtggtgcaaaagatcactggtcccaaatggatgttctctgtcattgtcttgggtgactaaaaatgcccaagaggtacaacgcaaggcagacaataggaggcaatttcttttttctttactcagaaaataaactaagtctg

SEQ ID NO: 43570 - DNA, 464 bp, Homo sapiens
ttttaattgaaaaatgaggcaatcatttctcaagatttttatttctgatgggcacatgaggtcctttaattagtgtatccgttcttattcttgctgaacagtctcctgaataagaataaaagtgacaaaattagacaacgtatggaaaaggaaatcctggctttgctaattttaccagggagagtagctaggccctatatttctggctggaattctcaaatgggagaaaattcttttcctggcatgtattgggtaacagttgtttgtgtaccttgtagcctagccgactctgtcaaaggtaatcctcccagtgcaataatcctctgctttcaaaggcgaaaactgtgtaaattgaattttacagaaatctttcttaaatttcaaaattattgttatttaaaacgtatatttaacttatttttgcattgcaaaattggacataaaaacaaaccacagtctggccc

SEQ ID NO: 43571 - DNA, 779 bp, Homo sapiens
cagttaggagtttgtgaaccagcaactcgaagaggactggcattttgtgcggaaatggggctccctcacagaggttactctatcagtgcagggtcagatgctgatactgaaaatgaagcagtgatgtccccagagcatgccatgagactttggggcaggggggtcaaatcaggccgcagctcctgcctgtcaagtcggtccaactcagccctcaccctgacagatacggagcacgaaaacaagtccgacagtgagaatggtaagtttcctttttggctttataatgttggcattcagtgcttctgtctgttttggttgactccgcggggggggatgtttttctttctctccttcctctcatccttctttctctctctttcttgtccatttctttttgttttaatgtagtagaactcaagaaatgtccttgaataatgcattttttcctggaaaaaaaaatcaatatttgacatcagattgttaaattaggcaagcagtctacaatgttttggctatagttttgaaaaacaggttaatcatctacagaaaaaaaaaatagctttgacttctcttggaccatgtcacctgttgtcttctgtggggtggcaaagcacgtgttgataaagtttaccccagagccgtcttgcaatcaaagatgtctttgtagattcctcttgaagatatctcaaagaagttgcaaaatcttagaatggatgagtgagcacgcagaatagtttattaacagggctctagtgattgaagaacaaatatgatcatgc

SEQ ID NO: 43572 - DNA, 744 bp, Homo sapiens
agcacgggaaagtagcgctgccggagaacagctctgaggcgggatcaaaagccgccggcgaagccccgccgaggaacacggccgctgcccggggcggctcgcgagcgtgcgtgtgtggaggggaggatgccgccccgcggggtcttcggagggtgccgggagcgggttctcagtgcagttcccccgtcttcgctgggggcacggctgctcacaggccccggcccgcgtgtgtggagcggggcgagggggtgaggcgagggggtgaggcggcggccgagccggggcgctgggcgcggggctggcgggaggcggcggtggcggcccggcgcgaaggggttaagcggcgcaccgccccctcggcggccgggtgtaaacagaggagcctcagcctatcatgtctggccgccgcgcgcagcccgagcccggagccaggcgctgtaacacgatacgctccagacccaggcaacttggcagcgctgggctcggttcctcacggccacagcgagggcgcgccgcggcaaggtgggtgagcggcggcggcggcggcggcctggggcgggctggcggagcgcggctcccggtgaggctccccgcgcggcagggtcgctcgctcgctccggggaccgcggcggtggcggtggcggtggtggcggcggcggcggcggcggctccgctcttctcccttgtggtgtcggaatgggaggaggctcggcgcgggtttgaatcggtgcggaggcaacattc

SEQ ID NO: 43573 - DNA, 624 bp, Homo sapiens
aggtgacccaaggcagagaacgggaggtagcgagaggaagacgacacccttccctgagtcctccctcatctggggcttccctctggccttcccctggggttcctgggactcggcttctgcggacatggaaaagccgtcccaacatccggcggccccgtgggcaggggtcctgggacgccccctcctgcatccccgggcgggccctgcaggggatggcggcgatttcaggaagggctccggcgccccctagtgacgcgcggctgtggtagggaaagtcctgcacgccaaaagggcagttcccgggccagaaaccgaggtgaaaccgaagagaaggcgccgccgctcgccgctcgccactctccaccccaaccgcggcggggccggctctctgaccctctcttccccacctctgctctgccctccgagtttcacacttaaagcggagacttctgcttcagcaccgccgcaccgaggcctgggccctgccaaagtggctcgggtaagatttccctgcacgtcgagcagacactgtcatgccgcgttgctctcactcacagatcgaaataaggcccttcctcccgggaatcgtccgcgggctgagttccgcagcgcctgaaaacagtg

SEQ ID NO: 43574 - DNA, 1312 bp, Homo sapiens
ccacatacgcaaaagtggacactgacaagcaggaaactcaagtgttcggtggagggtgtaagatcagccccaccctggtctctcttgctggttcccgtacccttccccagaccccctcagccctgtcttatgatcacaggcttgcccgacccgcacctgcggggctgaggagagaagccccaacccagaggagcacctgaggccgcaacccagccctgcccccttcgtaactcccagctgccgcctgttgtggtcctgaaatccagcttcacctttgtggctgacactcgtctatcagctccaggatctccatagccctgaaactctgaaccttgctgtcccccaggccgccctgtacctccttttgggcctgtcctgaggagacaggactcagccaggcctcagcccccagactgtcctcagagaggaaactagggaaactaacttgatgacttcctccaatttgtttaaagcaggtgggtcagagtaaagtttggggattcatttacttgtgtcgactggccatcgacactgatcaaataacaggcacctgccaaatccacttcaggccacaaagagcactcgatgactgcctggcctgtgacgagctcatgcctgccctggctggccagaccaccacaggccaagcatcctcccctctgtactctccacctctgccagcgagtgtggacaaagagctttgcaacaagggcagcacgagggctcaaggtccaatttgctgcttggaagccggatgaccttcgacagggtggctgagcgctcttgtaatttgcaggagtgacagtggatctgagaaagtgcatttccagctaactaaataaaagcaatttaaaaaataccaagtacatccgatgtctttgcttttttcctaaggtttccagtttcattcctcaatcctccagaacaggtgactttctctaaaacaagctttcactatcaaaacacggcctcctctccccaggcaaacacaaggccgtgctcccagccccttcctccctccatctctgagggctcccgcttctctctgctcgtttttcttctcctgtaagcatgcatacttagtccttagtctagagaggtcatcttgtcagccttttaggattctttttttcctcctttcaagatgaaatcatcctatctacaattgttactataatttatttttaaaataattgtcttctgactttgtaaggcatacataatccccagttttctctaaaataatgtttttcaaactgcaggtcatgaaatcagttcaatgagttacaccagctttttcttctgttttaat

SEQ ID NO: 43575 - DNA, 2279 bp, Homo sapiens
ctccgagtaatgaattacatgagaagaaactatgaaaaacgtcaagtgctactcctaaagcaaggtttttggaacgtagtttaccaggggcaagcagagactgtctacggcagggagagcccacgaagggggtcctaggacttcaggggagtggtcgctttcaaaaggaatgaaacaagggcaaggaaggaagacaacacaaaaacggggtgggtaccacggagaaatcttgagaaaggcgaggaatgtggtctaaaggaaggcaagcatctcccaaaacttctgcttcaggctccacactttatttaggcatctgctacagtgcagggcggcagtgcctaagacaaggatgcagtggagagtgggtgctgggaaccacggtcacccactgattacgctgccccacatctgagaggcctggcaacccccctaacaggaaaagacaggtgctgaatcagcctggtttcccacctggctttagggccagcatccatcatcgctgtggggtgctggagaagtacctactaaataggagggagggggagccatggggggcgagggaagagcaggagagggaagggtcctgttaatcccctgggcgccttctcctggtgtggctgaacgcccactagagccctgtgaggactgaggcccagctgtagaaacagagagaactggagctcgaatacaacgattcaggaagacacatccggtcaccgtcccaggcacaccccacgccgctcgcaaccccgtcagctctgatccagggcctacacccggcattcccaacccacacacgggcgcaggaagggatgtggtgttcagacgcccagcaccacctcccggggcactccaaggggcccggcctcgcacaggccgcggcgcccgccgagaaatcgaccctggagtgactgcggggaccccgagcgcccccaccccgcccgcattctccgatctaaaggctgagcgcggccgaggcgcccccagcgtccgcggccccaggcccccgcccggcagccagcgccccgcgccacgcgctcgggacggtgccacgcggcggtggctaggggcgcgcgggccgcgtacccgcacggctggcccccgcccaccatccggtgccggctccgcgcgcaggccggtgctcgtccccgccgccgccgtgctcagggaaggaagtcgggggaggaggcggggccgccgcggggccggaagggggcagcggcccgggcgccgcgcgttcgcaggacggcggctggccccgggggcccgaagccctgaggggagggagggagggacggcgggggcgggtcgcacgccgcaaaggcgctgctccgcgtcgccgtacgcctcccggtccccgtgacgcagcccgcggtccggccggcggtgttcagagcccgagcacaaactacttcccgggtgccagaccgccccgaggtcgccccgctgcccgggtcacgcgtggcgctgggtggccgcgagttgggcgctcccgggcctgactgcacgaccgtcgggggctgcttggtttggtggtggtggcggtggtgaggttttccccaccatccgtgttccatcaactgcttagagacacggctatggagattgtgattaaaagacgaccccaagaatctagtgccgtgaaactggcggggcgggaggtggggagacctggtttgggtctctggagtgagcccgctgtgtcgcagcgtccccgtggggacccttggccggtggctgggtcacagtttcacacactggatggggcagggaactgggtccggcgggggcgctgtgcctcgaggctcagtgcctcgaagctagatttgcatttggctgcgcctgacaggctttcagtttctgctcaaattgtgcggaagggcctgaggtgtttgctaaagcctgccgcgccctgctcgacccgtatcaccgcacaggcaccccacctgcatgttacctcctggtaatgctcgcccacttatatagtgcacattttgttgcagttgtttcaaagatgagaaaaacagggcaataggaaagaccatcagtgacatttctggagtcgtatgccccaagcaacttaatctggttttcatgaacttcgttaccctgtgcagacgtctagccccttacagtggttctagcacagagaatgacagaagaacccctttctgtttcattcatgggacttgaggggactgtcagcactccataaataacagctactgtaataatcgccagttctgatctgcacatcccagatttgaactgctattcca

SEQ ID NO: 43576 - DNA, 781 bp, Homo sapiens
aatgactgttgacactgttcacagtaagcaattcaaagctttgattcaagagctgacagagagcaacaaggcagtaccgaggccagagttctccaaaggccccatttctgatgaacctctgtctgctgcagtgtttgatagacaacttgaagtgatacaaggtagggagctctcagccatgaagcatgatcctagtaatgctatcttcaaattagccctggattgagttaaatatcaaccaaagggagtggaacggccctcatgaaatcatccctaagagaatgagagagatctaatagtgtggtggttacagtaaccactaacctgcaagaaaaatcgatatctacactgtgttagaatcacaccaagggctcctggagccgagccatttcagtgaagaataaaccaggattcattagagtagaaagtcagaatgtggtaggaggtcaaacataaatacaccccgggctgtttcgtctgcaaacccaagaagatggtcttctttcaggatccgagcattttttaaaagcatggaatttacagagctgggaagtgaccttagcaatcattgagtccagccccttctttttacagatgaggaaatagtggcccagaaagatgacttggctcgctcccattcacacggctgctctggtgagatttcctcatgccacactgctcatgtccagctttgcagtccatgaatcaaaacacaactgtttattgagcctctctgtggaaggcactctgccaagctttcgaggggcgtaaagaaagccgc

SEQ ID NO: 43577 - DNA, 928 bp, Homo sapiens
aaaaaatcttctctctgcccatactgaagaatgataccaaaatagtttgaaagtttaaagcaaataattagaaagtaaaacaaaatgttcttaggctatgttgatggagatctggctaaacccttgagaagacaggaaacgtaactgagaaatacgctgttctcctttatctaagtgtgattaactacaatgcttgctctgcaaggtcgggatcacttttcatgaattctttctccgagtgcgtcttgcagggtcaggccctcccctcctgaactccatggttgacaatggatccactggtacagttctgcttctctcctggatgtggaaaaccccaaaattgcactcctcacccagatctcttttccacctacgctcagcactctgtttactgaacatttgcaatggtgaacctgagggtctggaagcccccaggaagaaaagtaaagtgagattccatttcattgccattactgctaagggttattcacgcaagaattccaacaatttacataaggatcattagcctcactggaaatgcatttcattgcaacagacctgagtcttacattcttgacattttccaaggagtggcactgggcattggccatcagaaatggccatggtgattatgcagttttagaaatatgcctaagatacatgagggatgcattcccccaaaccattatcctcagccctacagagtgatctggataagatgtgctgaagctccatggagtttaaagtagtatttattggccggggacagtggcttatgttgaggtgggaggactgcttgagccccggagctcaaggttgcagtgagctatgattgccccattgcccactgcactccagcccggggggacataatgagaacccgtctcaaaaaaaaaaaaaaaagcacttactaaaaaatctgaattcc

SEQ ID NO: 43578 - DNA, 1348 bp, Homo sapiens
catctttccatgtaccagggttgtgggattcagggttccacccattcctattcttcatagttcaacagctctttatacctgcacgtgaagggtcctggttctggacacttgcagagacattcaggcaggggagttactgattcccaatgaagccagggtagcaaagacattcacaccccaggaacccttaaatggaaacaaaagctcaactaggctgacaggtaggaggctgcatcacccctttgcagctttgtaagaagagtcttccagcttgcaccttggacttttcaaaacagtccaagaatgtcctctgccaaaaggaaaagaccctgttgtatctctaccatatctcttgtcaacactttttttttttattgagcaaccagagcaaaacgctgaagtgaactttgtagctgtttcactaaaaaatcaaacactggccaaattgtttaaaagctaacagtgatcagatggctatgccttttaactgcatgtttgcaaacacacatgtatattgtcttgtgtatactggcctacaaaatcattttagttggacaatctttctacggttcagtatgaatcaatattagtgctgtggtacatttgtgtgccttcattgagttgaacagaaatccaccaagaggtttggttaatatgtggctctagtgtgtatgtctcagtcaagaacatctgaatgtgtgacttctctaggcatcgagcccaaattaattgtggtgctcactctctcatatttattttaagtgtttataaattattattctgctattcataatatagactttaatgggtctgtatataagaatgaaaaagcatacagctatgcaaatcataatcacaatgggagaaaaatggtcttttcatgcctgttaaaatttaagagccaaaacaggagaattttctggcctttatggctggtcagagtccatctgtttcatctgctatttggctgtctgaacggttggattttatttcctctacatcatactgaacttttaagaacaaacaaaagacttttatctgaggatagtacacagatgtgttgtgttacatacttaaataggcatttatatgcacctcgtttttatatctgaaataattcggtgaatgtttcttttttatcttttttagcatttaatccatgactctcaccagttcaactaacatactacaaaatgtcttacgcaaaacagccactcaagaatgttggatgtttaaaagacattgttagtccaaataaactaggaaagcaagcaaaattatttagaatcagtactagtaaaagatttttatgtgtgttaaaatttttttcattactcttatttgtacc

SEQ ID NO: 43579 - DNA, 843 bp, Homo sapiens
ctcactagcatagtgaagacggttcatacactaacaactaattcttacacacataactgaaaatgtagaccacattgtacaaagaaataaaattatatcaaattgtggaaggccaaaaataggattatagatggcttacttaattctatttgacttgcactgatgtttccctcccaaggttcactcctgcatactcagttctctacagacttttagatgatagacattcagccatatatttgcagtcctgacctttgcttcgagctttagtcctgacctttaactttctgctgggtatctctaatttctaaagtcaactgcatctcagatccccctttggacttcctcattttttccagccctttgacagtctaaaatcttggattcacctcagattcctccttctagcttatttgcctctctcttcttaatctaatcagttgcaaattcttgccaaaccatttcttttcatccttcattgccttatttctgatccagaccttatctgtctcatacctgtactatcacaacagcctcctaactggatgcctccagccagtcttgggctctttcgtgctagcttcatctttgaactttgcacacccgtttctttcctcaaacatgccccgccacgcctgtccattttaaactcatgtctatgctcatctctccccatcctttttctttaatgattatttacctcatgatacttctctgatggatctccctgacagcactaatcctctataagaatttccttcctttactatctgtgttcttcctttgacaggaaggaagtgtacaggaggctgtgttctttacattttatgattggccccatct

SEQ ID NO: 43580 - DNA, 3184 bp, Homo sapiens
gggcttctcttcaccaagcgcaaagcctaccttccagaaggctggctgcacaagcggccgccctaaatgcggtcaaagcgggcaaattcgccgtgggtgccttccttccctacctccggcccactctggttgctccttcccaggtgctccaagctctccagagtttctggtggtttaaagtttccgcttcacgcccagactgctctaagggcaaacacgacccctttcctcttctaggaccccttccgtgaagtctgttccaaccctgagcctctccaccttcgagattggccgcagatgccccgacgggatggcctggggagccgaaagctgtccccagccccggacagctactgcccacgccgcgcaggccagcctcacacagtagcgaatctccttcacgcgacttcctcgcaggcctgtgaacccgcaggggaggcggaggtcggttcaaaccctgcgagagcccctgcccagcgcggagtcctgcacacggtggaaagtccttacgcattagcgggcaggattaaacgacttcacaccacgaggtgcaagactgggcttcggggccttcctcggtgttgctattttaaaagaagctgctcagtaacccagaagaagatgacgggggacggtggtgtagacccggctggagaggagtccagggcctgggaggcgccccctctgactgaggggctggggaccctgaagcttggcgtccaggccccgccagcgctgcacccggcattgtcccgcctggggcaggcgtccggtccctcggcagtgcgggccagcacgtacgtagtagctgctgaataaataaatgcctatgcaacagggaacgtcccggcccaccccggccgggccagggcctaggaagggcgggcgtccggcgccgccgtgggtccctccggcgtggccgcccacacctcctggccacggcggggctgcggtggggggacatcctggggcgggcggctggacggaagggactagagtcggggcgcgtccacggccaaccgccccgaaccaagcaggggaggccagggaccaggagcttccggggccccgcggctggagcgcccggacgcgaaggggcggcgggtgacggggcgcggtgcgggcggctacagggccggacgggagttcctccgctttccgccgcgcggctcgcggtctcagccgaggtcatcgagggccaggagccctggcggaggccccgccgtcccggacccaccgacgcactcccagggcttggcgctttcccaccaccccggaccgcccttggggtgccggaggggctcggggcgcggcgtggggagcctttgtgccctctccgcttgttgaggttttttctccggaggagagctccccgcccgccacccctttcctctcgaaagttttgtggtttccctagaagacgaaagaggttgagaaggttgcggagacttttgcaatcttccccgtccagaaactctaaaacctctcggcgtttggcccaggggagctatctggggtcaaggggagggagctggccgcacattccttcgcccgccttcctcccacctggagccgcggccccgcggggcagtgcgtccgagctggtgcggcgacgccggcagcggcggggttaagctcaggaatgcggcgcgaggaatgcgcatgcagatgaggcgggcgggcgcatgctaatcgcatgcaaatgaggggcccgccgctgccgcggcagcgccgcagcttcccggatccgagcccagacggcggcggctccggcagcctgggcgccgcgaccctcggcggccagagggggacggggcggaggaggaggaagaggcggaggcagcggcggcgagggggaggagggttcgctcgccggctccgacgcagacatggtggactgatccgcagcggggccgcgaacagcgtttcctgaggcacctcccgcgcgtggttccgccgcgccccgcgccctgcgcccctcagcccctcgccggcgcccgcgtcgcgggttggcagcctagcccggcagccgcgttcccgccgcgtcccgcgcccggtacctatggaggcgccgctcgccggcgaggccgccgaccatgcctaggagggccgggagcggtcagctgccgctgccccggggctgggaggaggccagggactacgacggcaaggtcttctacattgaccacaacaccaggaggaccagctggatcgacccccgggacaggtgggcgccggccgcgggggcgcgggcccgttcggacacggcggctgttgtcccggagacccggccgcgcggggggctggggcggcgccggcccgcggtgccccgaggggtcccgggagggatgtggggctggctgctccggcggggccgaggagccgcccgtacccgggctcctccgcccaccggcttcccgacgcccctccggggacccggccccgaggcaaggctggagtcgctgccccgggccgacgccgcgcgccaggctaacggacccgaggggccacctgagccctgttaggaacttccctaggcttcgaggtgcccacgtggaggctgcaggacaccttcggcctctgggcggcgggggtgggctagggcctcactgccagttggggaacgagccctccgggccacctgtggcatccctcaggccgtccttggcgcgggagcctgggctgcgagctcttggcgggggcgcccagactggccggaggtcccgagctgggaaggggctcccgccccccgccgggccctgctagtgggtgtgactgactttgcccctcagagtttaaaaacgcgcgtttgggggtttcgctgtctgtcgttagtcttcacctgaaaacttgaaccgactcccagatcgggaacaggcatattgtgtttggaagggagatgtagtgaaattaacgttgggtattgaggcactctgatttgagcttagcctggtttctttgttttttgttttttaaattggttcaggaactgaaggttcacaaatgtttctgtgtcccatattttttttacccttaaaatttcttagaattattgtaagaataataggaggtattcctaattataaatttgtaaattatccattaaggagatattcctaattgtaaatttaaataacgtgccaccagggataacttcgacatttggacttttgtcatttctgaa

SEQ ID NO: 43581 - DNA, 662 bp, Homo sapiens
ttgtgtttttgatagtctatcagaatttgttgaatatttctgattatacagataattatgccgatttagtaggggaggctagggcattttataagaacataatttcattcaacaggtagtcatgccagaatgctgaagcattattctaaaatgcttttaagcttttggaggtgaatgacgtcattcaaactttgctgggatgtgatcaaagcttttattgctccacttcttacttttattgactaagtttacgtgagtttctgaatccctctaaacctccatttttcagctctaaaatgaggataatatcatcttcttcataggggtgtttgtgggctcaccattagggcccagcctaattgtattagtgtagtgttgacattccagtttaggaactgagtgaccctggaaatagtagaaatactagcatggacagtatttactcagtgtgtattgtgtgctaggcactctgctaagctctttaactgtgatctcatttcattctcccgttggtcctgtgaggtaggtactactgtcatcttccagttacagatgaggaaattgagtcacagagaagtagcccttgttaagtgtggagctaggatttaaagccagacagcttgactctacagcatgtgtccttaatcattcctttaaattgt

SEQ ID NO: 43582 - DNA, 626 bp, Homo sapiens
cagcctcctgagtagctgggattataggcacaagccaccatgcctgggcaatttttgtatttttagtagagacggggttgggccggtctcgaacttttgacctcaagtgatctgcctaccttggccttccaaagtgctaggattacagatgtgagccaccacaactggcctcacttctttcttttttttaaaaagttattttagtgggtgtgaggtaggatcttactgtggtgttgatttgtatttccctcttcgtagtgttttgatggccttagttgggcccaagcctccccttattctagccttttatagctgttgctattctgccccctttttgtttgtgtactctcactcttacttgatcaataaaaagttaggtaagagaagttagagggtttttttagtctcacattgctcttcccttttctccctatctgattgctttgagtgattatttaatactgacattgtagatatgcattaattaacagtttttattgtatcaaccagccaggtaccctggactctgggagataaagatggataagatttggtcccagctcagcttgcctacaatctagtgtgcataatcatcatttaaaaagtgaaagaaaattttgagtatt

SEQ ID NO: 43583 - DNA, 1766 bp, Homo sapiens
gatgcctgtcactttgaagcatgtcccaaagactgctctgtagagctatttttttttttttttttttgctttgtcagtaatttttcctatactttttgccctgatgtcagtaaacaaatcatggttccaaaatggagccagctcagaagtgaggtagtcatgcactaacagagttatgtattgggagctgttttttcactcctgtagctcatgaggaattacaatagttccaatagagcatttgaataaaggtgtacatttaatgtactttggtttcactaggagtggaggtaggaaatttaattttaaagaagcatagacattgtgttatgacaataatcacttttaactaagtaagtgtccctggtatttttgtgaaaatgagtatgtcaacatttggaaggcaaagaggctttcctttggtgtgaactttgctcctgctgcatgtgcagtgttgttttctggtgtggcctgggttgtgttggtcaccagttctgaatgtgaacaacagaggtaaacgttgaattatagagattggtgctacaaacccctgattaaaatcctgatttacagggctgggctcggtggctcacgcctgtaatcctagcactttgggaggctgaggcgggcggatcacgaggtcaggagattgagaccatcctggctaacatggtgaaaccccatctctactaaaaatataaaataattagccgggcgtcgtggcaggcgctggtagtcccagctcttcgggaggctgaggcaggagaatggcgtgaatccaggaggcggagcttgcagtgagcggagattgcactactgcactccagcctgggcgacagagccagactccatctcaaaaaataaaataaaattctgacttactaatggactgtagaatacgttgcatactttattgacagttgtgcattttataattgcataattggtatgaagtggcagtgatattcagttaagtttaaaatgtggtagacaactttgcacaagatttgaggagcatgtagtttcatttagtgtgaaacttgaatctactctgcagttttccttagcattatggtttttaatagagatacattagaattccagtctttttttttctttgaaactgtgacagtgaatgaatgtgtggaatctgctttgtacatagtatcactgggttatcagctttgttgacttactggtctaggtgtaattttgggctggttggtaattctgtccataccatatgttcttttcttatctgctgcttatcagtgtttgagtttgataaaaacagatcatttactttctgttttgtttttttttttttgataccgggtctcactctgttgcccaggctggagtgcagtggcgtgatcatggctcgttgcagcctcaatctccctgggctcaggtgatcctcccacctcagcctctggagtagctgggactacaggggtgcggcacaacacctggctaagtttttttgtactttttgtagagtcagggtttcgccatgttgcccaggctggtctccaactcctggcctcaagcatttctcccatcgtggcctcccaaagtgctgggattacaggcgtgagccaccacgcccagccagatcatttacttttttccttctttgtctcccttccccttttctgctaaatgacatagctaatgatatttctcataggacagcatgactagaaaccagtatttaacttggcagaatgtttaacataacatcagtgccctggtttgctattgta

SEQ ID NO: 43584 - DNA, 1549 bp, Homo sapiens
gatccacccaccttggcctcccaaagtgctgggattacaggagtgagccactgcgcctggccggttatggatattttttttacctctactcttatagtcgagcctcagtcttagaggaaaaatagtttctttcagtcgattgccacgttatagtttgctttaaactacttagatttggattcagggtaaagagccttcataaataggaagtgatagaaattcagagggagtgtggcatgtttttgttggatttacttatgctgtgaaacttacctagaagtgtacaggcagtcactaaactatggttaaagaggaatcttttcatttgtacattccttatccctgttacaggttgctgcactttttttttctgtctttatggtagctagaaatatattgtgtatctgattctatgttttcctacatttctacatttgacttggtttgagatcaagtttgtgaattttgattaaatgcctagattatgcatgtgaaaaatcttttgtcctgtgttgctatgagcaacaattgttaaaattaacttttttagaaaatgtggacaaatacatgaatcttaacagatttttaaaaagtcatcatttagcattgtgagtgttctgtctataaaataaattgttactgtgaccataattatcgtggtgaagggaggaatgcagtagaagtgaataatcatcagacacattgacaaaacattcctaaaatgctattcaaatgaggaaagacattatggggctgcagccaagtagccaagcgttgagtccttttagccagttgtctgaccgggtttactattgtgaccaaaaagaagctgtgtgtagtggtttgcatagaagggtcatgatttatctgaaatatctcaactttttttttttttgtaatcctgtctctcatcctcccctgacaacactttacttcattcttaaagactccttttgtcctgatggtgtttgtttcattgctttctaccgtactccagtctgaattttactgactcctagtgattgcttagacttgctatttgattctgttgtgtgatttttgattatactcctttgtgctatttaaactagcagtgtttacctaaattagtggtggtagtgaaggacacaggttggcccatttgaatgaaaatcaggagcattgcactggccctgccgttaagatgaatttccatgaattccctctccagaagggcactaggaatttggctggactacagaagttacttctccagttaaaggcatggagtctgggaatggcttagtttaaggatatatagtgataatgtaattaattctcccactgagaatataggacgaagtgaagagatgccctttgtcctcttcctgcatcctcgcctcttcttcaggtcactattgagaatgaaccctgaagcacttgtcctttacacagttagcaagaagaaaccatgacttgcttcttaaggttttggaagaacctgctgggcgcctcatttcaagacggggtataaagcccctcctcatatttacttctctgtgtaaccatg

SEQ ID NO: 43585 - DNA, 845 bp, Homo sapiens
gatagaatccccattgtgcaagtttgtatttcttgtaaattgatagtggatctagagatttgctcacattcagaatatatgtatatgaacatttcgaaagcacacagtgtctgagatgttagcagccgttgatatctactgtctagatccgtgaattaatatggggttgcaaaacaatgatctcattcagtcatttctttttcatttgtttgctcaaacatttctataaactggggtttctcttcatctgcttctttgttacccagtagtatagggtacccaggaggcttctgggttgctgggatttactagctatggggttctcctgggacctctttgaggttgagaaactgaacatacctagaaagggccatttgataggcataggtccagtgacagtgtcttggttcttaggttggacagggagtgagaggtcctggcctgcaagcctgttgctgccattgagtacttcagaagaatggactctgtacctgtccatttcagctgcccagtttttggatctattcctgtttgttgacagatttaaaaccttattttgctatatgaaactactaaatatcatctggtcctatcgcttgccattagtagtttaagagatttcaataggtgaagagatttccatcttacagagagttcaaggtcatcagaggccaagttcatagattttaatctcaaaatcaaagtctgagttagatttgcatcttaaacagagttcaaggtcatcacagaagccaagttcatcaattttaatctcaaaatcagagttttacattgtacgttgatgtcattatatagtattaggtttgttttttaaaaaaagattt

SEQ ID NO: 43586 - DNA, 765 bp, Homo sapiens
cattatttgctaaccttcaccctcttgcagccatcccccacattcccctatctgcagttgtggcgcctaggaggatagtagatatgccgtatagccaatgacagtatgctgcaagcacaatgcccacctgtgggttgggctcagaaccgctctactgcctaacctggactctggcccctctctcagaccgcagataacaatccttcagtgctggttttgctttcatgcttctttaagcactaaattcctttgacaccgccttgctctcgcagctgctctgtcccattgtattatagaataagcacatgctagcgtacctgcaaagcaggagcaataaaaacaatgagaggaaggagggacattgtgggcacaagttagataattgacattcaaacatgaaggaaaaaattagaaaagttagaacttggtagggctgtcatactgcttatttatttgcagcaagttctaatgacttcatcttctgaggagagagagagagagagagagagagagagagagagttagttgacgtggtgaggacaggcttcctgcagtcagctggctccacatttggctttgaggatcggcaggcaaagtgctaggggtcagcggagacatagtggccagttttggcagaagggagatgagagaagtagtttggaaaagaagctgaagactaaatgataggaggccttggatattgagagtaagaaacttgaacctgattctttatgttataaatatcttttgaagggttttgctaaa

SEQ ID NO: 43587 - DNA, 1780 bp, Homo sapiens
cttgaactcctcaagtgatccttttgcctcagcctcctgagtagctgggactacactagctaattaatttttttttttttttttaatagagagtctcgctatatttcctagactggtcttgaactctgagcttcaagtgatcctcctgcctcagtctcctattatgacatttagaaaaagtaatttcttcaaatcaatttggttttccactttgtaaaatgaagagagaatgtaactgatgagagcttacagtgacatccattatttcagatgcaaccataaggaagcttttctaatcaaaggccttcatttcttctttgtactgtttacagggttcttaacacaaactgccttagattataaacatttctgcatgtgccttatctttccaattagactcagtctttccaattagcctcattgagagcagggtcaagggttaaaaataaaagtgaaaacatttatgttgtgctttaactctttatagaatacttttcatatatattatttggtgtcttttaacaatatattgactgggatttccaaatgaaaactggaagaacaaggtataatatttatgttttaaaatttgatttaagattcactagagtttagttatactaaaagtgtatattggtaatatcttcatatttttatattatgtattttggagtactgaaaaatatactttacataatctctgagcaaatgtaactaaagttttatgagatttctttagaggtaaatttgaaatcagtaaataaacatggtagggaaacttttctgacttttaaaattaaaattggaaacttagtgggagattttaaaactttacgttaatcaaagttatatctgtaaatgattaacaaacactcaaatggttcccaaagcaaagacaggcatcctgtgacccactactctcccccacacttgattcactgtctctacagtcgaccacatttacatatttaaaagtttcttttggtatttgccgctgtgtttttaaataactttatctatctatcttgacttcttagctttggattttgagaactgacttcccgccctggttgaggattcagctttcttactgtgccttcctcatgcacatgtgcctccctcccctcatcctcttggtgttttctatcaccttgtaaagaaatcagtagtctgtgtgtacatttttatgactatgtaaatattattcatggatgacctatctggtgtactatgattgcatttccttttgttttctctgtagttaataatcatctcttttttccattggcttacttctctatattcctattaccaatttgtggccagaattataaatctcctttcagtacattccaacacactgtgtattctgttggtttggaacctcctgcaccttctgttcttaatttcaagtttgtcctggttaatcattgtaactgctgcacactgtcatcctatggcctccatttactgtcatcttgtaggtttcatttgtcattttcctgtgttgggtgctcatttgctggatatcatgtcttccagttttcttggtttattctctgttttggtggagtagcgttggaaagggagcatagatttgttgaggctttgcatctccacagatgccattattctgctctcatatgtgattaatattttagctagggacataattccaggttggaagtaatttggagtaaaaattcgatggtactgctttactgacttgtatattccagtgttgtgtttgagaggtctgatgcttttatgtttcttgttt

SEQ ID NO: 43588 - DNA, 681 bp, Homo sapiens
tttgctacttaaagagtatttggagagcaaggctgaaaaggttaacgaagaagcatagacatggtatacagttaggtgccacatgatgactttttggtcaagggcagactgcatatatgatggtggtcccgtaagattgtaatactgtatttttactgtgctttttctagtttagctatgtttagatacacaaatactaccattgtgttataattgcctacagtattcagaacagcaactgctgtgcaggttcgtagcctgggagcaataggctataccacatagcttgggtgtgcagtaggctgtaccgtctaggtttgtgtaagtacactctgtgatgtttgcacagtgatgaaatcacctaaccatgcatttctcagaactagaccaggtcgttaactgacacacggccgtaatatagggagttcctctgtccctggccattgattccattctttagcaggtttcttccctctgcagatctgaaggagccagtagagattgtgattaggttttccattttgtaacagattttatggtgtgtgctttttgtctttcagcctctctgccagcaccctgtccatgtcatctgggagcagcctgggttccctggcatcgagtcggggctctctgaacacctccagcagagggtcactcaactccctcagttccaccgaactc

SEQ ID NO: 43589 - DNA, 1166 bp, Homo sapiens
accatggtgtctcagtggtgaaatgtgtaaatatttcaaggtattgtcaacaactgccatgtaatatgaaaatatctgtagtttccactggtgtcaaaataccggtgctcctagaccacatggtttattgcccacattcctaattaaagaaaatgctaaatttcagtttgaagttagtagaaaatgtaattcctcctccccaccatttcctattcccaagaagtcctttcttcgcattcacggactccagcctcacaaacccctggtcctaactcagtcagctcctcctgccacagctcctcagtcactctggattccatgacctcaacaatcccaaatgcgatcattgacacatttgtgtcactgtccttctcgcctgtgggcaggaattgcgtctgtcctttcacttctgtgaatccagagcccatcagagcaagtctgcacacattagatactcaggaaatgttaaatgaatgaatgagtcatgtcacaccaaggattgtggactttggacagggatttgggggtagagattggagtggcatgatgagatttactatgaatttcagagcgtgacaaaatcaaatctctgaggtgtcccgtttctaccgcatctattgtggctcaggtgaggcaactgcaagacaaacaggaaaagataaataaatctttataataaggaaaagataaatagattttatttcacttgtgggattcatgcaactcctacctgaatctttaataacaatggaaaaaaccatgatcctgtggcaaagaaaagaaaaaacaccttcttggccaattttaagacctgctgtggaaaaacaaaagtgctttaagaaataaacatagaagtaaatctttaacaaccagagagttaatttaatgccatgcagatattacaaaatatgagatacagctttaatgtgtcattagttttgaaactcaaaaaaaacaaacaagaatggactttgaatgataagaatatgtgttagtgtttctcgaacttgaagaatttacagagaaatagtttttaggctttcataatatgctcatgaaccccagtttgagaaaacactgacttaagaaacttaaagtctttttatgaaaatattaaatataaattaccattgtaagttttctcattatattcttagaattgctaa

SEQ ID NO: 43590 - DNA, 999 bp, Homo sapiens
ctgcctcgggaggatgcactttaccatccgaaccaagtggggaagaggaagagaggcgatcagtcgctgcaacaaaccaagtgcttcaggtgggaggattacttgaggccaggagtttgagaccagcctggccaacatagcgagaccctgtctctctttttttcaaaaaggcaaaatttaaattaaaaaaaaagaaagaaagaaagaaaaagaggaagtgctggccggcacagcagaaaccttggggcaacagtgaccacgtgggcagaggctgcgagtgtcagcaaaagaggacaggccgagaactgctggtttgcagacccctaactggcccccgctggcccccgcagctgactcagcgcaccctaaactcggaggaagtgccagacggccaggtcctgggcagcccgggcgctcgctccgctccaggtctcccgagcaggggtgcaggcccgagcacccgcacgtggcgtgcgcccctagctcctcccggggcggcagctcaccagcccccgccttagtggctggcttccacccagccaaagccaggaaatgtctgtccttaagcctcgatttgttaattatttaagcactctgtgtgtgtgtgagagagagagcgtgtgtgtttaatttcctttatttaaaaagcacgccgagcccactgggaccgcggtgctgaagaggccgccgggcccgggagagactgcattctgagaaccagcccgcaagccccgaagtcggagatcgcaaggtcctagcggcaacagagcctcctagcgatggcagcgagcctcgccccgcctgcggtgaacccgcccccgctcaccccgccacaggtccggcgtctcccgggtccgccgcggccgcgggcagagctaggagggcttctcagcccgcggggcaaccctgctgcggctccatccagaacctcccgctgccaggcgccgggaccggggacgctggcccccggattcaaacctatcatggtgcatgataaca

SEQ ID NO: 43591 - DNA, 2606 bp, Homo sapiens
aaatagccagatttctgcaatccgtccaccccctctagattttcagcaattatctgtgaaaaggaggaaagaacagcaaactagaagcaaaatcacaaagcttcaaaatttctttgtgcctccgtttttatgtagtttcttttggtatggcaggaaaatgggcaatattgttttcatacaatagctgtattttgttccagcatgcacataaattacacagttaaccttatctgatcttacctaaagtgacctttttttgcttgcttattctgattcatgcatttttacatcaaagtctacatttattgaaagaaaaatttcataatttatatcatttaacgtatttatcttacagtgcatgtatacctggaatgggaaacgtaacaataagccagccagcagttagagtacgtaactgtgggaaatgtaaagtggaaaaaaatatatagaaggaaaaaacagctctaacagggagagaggtttggggccctatagataaataggtacatttccactccacctccggacatctgccggttggtggtaaagctgttgattttaggaaattctagagacagagcgttgtcggggtgttgttttcctactgaccagaacaggaaggcaatgcctggattaactagagacctaataaactgcgggaacaagccctaccgctgcggggccagggccagcttcgaaggctgcaagcctcacggcaacacggagccaggtcctcgtgtgaccttactgtctactgctgctatgtaaggggactggcactcccgccctcctgaaggcgcggagaccccgacggcctcggaacgcttcgctcgggcacactgaaagcagcgcgagacgcagctcccaacactctaacatggaggccggcttttgtttgttttggccccgctcacacacaggcgtctcagggcggagaccacaggccccgcggctgcgggcggctcaaggtcccccgggacgcccccctagcggactttggccgccgcgcccggctgcctcccttgcccgggccctgcccctctcgcctctgctcccggcgccgcagctgacccggcgggggaggaggacggcaggagcgcgcggcgtcacaaagcgaggacagaacgcccggggttccgccgagactcggtcgtcccaggccagctcgacttgcagtccgccctcgtggggcgggagacgcccgacgcccgcccacctcacccccggggtgccctccgtggcctcacggggacgcagcgtcgcagcggccccggcgccgcaaagcgtcttgggagcgccggctcgcgccggaagaacgcgagggcgcgcggcggcggcgaggttataaaagggaagaagccggcggtgggcggaagtgggcggttcggcggctctgggcgctgttgtttggtctttaggcctgcggaggggcgttatctggagggccgcgggtgcaggccgcagtgacagggccgctcgccccgctagtcctgcctgtctcccggtgcagctgtgttcgcggcctgcaggcccaacatggcgcaggaggtgtcggagtacctgagccagaacccgcgggtggcagcctgggtggaggcgctgcgctgcgacggcgagactgacaaacactggcgccaccgccgggattttttgcttcgcaacgccggggacctggcccccgctggcggcgctgcctccgctagcacggatgaagctgccgacgccgagagcgggacccgaaaccggcagctgcagcagctcatctccttttccatggcctgggcgaaccacgtcttcctcgggtgccggtgagtgaggcagcgtccctaaccagcacgcctcgttttgtgtgccacctgcagaccggggcccggcgccctccgcgggaccggcctcggcggggaggggaagttgtgaagcgcgggaatccgccggcccggctgccctctaagggggagaagggcgtccctgcgaggagccgacatgattcccggacgtctgtgtgcccggtggtgtgggcgcagctgctggtagggttgcttgtgttagggaacaacgctcttggggacgggtgcgagatttaagattagtgaggaggtgccctgcctcccagaccctggggcacttgtttatggggttccaggaaacagttcttggcggttggttcactttcttgattgcagccaggaaatgcagtccctgtggcctgttttttgcacaagtaggaccttagaaaaaacactttttaaaaatgacttttccttctttttcagataccctcaaaaagttatggataaaatacttagtatggctgaaggcatcaaagtgacagatgctccaacctatacaacaagagatgaactggttgccaaggtgaagaaaagagggatatcgagtagcaatggttagcagatcatagatgtgaacatacataggagtttagagcataagtttgatataattaggaattattgttactaatttttttaacaagccagaatttttatgttattaataagtaataaagttggaatgttaaacctaaagtatatatctgtgtctttaggctttgaatttgatagtttgctttgactgctttagatttt

SEQ ID NO: 43592 - DNA, 1772 bp, Homo sapiens
aatgaataagtctcatgagatctgatgggtttatcaggggtttctgcttttgcttcttcctcatcttctcttgccgccaccatgtaagaagtgccttttgcctcctgccatgattctgaggcctccccagccatgtggaactgtaagtccaattaagcctttttcttcccagtcttgggtatgttttttcagcagtgtgaaaacagactaatatatctgtttacatagaaaaaatctgcaaggcaaaatcctttgacagagtatccgtctttgtggatagaaaattgtagcattttaaagaatcaagtttaaaatacacaagtacactaagcgttaagtgtttgtggacagggatgacctgcttttgcacatcaccaaaccttatgttccagtgtggggggtggacaataaatgtttgaagtctctatgggacagaggagttccagaatgcatgtgccacagtgggctgagacatcaccctctgcataccgaatcacctcagtcccccaatctcctctcggatgccatgactgacagcagtaaataagctctcgccgttggaaaactggagtgaaagtttcattctaaaagaagaattttaatgcactgtgactcagctgcccattcctgttgttttgctgctgtaaacattgcaacacatggattgtgcagggtagaagtgaactgtattattacttattaacttttgcttgcaattctcgtctaatatttattatgccctctgttcatgtttgttggtgttttttaaagtctgatggttaaatgtagcagtttttaaggaaaatatactaaatggaagagcagtattcataggcttatacctgtgaataattctgattaaagctaattacaaccttctgagtcatttcatgattcagcattaatatgattaaggatgcaccaaaaagtaacaatcaaagttacttgttgatgagttttaggtggtctggtaattcaagttggcctagtctgttatatgttgagtgtcatcttacaaatacagcagtggctccaaaaaattggaaaagaacctacctacaaatcacagccatttaatagtaaaagtgctgatgttttttaaatgactattggaaattccaaacagggaaagctctcgcaagaaaaaaaaagaaagaaagaaagaatgaaaagaaaagataatcacattcagtggaaaggcttacagcaacttatttactagctggactaattgctcaaaaaaggaaaagtcacaccattggtgagaatctcattaggccagcatgtaaaattacagtgagtaaaacgacaagataagatgcagtataagaagttgacaaggttccactttcaacagtatagctcaacatagtgatgacatgtcacatgatgtggaagaggattggaatatgctaccccaaaatatgccactgtggcatatgaattattttgagctgaaggcatttgagaattagcagatgcaaagagaaccttcctggggctttccctatctgactaaaagcagaaatgcctgagaaatgagaactgccataaatctcctctcccagggacattttatgaccatgaagaaaacagaaagttggcaccaagatggacctgcacaaaccaaccttactaaattaacccttatcttccattactttccccatatgtctatgatcccacagagggcagcccctagaagcttaaaacccttttcctgctggtgtggtggctatacctgtagtcacaactactcaggactgaggtgg

SEQ ID NO: 43593 - DNA, 3293 bp, Homo sapiens
ggcccaaacctcagtgtcctaggataataacccaagacaatttcccagtcctttgaaatagttgacgtcccaagatgtcaaattgcctggagtgctttattttggtttgaaatttaaaatttcctctagataaagatctagatttctctttgcaagtcaaaggctagttactattaacagctgtttcaaaagtgctctaaataggtcaccattcaggtgtaccaacgctgcaaactggatctaagaagatccaaatttgtcaccactcactcacattttaactcaaaggtagtactcacaattggccttgtttacataggcattccattaaaattatccatgcattcattctatttgcacccatttctttcaaaaatgtccatctgtaattaaaatcagctcctctgcctgacatctcatttacactacaccgaaattaaaccccactaggagatcacgtagattatggggccgagggcccgcccgctgactaggttttcactcgcgtctcctccatgccccaggtcccctccgattgcagtcctggggcaggactgagcaaaaagtcccgtaaagctggcgtgtgccccactccgccaggaagcctcaccgacgtcctgtgcttaaatgttctgacaccccccaaaagcagttgtttttaaaggctgtctgtgggaccaatgcgttgtcaaacagatgccgtcccgcatcccctccccctaaatgacacagaagattccagcgtaggggaagggccacgaaacccgcagggcacacgacgccgggggccggagggagcaccgcctacctccctgatcaagccccgcggtgccgggcgagcccgagggcccggcaggaggcgggcggcagccccaggcgagctcggaggcggcgggaacgcagccgccgcgcatgccgggagccgcacgccgcccgccggggcgcgcagtcccgcaggcctcgctccaggtcgtccgaaaaggaaccgcctgctgctcctttgcaggctcgcgaggagccgcactcggaccgcctgatggggaaaaagccggtgtggccgggcggagcgagccgagcggagctggagctgcccctcccagcggggaggacggcacgaaggaccgagccgcctcccctcccgggtcccattcagacgcgaggcgcagagactggctccccgggcttcccctttaaggggggcggggcgcggcctgccgtttggccgccccccacaccctcccccgctagcccagagccggcagaccaatcgcccgggcggcggagcgaaggcgggagaatgcgaaccctccggtaggcggtaggggcgggccccggccttattcgcagggagcgctgcgcaggcgcagaggcggccgcgggcggaggggcgggggcaggctagcgggaggctctccgtgaggcacggagggtgactggggacaggcgggcggcgacgggcttgtcatggggatccgggctgcgagacggcactcgtagcatctggggactccgagggggacaggaagtgtcagcgcccgggaccccggcgccggccccgccgaggggatccccactgctccggtcctggagcgggaggggagaaaggagggagccccggtttcgccccgcccctgggctggtgctgcgggggcggggagtgagggctgctctggggggagtggagatcggggagcgcggccgtgccctctcgagcggctgcggggtccccgcggcgccgggctgctgagctgagggcccgcggcggccgcggccggtgcatgtgcggctgctggatgcggaggcggcggcgacggcgcggatcggcaggatgttagggcagcagcagcagcaactgtactcgtcggccgcgctcctgaccggggagcggagccggctgctcacctgctacgtgcaggactaccttgagtgcgtggagtcgctgccccacgacatgcagaggaacgtgtctgtgctgcgagagctggacaacaaatatcaaggtaggagccgcggggctgccggcctcgggagccggtggcggggagcctgtccgggggagtgccaccttccctttctcccgtgacagtctccccgagcgcaccgagggtctgccgagcgggactgggaggactggagaccgggttggcggccctccgtggccccgcggtgggcgagtacttctctggggtccccagagtgggggtgggggccgcttgtcagcccccgctgcagacccagcggctgcagctgccgctgaggggaatcagccattttaagcagcaagcatttgttcaggcgctggcccgccccgtgccgcagaccctgcggccccggcccgggactgcagccgggcaagggtcggagggagtgagcggccgggctcccgctggtctgcggggcgcgcttccccacctcactcgcccccaccccggagtgcgggtgctttggaacgtgcggggggagggggcgagaggccgcggaggcggactgagggggccttcctccgcgctcctgccccggcccggaggagagcagtccgttccgctctctcgccccgggaaagttcgcgggcgccccgcgttgtagccctagcccagttctttcggcaaaatggttaagaggggaggggtcccccgcgggagaggaagagaggggcgtgtgtggcggggagggcccccgcgccgggggcggggcctgcgggcttgacgaggggcgtgggaggggcgcggcgcgcgttcccgcgggcctggaaaatggctggtcgcgagaggggcggtggcgagctggctgctggggagggagtcggggctgtgcgggggcgttggttcggccccagcggagtccgaatcggggtttgcagcatgttttgcggtgatgtttccaacctctttcccagtcaatggatcaggacggcgatcagcagctcggaccgtcgcggatcctggctccgcgtaggttccgggacatgtgtcacttccgggcttcaggaggaagtgggttggttgactgggcaaccgcctggcgtccccgagcccctccttctccgactttaagtgtggaggcgaaaccaccctttgccggccgacccgggaacccgggacagaatcgaccttccttacagtgttaccacctactatcggtggtgctactaggagggcagtttaaaaggggaaatgtgttgcgcttaataaccttgaatcgaggaacagaccttgaacatagtatggaaacagccatacgaactttaaagataatttcctggacccattctctgtttttgtagacacgccagt

SEQ ID NO: 43594 - DNA, 632 bp, Homo sapiens
aagtctgtttattcaaaggttcctcatcaagcgacacgctcaccctctacaaggagcacacacacatggtcttttcatatctcaaagtgctctcctggagagaggccaccaaaggtataggaggagtttcaacatgacaaaactctctcttccagaagtacagcctgagctcttcactctcacaaacagcggccactcatgagtcaccatggcaacagcctctgtaatggttagtgcatgcctcttagaaaacgatgtcgctcaaggtcaaagtctgcatttgtgaaaaagtctcactgtgttcccctgcacagacttgtcattgaacagcagccaaaacttgaggctcctcaaccttgaggctgtcggccaagtggccctgctagcttccctcccctgagtcctgccagcacttcctgtttctgttcctcctaccttggaacacctgggttcctccctttcctggaaagcatgctgctggggacagagttgggatgcatagccgggaaactcttccacttagtctatacatcattgagcatgcagtgctgggggctcctgctgtaagcctccgttgtgaacaaagtcttgggaggagccctgcttccccgggacgggagcaaacctaccaa

SEQ ID NO: 43595 - DNA, 2639 bp, Homo sapiens
cctccctccttcctctttcttttccctcccttcctccctccctcctttccttcctttcttttctttctctttctttttgttccttccttcttctctttttctttcttttccttccttccttcctctctctctttctgtctccttccttccttcccttccttccctccccttccctccccttccttccttcctttcttctttctttctttccttcctctttcttttttttcaaggtcagtctggctctgtcacccaggctggagtacagagtggcctgatcttggctcaaagcagccttgaccaccctaggctcaagctatcctcctgcctcagcctcctgagcagctgggaccacagggctgcactaccacaccgggataatttttgtgtcttttgtagagacggggtttcaccatgttgcctaggttggtctcgaactcctgagctcaaatgatccactcaccttggcctcccaaagtgctgggattacaggcatgagccactgggcccagcctgtttttttcttaaatactactacttagaactaaatgtgaaatcatccaaatatcatattatcctaaatttgattaagataattactgttggctggaaaaggtagtattacatatggcttaattcctttactgtatagtccacagagattgagactttaatcttcacattgagtggaaaataagagagaatatgttcagatgacagtaaaataaagtcaaattagactttcagacaaaattacattaaatatattttgacattgaaacaagtgaccaagtgcagttgaggaatttctttgactcatgacatttacagtaagagtaaatatagaggccgggcacagtggctcacgcctgtaatcccagcactttgggaggcagaggtggttagatcacaagatcaggagatccagaccatcctgactaacacggtgaaaccccgtctctactaaaaaatacaaaaaattagcccggcgtggtggcgggcgcctgtagtcccacctactcgggaggctgaggcaggagaatcacttgaacccgggaggcggaggttccggtgagccgagatcgcaccactgcacaccagcctggtgacacagcgaggctccatctcaaaaaaaaaaaaagaaaaaaaagaaaaagaaaaactcagctgttaaacatttcttgctcaaataacttctgtaaaatgcttaatagaataaataatcgtatcagtcagggttctctggagaaacagaaccaataagagatatatatgtatgtgtgtatgtatacatacacatacaaagagacagcgagagagattttaaagaattgctcaagtaattgaggaggccggcaagtctgaaatctctaggacaggcccacaggttggaaattcaggcaggagttgatgttaccgtctcgagtccgaaatctgcaaagcaggccaagccctccggaaactcactcagagtttctgtgctgcaggctcgaggcagaattccttttttctcgggaaaggctcagtctccgctctgaaagccttcagctgattgcatgaagctcacccacattcaagaggataatctactttactcagagtcagctgattgtacgtatcaatcacatctacacaataccttcacagcaacatccaagttagtgtttaaccaagcagctgggccccacagccaagccaagttgagacataatgaaccatcactgtctctgtaactatctgttttcaaagaaacattgattttctttcgcaatcacttccagaagtttgacttagtatttcctacacactgtttaactaacattgaattaactcttagttcctaataaaggtttgctaacacatacatacaaatcttattagaaaattgatttgcatgtgttagaaaacatatttattgcattattttggaacagttttagtttttgcattatctcttctgtggtcatatattggattttctttgatgcttttcactgatgacagctatttgggggaaaacatagatgatttttacaaaacgcgtcactgaaagggtttgggcagacaacagtgcgtcttttggtgcaggctggcactcacacgcagagatgccgcaagatcagtctccacccctcagacctctgcggagggacgcttgggtccggctagttggactaagacagccccggactgcaaggaaaggcctcaaggccccgcccccactcatttgggttctctttttaaagggcaaacccgagtggccttgccagggggaacaaaatgtctgcttgggcatcgggcaggctgggcttaggtgacagctgttcaggcagttcgctgtctggagagcctgttgccagcacctgttgaccttgtgagaagttccatttgggcacagcccctcctgcagggggaggggggaggttctggtcccatttagattgttgccaggcaacccatatcttcagggtcagactgtcctgtttgtctttccacaaagtatacagacaaccataaacaaagcatagcttaagtaacatttagattgttgagggaacataaaatagggcttgttttttccgtccccctccctcatcattgcccaaagatgttactgatttgaaataatttttagatga

SEQ ID NO: 43596 - DNA, 1932 bp, Homo sapiens
ggccaggctggtctcgaactcctgacctcagctgatcctcccgccttggccttccaaagtgctgggattacaggcatgagccaccacaccaggccaatagttttgtgttttaaaaataatcatactgttgcgtagatatttgaaaaaagtgtgattttagtaatacaaaggatagtgaagagaatatgaaagctaaagtgttggctttctgcgaagaagcctcagagatgaaaatctcccgtaggctccagggtccaaatcttcgtatgttccttcacagatgagactgactgtaagcaatgcagaacacctactgccctctgtaaaaacaaacatatggcatgcagcgtcttcttgccgtaggagcaggagaatgaagagccggagcagttaggaggaaaagcttcctccttagtcaattccaccgccatgttaaacacaaagattttccccgattgctttgtgtactctaaaaactgccccagtgttaaacttttaaggttgatttctaatcacccaattatgaagcaaaatattttaaatctgcatccccccctccactccccaacagtttccttcttttctaagctggattctctttcactaacaacagagcatagacgtagtttgttatttaaaatatcaagaatagtttcccaacaggccagacttcgtggcaggcagagaaaaggacctattatagatccagaaggctgcagccaaacaggcaagatcacttaaaacttcccaggtgccagcaataacaaacagaaaacgggcaggggtggggacgcttcctgccttactgtatcaccacaatcaacctattacgacaatttattctggaaactagatttatacaggaagctcagcaagcaaaaatggtattcctctagaaatgggaaagttaaaataattttcttatttttggttctcattagtgagaaattaaggctattaaaattacttatttattcaggcattgcctcttaaaatgttctcagctcttcatataagcaaaaattatcatgcaagaattttcattattacaaatttacaaagtcattaaagatctcattctcaatcaaacacttgctcctctcctcatattgtgcaatgtagctttacttaattgatcttcaggaataatgcaaaaatcaatgataaaagtccttagccctttgaaaggcacattttgtgcctctgaaaattaacaatcttcatataaaagtcgtttcatctttcgcgtgctctgatcagtggctttcacacttttttcatgactcattttaataaactttacatagtgactcagtacccatacatgcacaccccaaactaaagttttcacagggaaaaaaaaccctcttacaacaggtagtgcatgctggtattttctgttcaattctattgtctcccattccattaaaaaatgttagtaaagacccctaattaatttcctcactaaaggaacacaaatttgaaaatcactctgggttacatattacttatttttttgtcacattaactgaaaatactgaaattttgaatcttagatgtccaatccctcttgttctgttttcactctggaatattcaaaggtaaaaacacgcaaacacaaatctctattgttactacatagcatgacttttatatttattatttatttttgagacagggtcttgctctgttgcccaggctggagtgcaatggtgtgatctctgctcaccacaacctccatctcccgggttcaagcgattctcatgcctcaacctcctgagtagctgggattacaggtgcctgtcaccacgcacagctagtttttttgtatttttagtagagatggggttttgctatgttggccaggctggtcttgaactcctggcctcaagtgatctgcctgcctcggcctcccaaagtgctgtgattaca

SEQ ID NO: 43597 - DNA, 1769 bp, Homo sapiens
atatgattcaatgtcaaaatggcatctcacaaggaaatatttgagcataaaccataaattcaggtggtacatgaatgctcaaaacagacagatgggtaaaagatttccccaaacaatatggacagaaactcagatgcaccaccagtgtcattttcttccatgagaaatgtaactaactcaattagccctctactagccaagagatttaaagatgaccagactaaaatttaaaggtgatcagcctaactcagtaaacaggcactgaacacatgggattcaaggagagccaagagcactggatcgtgcaccaaggacgctcatccctgttattaagtaaccaggggagactcccggatttgcaaaaatgaaaaatgaggggggaagagtggcagaggcggactcctggccattcacgcgcgcttgggtgggacgccggtgaactcggggcaccccggccggctccgagggcacagggcacgtgccgggcaggctgtccgggcaccaggtctcacgggggcccggggctgcgcgccgcgcccgcgctgggagagggccctgagccggggggctcacctcctggtcctcgttggcactcatcgcgccggtcgcggggcgcctcctgagcggacggcgttcgcaacaacgaagagaaagcgaaggcagcggcccagaggccgggcgtccccctttcgcgcctcggctgtgggggcggcacagtcttggcactggcagacgccaactgcgcgcgccccgagcctcggcagcgcccagccgccggcagtgggctgtgggctacgagccggagccgcggctggtggggcctgggaagtgcagcgtctccctgacgcttggaggagcggcgtaaagttccgggacagcgattggtgtagagcgcggtcactcaggcccagaaagtgcttcctgtgccgggggaggtgggtacagggaagtctcgcctgttggaactggctgtggggctgcggcggtggggacgggccacggcgttctgtgacatccccccgcctcccctcgtcttctcccggctggcggcgaccggcctcagctgcagcgggcccggggcgtggggcctgggtgagtccgggcccggagacccgcggggccaggcgggaccgccgaggaagagagctagctcttaacaatgctggtttgggggcctgcgttttgcaatcccatcgacgggtgcaatcctggcacttctcttttagacccgaggaaagacgcacccgtttctagggcctcccaggtttaagacgggggaataagaggaggaagatatctgcctttagggactgcaaggttatttctctacctttcctcactggagctaccagaacagatactgggaccatggggacggtgtttctcctacgttggattgttgcttctcatctttaacatcgaaacatcatttcgtccccacactgtcgttcctcttttgttcgttttgtagttgaacatctctgaatcccattcttagcagccttgtgtcctaacaccctgaacttccagttagttaaaagaaaaaaaaagtaaccacattaggttttggggtttttttagttgccaatttgattgggtcacctttcttatctttcacgctagtttccagtttacttcccttgcattacttgatctcccatccattattcaccttctatagctgcgcctcctttcgtgtatagtttcgttggttgctccattggatatctgaaaatttctccttccagcctgtcattgaaatccattcg

SEQ ID NO: 43598 - DNA, 604 bp, Homo sapiens
ggttttttaaaagacgatctctagaggctcaaactgatgtgtattttatttactgggctacaatatcatttccaagtctttaacattacataaaaatacttaattaaagcaaaggttgatccagcttttttccctttcactgttgttatctgtccacaatcagacctccattgatctgtcacaaccatcttcattagaaaaccataaaaatagcctaatgtttagaaactttgttgttattcctttggagttgcactcacagattgctaaaattgccgttaaatatgtactgttgcctgcttgcatttgaagctgaggcattgcaggctctggagagctgaaaggtggaggagacttggtttgaatgggcgcttatcttgtcatcagggaatttgctataaaattggcagaaggaaagcattcttgcacagaggtgaatggccatgtgaggcaatagtgaggcggtatgagtgctattagtaatacaggctgagtatctcttacctgaagtgtttggtactagaagtgtttcagatttcgggtttttcagattttggaatatttgcattatacttagtgggtgagcatccctcatctaaaaatc

SEQ ID NO: 43599 - DNA, 1134 bp, Homo sapiens
atgggagtgcagtggcatgattttggctcgctgcaacccccgcctcccgggttcaagtgattctcctgcctcagcctcccaagagtagctgggattacaggcgcgcaccaccaagccccgctaatctttgtatttttagtagagacggggtttcaccaggatggccaggctggtctcgaacccctgggctctagtgatctgcccgcctcagcctccgaaagtgctgagattacaggagtgagccccagcggccggcctctgtatttttaattttcagtgtaacgagttggtggccctcctatctctaatgttatcccagagcttcggtgtttgtgcttcgtgccctctccgtttctcccctgttcttatggaataatgatgtgcattaggagcctggggtcaggagtccaaggttagggtgagggctttcccgtggtgttggcagcagctggcgcctgcgccctccgtgcaggagagcagctccctccagcggcttccctcgcgctttgtgccttgcccaccgctcagacgctctgctctgaaaagtaaagttcacaaggtatcttcagctgcaaggataaaatcaagaagacaacttcaaacacaacctttatcaacttaaaatcaatattaatgtacgaatggtccgaatggtcaccttgggaaatcagtgaaagggcctgacatggagaagagattaaattatgtttaataaatgttcattttatgttcattctttgaaaacgggcactcattgagtgacagatcttttaccacacacaaacactaacagatacgcgtaactgcgccctgcgacattttattttccggctgctccccctccgctgtcaggtgggcagtgtccacggtgcttaggggaacaggaggggttccggtgctgcttcccttccgtgcacagaaaatccacccaggctggcgcggcggctcacgcctgtaatcccagcactttgagtggctgaggggggcggttcacttgaggtcatgagttcgagaccagactggccaacacggtgaaaccgtctctactaaaaataaaaaccgtctctgctaaaaaaattagccaggctaggtggcgcgcctgtaatcccagcactctgagaggacaaggcgggt

SEQ ID NO: 43600 - DNA, 863 bp, Homo sapiens
ttagccgggcgtggtgcgggcgcctgtagtcccagctactcgggaggctgaggcaggagaatggcgtgaacccgggaggcggagcttgcagtgagccgagatcccgccactgcactccagcctgggggaaagagccagactccgtctcaaaaaaaaaaaataaaaaataaaaaattaaattagcctggcgtggtggcagacatctgtaatcccagctactggggaggctgaggtgcgagaatcatttgaacccgggaggcggaggttgcagtgagccgagatcgcgccactgcacttcaacctgggcgacagagggagacctcatctcaaaaaaaaaaaaaaaaaacaaaagaggaaacaaacaaacaaaaaacctacaccagcccagcctctctagcgaggctcacccgcccgcccggcccccgcacccggtctcggcttctctggccaggccgcggggccgttcggcgcggggcggggcgtcggggagtttccgcagcggttagaccggccaggggacctcgggacaatgagcctttctgttttaaagccggaacccagccgggccgcgccgcgaggaggctcccctgaggctggcaggagagacctgcagaaactcgtgcgcgccgagcgaggcgggcgccctggggctggggcacgcggccggcgggggccgccagggagcggccgtggcgggaccaggactacggtgcgccccgccgccgccagcacccgccttgggaagcccgtccgacgcgtacgctgcaggggccttcaataggggctgtcgccacctgcacccgcgccgctgcggttcgcaggaaactcctgtggcttttcggaagcacaatgcagaacgcccg

SEQ ID NO: 43601 - DNA, 2564 bp, Homo sapiens
gcataaatatgattttgaacgttgcattgtcacagatgaaaaaatgcaccaacatgtcaaatgcagcgctgaaaaaggaaatcgggcttatttttgtcgttgtttactgtaccaaagcatttttgaaaacccaaatcgaggagataaccgtttttgaatgaacggcagtgcaaagcgtggtcggggttagcagcaacgtggctgggcgcctttaactcggcgtgacctccgggtcccaggcccgcgtcccgggcccagcgcccaggcccgggcggcgcattggcccctcctcccctcgcgcgccgcgcgcattgttgtcctttagcgattggttgttggaccagaaacagctgtgcagagccgtgccatctaaagagctgtggacctgaatgcagcgtagcgggctggcggtgacttacaccgggactccagagggagagaggaagcgctgcaggccacttgcattgcgtcttccaggctgcgtggacccggcgccccggcgtgtgcggttgtgggggagctcgccgtggcctcccctccctctggctttagcttcctttggggttggcgcaggtgggccaggcagcgcaccgcagatctccccgttcccacgaaggctggctcgctgtctctctccgagcgggagggaccatcctaaaaatatgtaaatatccaagcgctggctccaggctggggcagctgccaaggtccccgcgccgccgccgggtgttttacatgaaaatgagaagcctgatgggaaccgcgttctaacttaaggcagcctggtgattagcatgagactgggcggctgtcctgcttcctgcccttcaatagccgttccgcgcgctcgcgccggagcagcgctgccgccgcgcgggggtcgatcgcaggctcggcgtccttggcagccatggctccggcgccgcctcggccagtaagtaggagcatgcatgtgtagggggcacatgcgtgtcggcgcacccacccagccatccacccgcgcgcacgcacagcgcccggagcctcggcaaggggaagattgacgaggcgctgcagtcgcggggacgacgcgggctcttcctggattccgcaggagcccgcccgccgcagctgctgtctgcagagcctgctcggatcctgtgcacacgcgccccccgctcgagcctctgtgatgaagactgtctcccggggactgcagcggaggcagagccagccagcgccggggactgcgggccgtgcggctgataggcccgcggggacacgactcggacactgtcatccccacgcctcgcgctgagctgcccggcgcggagggtctgccgccgcccctccggcctcccgcacgcccgatcccgggtcagccccggaggcctcggctgcctcatttgtttgggtcttttgtgccgtggctcccagttggccaagcactcctgcgctgaatcgggccattgtctgcgctcccattgccttcacgctgcaagtctcggcgcccccaccccgcccgccccctccccgcctcctcccggccggggagcctcctaacgtgcctttccccccaggaatctggaagctataagccgggcggattgcaaatgaagtgtaatgcattgtgggacgtgtgtaaaatcggagccttcgccgtgggggtgtgggggggcgtggggagggccggacccgccgctggcggtgtagacgccgacgaggaggggctgggaaaatgtgcgcagagtccgcccgggtcgtgcccgccgtagacggatgaaggagcgcgctgcgccccggcgctgaggccccgaggatcggggcggcaggtcgccctccccaccatgaagaagacccggagcacaaccttgcggcgagcctggcctagctcggatttctcggaccgggcctcggaccgcatgaggtcccgcagcgagaaggactaccgcctgcacaagcgtttccccgcggccttcgcgccccaggcttcgcggggctacatgacatcaggttggttggtgaccgcgtttctgcccccgggccggggccgcgggacgtgctcggtacgccgcggcccgggtgcttggaggagaggacgggcagtgatggatgcgataagttatggggaaagcaggaaaaaattagctcccatccaccattttgtacctcccaagatccacagcaggccctctcaatatggggttggagagctattagttaggtaaaacgagggaggggggacgagccgggcgttttggctgcagggagataaatgactgcaagccccggcgctgcagcctcctcgagctttgtggaggatcctgcgcccagggttgcctgcagtgccaggcttgctggctgctgcattgtggccggttatctgagtgggtatttccagcagccccctgttctccaaaaggaacaggttccatgcgcagctctggatgggctgagtcaggggagagtcctgcagacatcccaggctggtctgatttgcacgcagagaactgtgttggagcttactgaacgcgttctgtgggggtaatggtgtggatgcggattgaatgctcacatgattctgt

SEQ ID NO: 43602 - DNA, 485 bp, Homo sapiens
gtgctgagattacaggcgtgagccaccgggcccgaccacaaatagtgttttttaaccagatctgtaaaaagtttaggagatggaaactgggcaaaagtaaagtattaacctactcttaacagaaaggaaaaaatgctattggtgcagaagtggcagcgttcgggaggatcaaaacaacacatcatgatgagtattatttcctcattgactctgattgcttttctagccagttattgattctttgcacacatgtagacttttcagttggttttctgaaagcagagccaacgccaaatagtggcttgaggcccggatgtgggagcaggctggctgagtttgggcacaggctctgcacggaaccagctgtgtagcctggcccccatgcctggcctctgtgtctcatgtgtaaaatgggacaatagcagcacctgcttcatgggattgtttgaggatcaaatgccttcatcaatgtaaaaccttgagga

SEQ ID NO: 43603 - DNA, 870 bp, Homo sapiens
gatcatagttatggtgttttcttatttaaagatagcatttttttcttttaatggaatctcgctctgtcgctcaggctggagtgcaatggcacgatctcagctcactgcagcctccgcctcccgggttcaagtgattcttctgcctcagcctcctgagtactggaattacaggcgtccgccaccacacccagctaagttttgtatttttagtagattcggggtttcgccatgctggacaggccggcctcgaactcctgacctcaggtgattcacctgccttgacctcccaaagtgctgggattacaggcgtgagccaccgagcccggccagtatttttatcatttctgaaatcaagacgcccgggttccctgatgttgattcatggtatctttcgtgcctcacgaatttttccacaaaactgctagggcaaaagaaacacctagttgttctggttactcattagtgagacccaaacgactaagcaggtgtttatgtcctagcaacttcgtagcaatatgaaaagtgttattttattcttaaataagcccggttactccggggatgtgtgtacatgctgaaaactgcagaacttctcaaacgtgggaattacctggggcatggccacccctcttcctgctccacactgatttttgcacaatcctgctttttatcttggcaaccacgagaaaaccagcttcacaaagatgttgtcatcaaagggaacacagcacggtctaatttgaaactcgaagataagccaagttgattgatcacttgatgtttgacagaggtcaagtattattttctaatttggttgtataaaatttaccccctaatcagcaggatttgaaagcctgacttcctttttct

SEQ ID NO: 43604 - DNA, 650 bp, Homo sapiens
gagagtgtgcccctcgccaccccgcgcctggggtacattctgacctcgcgtctccgcactgcacagacaaaggagcctgcacagacaaacagaggctgtagcttttcttggagcgatgactcatttcagttcacaaaggattctgggcagggcagtgagaagtcaggttggctgatccgtccctgtgacttcactttgcagagaacaagcagaagaggagtgacactgcagattccgaggcactgcagtgggatgttggctcagcaagtggctgtgatgtacgggataggcatggaacaggattccagctgttccatgcaaataggataaaagaatggtaaagaggattcctttttttttccctcctcaaaacgttaccagcaaagtacattcacagagcctttttaaggtgccttttgccagcttttgaactgaacttgtaccagtatctcaagccctgaattgtaagaagagctgagagttctggaactcatttttaaaaagtagatctacgaaggtaaagtaccagattcctcttgtgttccacgggccctcagtagccaatctgaaatgctcatttaggatactatgacttgaaactttactctttcttcttattccagattctaggacgtccgtttctgttactg

SEQ ID NO: 43605 - DNA, 791 bp, Homo sapiens
gcagatgatgggagccctgaaggtacagctccaaaattgttgcttccatgaaggttcaaatgaaccagggactaactctgggttcttgacacttggatttagacataaacttttgcctgtatgttttcagagatgaagaggaccaagacacacattcagatgggggtgagacaatgcccgttgtcccttcagtgcatcagtcacttccagtgctcttcagtggaaactccttgaagccggcactgtgccattaatgtaattcctgaaaagagaggaaaataggcacactgccttggcaaataagatggagaaggaagtgaatacagttagctgggtagtagggatctgcacacgattatatggaaaataactttctgggctgcaagcttcaaaagctcaggacacagccctggaagaggtgccaggttgcaagagggaggcatgcaccggactttggaccccagagtgctgcctttcctttctccagccacgcccaccctgcctgttacagcacctgagcatgaggacagaaagaaaggacggggcagagggggtggggaggggtgtgtctgtccactgggccgggcagtttgggtctaggggaggctgttctagggctcctttgaaagcacaggtaacagatgacaagcagcacacaaaagctattgactagtccacacacttagaaaggtggaaaagaggaaatgcatattttcagtagaagacaaaacaatgtcccagtggctggtcatcctcatggatcgtcacggtatgagcaccttgtacagggc

SEQ ID NO: 43606 - DNA, 838 bp, Homo sapiens
tctgctgtgtttcctcagctgcagtttcataatttattctgccaggctcagcatgtccttgacataccaaaccattaactgaaaatcagaaaagttctgtgaggtcgctaaattctttcttctgatgatcagcctgcacactagctgaaaataaagccactgggctggcagacaaaaaataattggcctaaatggtcacagaaaagtctaaacagaagattttctttccctcttcacttgcaatgatttattttcgcggttttatgagactttaatgaggaaaccttatctgtacgcctggtaattatcaaccaaatttccatttcctgccagaaaatccacaataagcagaacaaaaacggtggaatcgggagactgtttggcctctgacctgtatggctggggagtaactcattgccacacagagcatgtgactagcaagcatgtctgtgacttctcttgtacacttttgcttaaactaaattgccacattcaatttagtataactcagtacacgtagactcagacgccatgaagcatcccggacactgtcccatgaggtggcatttgggcaagagaaagtacaacttccctcttcataatttaatataatttctagtctcatccagttccttctgttgggtgaatgaggtcatacctgacatgagggtctgacaagaggccatgaactttgcatcttggaaagttgggtttttcaacatagattgcagctcttgcctatgagtgatgatgctacaattggggtcactgaggaaagctgctgtgggcactgactccagacttagcggtgtggatgtcccagcatcctgagattcag

SEQ ID NO: 43607 - DNA, 1131 bp, Homo sapiens
acactagctgtcactaaagctccgaagccacgttttccagattgtcttgatttccccagatattttgagtccaggcctcacagccattcaaccacaggctttagaattgagcctggcatttcatatccttttccagttttcaaaataagtctttcctctggagaaaaatattggcctcctttagaagcttgggcctgaatttgctgcatttctctcaagtcaggcaggggtccagaccatgttctacgatctttcacctagctctggggaaatctttccccatcctacctttgtgagcatggtggcataaaatggacactgtccaggagaggctgcaggaattagcccttcagggctggggagagctgtgtcctgcccttggactgtagctctgggtcaactgaggtcagaagaatttgtactttcaacacctcttccctgttgaaatttcttctggggctactaataattaaccaagcttgaaagcctgacttcgctttcttctctgtttacttggtgactggtttacacaccaaccaagtgaacaatctgtcaataagtagtcaggaatcaactgtctcaatatttaataattcataccacccactaacatctactgagactctactgtgtacaagttctatgatgggaaacaaaggtcaagatgccaaagacctgccctcagggagcctccactccggcaaggcagagtccaaaacagacaaacaaatgtagcatcaggtcttacagaaattccaagctggagaacattagcaactcttgagtgtttcctggaagagatggtgtttgagttgggctttgaaggacagggagggattggcacagagagggcattccagagattctactgattatttattaggctgattgaagttacttgggcgagcacggttacccctccctgaccactaaattcccaacacttaagtcttgcactggaagaattgttttcacaaccagaaaaattttggttcgggtctatgcaaatcatccatgttggtgataagaaagaaagaaaggggttggggtaaggaagaataaaaggagataaattgggcttggaacaactgtagaggtttttgcagtatgacacgagcaagaaaatttaaa

SEQ ID NO: 43608 - DNA, 1238 bp, Homo sapiens
aagtctcaggagttaacttcacagcagccgcagctggtttgtcctgatcaatgatcaccggtgatctgcatatcaacagatggtgctgggagcagacactgggtctcattcagtgattcacgtctataatcctccttgggtgctctttgcataaaagctgttgacagataatctgctttagggatcaaagagcaactcaagggggctgcatccttctgatagtttcccagtccaagcggtagactccacgggaataggggagatttttgagttaaaaacagaaggaacaggtaggatgagaactggcaggaactgaggacctgtgaaaaccatgtggcctaagtggaaggaattttggagcccagcaaaccagagttcaaatcccatcccagccacctcacacgactcattccactttattgatcctcagtttcctcctctgaaaaatggagataatcataccttttttcagagttaagtggtttcaggtagggaaagctttggcacgatgtcttccgcacgatgtctggcgcggaaaaggccaatcctatcaaatgggccttttaaaaggccacttttaaaaatggcactttgaaaaatcctcttctagggagggatggggccggacagtccatttcttacttgatatctacagaccatttgcagaggaaaagtctcaaatccccttgacgaaaagaaaagcagcaccacgttgcatctgccttgcacaggaagctggaagctttgcacgggggtgaaagttacaggcagacactgcccgcggggctccggacagcaaggagcgagccctctgagcctggccacgctggcccgccactgccctctgctggcggctgcggtcttcaccaccgcccgcagccgtccccgtagtccgccgagaggcgccaggctgggccagccttgaattctgggtttgcttctcccggtttgaaggccacccccaggattcgcaggaatctgacagctgcttgtgactgtgctgaagatgccgagaatgtaggcagagcccgggcagggccggcgggcaggcggccacgcgctgcagcaaacgcgagcctcggggccttgaacctggagccggggccttgcctgggctgtcctggctgggagtctcgtgctgtgccccccgcttcctcattcccccaccccaccctcctaacccttgttgtgtttcattttcccttttaggatatgtgcttcttatttgggattttatt

SEQ ID NO: 43609 - DNA, 361 bp, Homo sapiens
cctctgccatgagagcagcatgtctcatttagaagttgcttttttcagcctgggtcccagaatgaagaggaaatcggaggggaggtcattcctcaaggccacgcacatgagtgaggaataaacctgagctattctaagacagacgtggtgtggaattgcttgttgcaacaacataactcagcctcaccttactgataaagggggtaatatgtacactcttactaatggtgagtttacacatatatttgctcattctgttctcacagcaagcctattgggtaacatttactttctacattctactgataaaatattaacactcactggacacaatggctcatgcctgtaatcccagcacttt

SEQ ID NO: 43610 - DNA, 1447 bp, Homo sapiens
caggcttgacaattctccataacaattcctggaactcaggaaggtgctagacttataattacagttttattataaaggctgcaaatcaggaccagcataatgaagagatacataggacaagatctgagagggtcccaaacgcagagatcccacgctctctttccatgaaatcagagcgcatcaccctcctgacacatcaatgtgtttatcaaacagaaagttcctctgagcttgtgtccagagttgtattatagtttcctgacataggcatgattagtcagaccattgaccaaggattaaactcagtcaccagcccctttcccctccctggagatcagactggctcaaagtcctaacctcctgagatcacatggttggtctttctggtgaccaaagatgcccctattattcaggaaattccgagtactcagagtctctctcccaggaactagggacaaaggccagtccagtgctttattacacaaacagttgcatacctgttctccttagcttggtgagatctcctctttctgtcttcaggccacaatcaagttccctgcatgaactctgagatcagccaaccttgagatagaacttatgacagagtcctctgcaacatggggtgcccagagggcatgagttttggatgtgggccccacccccacagaatctggcctgattctgatacttcaaccaagcaaggtgctgggatccattcagtcttttcaggtgactgtattttttgaacaccacttattttatctgtggaaaattatttctaaaatgccttatgctagctaatgaagacttagtatctataataataaaatagaaaacattttctttaaccacctctgattataaatttctgttcaaatgctgagtaattacccctggagtatagatgaaaggtaattcatgtacccatatgtgatggttcatactgagtgtcggcttgattggactgaaggatgcaaagtattgttcctgggtgtgtctgtgagggtgttgccaaaggagattaacgtttatgtcagtggactgggagaggcaaactcactctcagtctgggtgagcaccatctaatcggctgccagcatggctagaataaagcaggcagaagaacatagaaggacttgacttgctgagtcttccagccttcatcattctcctgtgctggatgcttcctgccctagaacatcagagtccaagttcttcagcttttggactcttggacttttggactcagtggtttgccaggggctcttgggccttcggccacaggctgaagacagaactgtcggctttcctacttttgaggttttgggacttggactggcttccttgttcctcatcttgcagatggactattgtgggtcttcaccttgtgatcgtgtgagtcagtactccttaataaaatcccctttatatatacatttatcctatt

SEQ ID NO: 43611 - DNA, 599 bp, Homo sapiens
cctggcatgacgtcaaacgcagcagaagtgagtcctgacccatcacccttctgtctgatcacagaccctccacgtagggtccgtcaacatcatcgatatctaataacaataaacaaggcttcttgaccgagggggcgagcggggactgaaatcttcctcaaagacagggccacagtataaaagcagaaagaaaacaaactgggagagatgctcctcaagccggaagagctctcagaactcaattttagaagtcagcatgtgaatggccacaagggggcgcgctgtttccaaaatctagaaactacagtcctaatccccgcgccccaaccggctttcagctgaaatggcttcagctttagaacatcaaagggcttgtggcaaggatttgctcaccaaatccactggctcccattcagattttgtgccaacctacagtctacagcttgtagtcactaggagctaaagctttcaatttttgtccctagattattgttttaaaagtaaatacggtacaatggagaaatacatacatgtgtgacatatatatacatatgataatacatcatgtatatatgtatgtatacttaaaacaaaaacac

SEQ ID NO: 43612 - DNA, 932 bp, Homo sapiens
ttaattagcccccataaatattgtaagtatactttttccattttttatactcaggtttctttttgaatattttcgtttctgattggcagactttcccaaatactaaactaagtgcatgttgagcatgcactttcctaataaataaagtgataagatttagaagctgaactttaaaaacttaagaactagcttcaataagttgaatattaatttttaaaatcaaaatagtccctgaataatcttttctacctcaaagaactccaagaattacagacacccacattcacttttgggtagagcaggcagaggccagaccagctcatcagcgctgaccctttcagagcctcagtgggtgaaatgagtgcaccctcataatgagagctgctatgtttgggatctctccttgctcctccattcgtgatcttactttccttttagtcctaaagattcaaacacgtggtgtcagtgttgctctgaagcacagaccgattcccagggtcaggctataaattctttaactaaatccactgacaaatcacccagaaaagcttttaatatgtttgcaggcttagccacaggagcaaagcaaattgttcttgagatcttcaaagcaggcgtgcaggtttcaccagttcttcctcttgccctgggcaggtctgcaagtctgctggaacctggaacacagcagccctcctgcccagccaccccattcctgagcttcctctccatgcaagagtccacttgtaaaacaaacaacgggctgggagttgtgtctccccttcaccaccagtaagtacttcatgcaggtagaaaagccagaggaggaaaaggtattgaaacacagtagaaaaaacaaatgaacaaatggaaataatgagttgaactcagaggctcccagcttcaggaatcatttctgacacttggcatttgcc

SEQ ID NO: 43613 - DNA, 2315 bp, Homo sapiens
ctgtctttaattttagttcctctttgagctgtggaacagctaacactgctgcagaaatgaccttccgccatgttctggagtcttcagctccaaatgggattggtcagggccagtgcgtgacacactgccttgcagacggaaagcctttgtcagtgaattctcagtggtgtcagatttctattcactcaagaacacacccagaaacctggagaaacagctcttgcagagtaataccgactctccctcctcctgcttgtgcactggcccaggcagagaggaaggaagtcacaacttaaaaataaaattcacacataagcttttggccaacatttacatcttaataacctgaagtcccatggggtcccacgctgagctttgtccatgacattcacagtgttcacacacctcagaccatctcttctgggatcttcctgggagggctgccccagcaaagcgagcagtgctgccctttgctgagaaaaggtctccccgtggccgggctggagccccacgcgtgtgctcttatgtgctgctgctgtgtccatctgccttgcaataaattccccaggctttatcaaatggccttggctttagaatttgcccttcgggacactaatggtagaggaaatagcttgtcattagatcaaaaaaattgtcatgaaagtccctgctcttctgcaaaattaacaaagccaaggcctcctcccttggagcctgcctcacctgacagaggtgtgtctggcaacgtctggacgcacctgggacccagagcagccagcgggaggctttcgggccccctcagcaagaggaagtgcatttgaacacctggaaacaaaatgcatgtctccggactgcccttcagtaaaacattgcttccaactcctgatatgcagctttattttcattttttagattatctctcggtaatagccaggacataactcatggctgactccttttctaattctccaacttgcctcagtgcctcccaaagcctagtccccgatggtaaggctctgtgacccagcggtcagggtgaggcccatggcagtcgcctggttctattaagaaacctctatttgtagtcctgcgcttcattagataaactggttttctgcatgtagactgcaagtaatcaccgcatacaaacaaaatgaactctgccgcctagcactagataagtaatgcttcagaaactattactctaggcctcttcataaactcagtcccttcccagccgcctccccaccccaccccctggctaaagtgaacgtgtacttatttgctggctgaaattctgtctatcctggtttcacaatcctccctgcctcagtgtcagaagtcatatagttgcacagacaagcttatcttttggcagcaatttctaaaacaaatgtaagtcctttgcttttctctcccctgccaacccccgacactgtactgcatcgcataagcttccaagcttgcttttaaagcttcgtccttgagcacatgggacatggaaaaatactgcctgatagggtggctaatctagtgggatgattggagatcagtggattagggagactgtggcgtcaattgaagatcaaggtccactgtgcttcatgccactcctttagaacacaaaggccaatatcattcttgccacaccagcttaaaacccgatacctcggaagcaggttaggcaaggcagcacaaggacttgctgaacccagagcaagcaaatatccccacctgcaagcctgcttggcagagcagggctgacagtggggcacagagaaagttacctcaaccattctgtactcctcttgcctttaacgagcccccattttaaccaagtttcatccctcctctttttaaagcctctcgaaggacccataattgcccttgatagagctccttcacatgtaatttgaatgtaattcacttacatagtcaatctgatcagcacttactaatccattgcctataactcatttttcattattatttcttgaatgagtgatttaaaaaattgcatatgcatatcgttcccaagtctctctctgagcctctttgtgacggggatggagtaagcaccagcttgtatttccttcctagttccccttcctgcggcgcttccctcttggggagatttcggtgaatgctgaagatactttcttgggcagaaatgaaggggctttccatcctctgtggaagaaccacattgacaagccccccagcaccccaccttcttattcccagttgtgtgacctcagtttccctgaccgtctctgtgcctctcctcgcagccctcttgaggacttgtttctcca

SEQ ID NO: 43614 - DNA, 4239 bp, Homo sapiens
tacaaaaaacatacaaaaaaattagctgggcatggtggcatgcacctgtattcccagctactactcaggaggctgaggtgggaggatggcttgagcccaggaggcagaggttgcagtgagcctgcactccagcctgggtgacagaacaagaccctgtcttaaaaaacaaaaatcaaattgaattaactgccagcaggtttatatccccttcaacttctaccagaaaggaataaattctcagctccttttatgccacttgacaacagaatgaggcttgctcaaaaaagggatagctcagagaaggaaagactaattttagctatatagaaactggggtcacatgtctgagctctgacagcctcagtggtcaaatcttgaattcatggaagtctgggagaagatgggtactttggaatcagtgctccaaaatatggatcttagctattttatatgcagatggtgtggctgatataactgagtgcttgcaatgtacttcatactttacattatcttatctaattctcaccttgcaagtaaggtgtcaatacccccattttatatgttgagaaactttttctcatagatacaaagagatgtgcccaaagtcgtcagcaaataagagcagactgaacccaggtttatctgatttcaaaaaacgtattctcttcccactacatatgttgctttcccaactactctggaaggtatgggatgcagatttcattctctggatattcttaccttggatttttcactccctttggtattcctggcaggtttcctgaggtgtgacagacatcctgaagaggcactcagcacccattctcaactccttctggagtgtcttcctctactgcagaggcgggaactctgagagccatttttccagtctcacttgcagctggggttctaactgtgaattaggttcaaccaattatatgcatttgcaagagatttggaagtcagaatggaggcagaagccacttcctactgattggctgtaaacactggcaagcatgattgtggtaacaccggggctttctgaagccatgtctcaaagttcagccactgattgcatgggtgtcgagagacattaaagtggtggtgacagaactttctaatgaacagatttcagctaaaacaatgtgtcttcggagtcactattcccagtgacaggctcctgatttcctccctttacggtggtggcagatgtggaagcacccgcaagccggctcctccagccttcccaacgacgttgtaaacacctgcttctctctagacaatgactttctgcttaaaatagctggcgtggtttttgcttcctgcaactaagccccattgatatatgctgttttccttctttccctctaactgctggttttcacaacagccaaccccgcaatcgatcctttaagctctaaaatgaaagccttgaatatcttcatcactccatatcctgctttgtttttctccatagcagtgattgtcacccaaagattatttttattatttgttgattgtccaccttactaggatttaagctccattagaacagatactttgttttgttcacttctgtgacaactctctgacatttagaagagtactagaaaatagcaggaattcagtacatagggttgaatgaacgaaatctacctttcttaaccaaacaccacattaaattcatgcattaatagggtcatcgacaagatatcctcaataacacctcctcatgaaacatttacctgggttttaaaaatcctccaaaaacacaaaatatcatttgtgctatgtaactcagcattacatttaggtgacatcccctcccagtttgcctgagacgttcctggttttagcactaaaagccccatgttcatgagaatcccctcagttctgggcaaaaagatgattggttatcctaattaaatatcttagttgctgagaaaggcactgtaattacattactttagatcaattttgcaaataaaagtttgaagacacaaatccacctgtggtctccttcccatatcagctgtgttgcacaggatccccggaaccatcaggtaaaatccaagcaatggctttgggttgtattttatgttttttactaaaatttctattgcttgtaccctgaatatttcagagctgagcctgtgaaatcttttctgcatctcagttacattcgaaacatgagcttcccagagaaaagatactgcagcataaacatgtgctcttgagtcacagcaccggggaagtccccttgggatccagcagagtgaactctgcagaaaatatggatcaatgttaattctggggatgaataaaggcttagtcatcaccttcccccgattaaggaacgcactcccatctcgctgctaacattatcctgaaacttcaggcagtgagttccggtgcaatgtgtggattcgaaatgtcaacgcttctgaactggcatattagagaaaatttggagaataagagtattctcagacacacaacccaagctgccagaacatcttggatatcctctccctgatgattcatgtggagagatgtttgggtgtttagattttaaaatatgcttcccaaccaaaagtgaaacttaaagatgctatcactctggagtttttttgcacctgcaaaacaaaaatttgtgtttttaaaattaactgttttcgcgacacagtctgttgcatgtgatattggtgtttctccagccaagcatgtaaggggttaactgggcagcagttgcacaatcccagcacactacattccacagcaccagcaatctctgtctgaacgtgtttataaagcagatacggggaaactgaccaaacctccaaagggcagtgtgcttacaggaacagaagcacacacactgcttttcttctgaagaaacttggtcagactccagagcaggctgttttcagactatgtgaactctgaaatgtgctacatcttgatccttccacggcacaacccgggttcttggatagacttaacatttttgctaaaaccagctattaggcctgaccacttccttccttccaggcactattttcggaagcagagacacagtgcctctgcacctgttgttcgtgtggccacagaagcaaacctctacaaaaccctcatttgtctgcacagcaggaccagtgatgcccaagcccagacagggaatgggggtggtaccagtgtcccatggggccagtggggacccagaggccagacagcctcacgaaaaagcatctccccctgactcctgccagcttcctgcatctcctgacctgaagcttcgcacggccgggctctcctctccaggcctgtggttggacacattcctaagggggtgaagccaacagtcccagccctgttcttttgacaccgggatggtggggctctggggaggaggagatcccagggatgacagcctagtagtacccaaccttgattcacatgctggggtgcaaatgagtgagaagcagcctcaagaagctgatggtgtcacccaactgcccttgggaggggtccactgcagcctggggacagagggaggtcagagtcacgtcccacctgctctgataactctggccccaggcacgtcattgtactgtgggatggagtttcagggtgaggtaggcggctgaacggcaccatgtaaaaaccagtttgtgcctccaaaccaaactggcactcagacattagctgtttgacccctgaatgccaatgaactcatcttggctacctgtgtgtaaacctttccctagcttttgtcttttatcaggagaaatctggcagaatagtgggggttcttttttttttaaccttttatctgggcttatttgtccaaaactacaatagcagggggcctttaaagcctaatgaacgcaggttacagagtggcctcaagcagaaggaacgtctcatgttccatctctctgaattaggggcaggaggccagctggggcttaccatctttccattcacatgcaaagcacttccaaaagcacaagtttgaaaactcagactcctgaaatcaaatcactcatctccttcacttctaaaatctctgtctcagtagtggttacatgatagtacggtacacttgggatttgggtggggaaagggtattgttttagggttttgatgtccaaagaatttgtattccatagccatgtgtatttcttttttacaaatcctttgaaatagactaaataccacctttggcagtggttcatc

SEQ ID NO: 43615 - DNA, 1491 bp, Homo sapiens
gttatattaatggactcatacagtagacttttggggctggctttttttttactcagcataattcaccgcagagtcacccaagttgttgtgtgtatcagtcatcggttccttttcaattgccgagtagtattccacggtataggtgtaccagtgtgtttattctcccctctgaaggatgtctgagttgctacaagcctttgactattacaaataatgctgctatggatgtttgtgttcaggttttgtatgaatataagtttccatttctctgggataaatgcccaagaatgcaattgctgagtcatatggtaatttcatgtttaattttacaagaaaattgccaaactgcttcccggagtgaccgtgccattttacattcccaccagcagtgtctgagtgatcaaatttctccacagcctcggcagcatttcgtgtcatcactgtttatttattttggccattctcataggtaagtcatgatgtttcatggccattttaatttgaaggtccctaaggtcctgccctcattttgaatgaaactgacctcataccactgttagttggatgaaatgtccctgaaaattagcttcaataaataaaggtgaagaaataattcccaaggtcctcaaagcactttgccaccatcatcaacgttttactcatacctgtatctgttattttaacattttaacccataaggatgacagagaaagcatcgttatcctgttatagatgaagaaactcaggcacagagagggagagtgacttgtccagactcgcacagcttggagtatatgtggtgctctatgttgcagtcattttctcaccaatcggcaaagtattcaggttagaacgcattccagtctccttgagacgccaggcgtcatggagaggctcgttttaatcactccaagtattttattttctgaagtatttttgtttataaacaggttcctgttttaattgctgtctgtggagtgacaagcacattatctgatttctacgcagggaaggttttagagggcagtggcaattcataggttctttaataaagaaaggaaaggcacaaaagaggctcagaaaggggatttggggctgtgatacaagagtccaaaagccacagcatacagaatggaagggaaaccggatcctgtttaggttttcctggtggggataaaattaaagaaaaggcaggcaggctatatatggcaggcagactcccaagcccatttatttcatcctttggattatcctacgtgagggtgaggacatcaattatgcaggtcactagacacagactgacgctgacctacaccaacctctctctagtttcctctgcctcttccagccaagtaaaataaaatggcaggaaaacaagataatggcctgccctatcctaagtcctaagaagcagctggtgggtggaggtagaaaccaaatggggtgtgagagtttgaggagggagggcgcagcgataccttgcatactaag

SEQ ID NO: 43616 - DNA, 1279 bp, Homo sapiens
cctgtgccaatagagcaaaactccatctcagtttaaaaaaaattaaataaataaattacttctgtaagtcaaaaatggttgaagggctgcaatttcatgttagaagtcaggaaatgggaggggctattgatgaagcaaaactggccaggagctgattaaggttaaaattaatctgaatgatggcctatggggtaaattttactcaactgtctccttcctatgtgcataaaatctttccacaatgaaaagttaaaacaaaattaggcctttaatacagtacaatatttaaatttagttaaaaataaaaactagtaaaagtgaaactgaaagcatcactgcaaaaacaccctccgcctaaatttcttcatctgcaaagggaggccagggagctcgacaatctctctgagatccctgggtctgtgaccgcagtgtatgctctctgctcagccactgaagctcgtccccagttttgcagggcatattcggctcttctcttactatttaacaagggccacctaatctatgcataaagatcctcagactgtaggggagttcagacgacacagcctagtgagaagctgacacacacatgcacatcccatggaaaacccttgtggggtgtgagagatgattctacagtggacagaaggcagccattgagagctgttctgatagagtgctgacattgaccactctgtcccccaccaaagggcctgtgacggaatgtctgtaacatagagttcatacattgtatagaggtctataacatttaatacatattaaagtatacttaatagcctgaaaatatacttaatagtatgagaataagctgttgtggagtttagctggcacaaaatgaccactggcaacggctgtggtggccagatggaggcctcagcctgccgagcacagtgagaatctgtgacttcattcataaatttcccagagaaacgggatgaggcagggccctgtgtacctccatgtctgcaagtggatacatgctgaagagcaaacatgtaaagcacagaagacacaagcaaaggaagaaagaggacacactgaggtcctgtgactcatctttacaaggcagaatatgagtcattaataggatcccaactttggctttctctctgaatcacccaagattaccttgatgtgcttaactttgtcttctttttctgtctttggtttctttcctgtggcaacaaaaatgtagttttggattaattcacgaagggcctccagagaaacatttccctcaaattaaattctttctgaa

SEQ ID NO: 43617 - DNA, 1898 bp, Homo sapiens
acagagggtgtcttcaaacagaaacacataagacaaggttatacaatgatcagctgacaaaatattgtgaccagtagctcgcaggaacccgatgtccttataagaagagggaagtgtggacacagacacagagaagaatgccgcgtgaagacacagacacagagggaggatgggcacgtgaagccaaaggcagagactgcagtgaggctgctgcagctaaccatgcctggagccaccagaagctggaagaggcaaggaaggattctccccaagacccttgaggcagagcagggccctactgatgccttgatctgagacttctgacctccagaattgtgatggaatacatttctgttgtgtgagagccatctgttacggcagccctgagcaaccaacagagaagggagagctgcaaaggccctgaggcaaggtggcccctgtggacagcagtcagtgacagggagggcccagagacccggctcacccagaagaccatgcctaggattttggtcatgaccacgatctaagactgaagaggaaaccgaaggattttagcaaaagaatgatagggtcagtttggccaacgtaaagggaagagctgagtgtgaaatcctgaaatccagcgcttcgccaacttgaacgtgcacaggaatcccaagtcagtggattccaggcgaccgctgtggtctgcatctctgacaagcccctaggtccttgggtcacactctgagaagcaaagctctagagtccccttattgttcatgctcaatggcctggctctcccatgctcctgccgtgtggtcattttggccattctgatagactcctccactggtcggcgtgccgggcttgtcatccaccggctgggtgcattcctcacttacgcaacatgcctgtctagtaaggatgcagctcagccaaaccgcaaacttattagaaaagttcacaatcttcaatcaggactgttactaattataggtaacttttagaaaaagcaaaaaatcgaacaagtatttcatcagagtaaaaaataaacttaaaaagggctacacttatttcaggttttgtttgcttgggttggttggttggttggtttgtttgtagctaggacatctccaatgagactcaatgaaaagctaacccagtcacatgaaggcccttctcctttgtgacttgatttttctcccctgacccatctcccacgccctgggcaggtagtgcattaccagtgcgcttgcctcgcgacacggtacaaagtttgccatttgacacaggtttctcacgactagccgagggtgagcgtacatctttacttctgtgaaaaacagcaaaggcagaatctacctcaagcctagcaccagaaacggatcatttagttggacactataaacagattaattatgtttccggagattaaaagactgagatgacaggcacagagggtcagaggactgaggactggaaagaaagatgcttactcggtatgtatcgtctagcttccattatcgaaagtcaaggtgacacgctggtctttctgtaaggcaagcctcccacaggcgctaacagtcaggccacgtgaacctcgaacagagttagagaaggcaggtagctcagtggagatgacacagagcggctatgtttgtctaagaaccaaaatgcacagaaatcaggacattgtgtcgcgaccttgactctgccattgctggtgtgtgtccttgggctaatccctccatcttcccggcccacactttgatcatctagaaaaatgggacgttttaaacagatgattcctggggttatccatgatacgatgaatcataatctgatgtttttttttctgtaagcttctcttcttgcacatcaggttgtttttagaagtaaaatgctaaaattttatg

SEQ ID NO: 43618 - DNA, 466 bp, Homo sapiens
acagataagggagaactactgtctagaatatttaatttgtgcaggaatgcacagagcataatgtgaaaaaagtcggggagcaggtggttttaaccatcagggcaatcaaggaccacgcgcaaacttccaggccctgccgtaccatggtggcttccccatgagtccccagctgagtccacgtgctgacacgctgctctcttcccccacagcaccaatgacagtcagagttccccgttcactcacccttacagaactcagagcatgcgccgggctgacaacatgcaccaagagacagttgtttgacctggaactgggcctctggggggcgggggtgtgccccaaccccgggttggcacagaacagaaggtgaacgtgtttcctgaacagcccagtgtcatcacactaagtgccatcctgtgctcactcttaagtcctgagttttccaagactgtcctgatgtcagcag

SEQ ID NO: 43619 - DNA, 4111 bp, Homo sapiens
tggtgcactatttgcctaataaagtgtttcagaaagtgggataaaagtgggaccattgttcataaggctgtcagaacttcatggcacgcatgtgtttgccataatttgcttccagtttgactacagatccttacttttgattatgctgacatttttacaggtaagtaaatctgaaataactggaactttctctaacaaaaaaatgacaactcactgagaatgaaatatgtaaatgtttaattttaacaagcagttacaaatcgtaacagacaagaactcttggatctaagagaccaaaatgtaatttcttacataacagacaaagttacaagttataatcgttcactaattacagtgaaattccggactttgacacatcaatcaatagatgttccaacgttccccctagagatcccagttcaagtcttaaatatttcatctgctgaagtttcctcagaaaaggctccttttcccaggattttttaggtttctacttttgccccttctcccactaaaagaagaataaaggaaagttggggaaatcagagaatcctgaatctgcgtgcgtggtgaagttaaacagagtcaccctctgggcctggtagggataactgcatctgcctagcatcaagactatccaccgcctggtctaaccccagaccccgttgtgcacctgcccttaagcaccaaaaactgaactgctcaaagagaacctgcagtcgatatgaaaactagtaaatgactgcaggcttgacagcagtctcggtgatgcctgaaaatccacaacaggaaatctaactatcctccatacctcctggccattcatcaaaagcagaccgagtcacagccataaggaggccggtggctgaagacgaatgccagcaccacttttcctcatttagaacaactgagttttttccttccataaccaaggacaaggagcaaccggagggaggaggttgaagagggagggggcgggcaatatgtccccaagtttcagacagtagcgggtcagaaacgagcgaaagccacctcgctcttctgagctacctcggccgccagtccccgggatcacatccgcagccgagcgccaagggtccggcctacacagactgacccgggcgtttcacctggtgcccgaccacggctctggcgccctgcccaggctgcccgcctccttcccctcccccgcttcttagggaacaaggaggagagggtggcaaacgcacccagaccgggggccaaggggagacgccggcgcgtgctgggaggggcatgagttacacccgcgacccttggaacttggaacggcttccccagccccggcggacgccggcccccaggccgtgccactgggagcaggcgggcgccgcgattggccgcggccggcttcactcggtgggcgagccctaccggcgaggcggaaaggaagtggcggccgccgcggctttgcaccaaccatgttcggccagcgggcgaatgtcacccggcgcccggagccgggtcggagggcacggggcgggcactcgcgtccccaccccgccgcggcccgcgccccgggaccccgaggggacgccggcccccactgcgccgctcggtccccggaggctccccgcccccacctcgcccgctccgtagccgaggcgggtcaggcccagcgcgcgaggccggccgggggcgcctgcggggacccgggggcgcacggcgctaggccgcggcccgggcggctgacccctcggcacggtgccttcctgggacgcgccgcccgagcccctggcgcgctgggacaagtgcaatgacaaagccccagggcccgaccgggcgctggccggcgggaaggaggacgcggcgtcccttctgagcggcggcggcggcggcccagcccccaggaagcagggcgcgtcggccaggcccggcgcccggcccggctccgagcccgccctcccgccccggccgctggcacccgacgcccgcgacccgaccccgagcccggcaggcaggcgagcccctggaccgccgcggggcgccccagcaagtttcctctggccgtggctggaggcgctcctcccggccggggagcggtgcctgcttatttacgctggaggcagcctggagaggcgccgccgcgggcaccgagaaggacccgctcccctccttcggatccggtggcggcggtggctgcacacacacacacgcgcgcacacacaaacacgcacatacacacaattttgttttaaatgaggcccgactccagctgacctgcacccccacacacaacacctggggcgcagaagcacacacagcaggtctgtgtccatggagccacctctccgcatctgcaaatccaaaagtgaaattaaacctccaccaacctcctcctcctcctccctctctacctcctcctcctcctcctcctcgcagcctcagcagccccagtagcagcagcaacagcagcagaacctgcttcccctaaaatcagatgatccataattgcgccgactgttcctccaaaaatcagtattaatatttatgaaccccggcattttccgtctgcaaaacatcgtgtcaaggcatcaggacacgcatacacacacggccccccacagtccccagaaacatgccctcgagagaaacacacacagtcacaactattatttgaaaaatgttacctctcagtgtgcttttttcacgctaccaatacaattccgcaaggtataagtgttgctagggtatgtgaaatggaaatgaaagcccgtcagttgaataatcgcaggagcaaaactaaaagttactccccggcttgcctgagaacagtccagatcgaaagcaaaacaaggagaggaaactgcgaagagccgcggctggaaatccccccaccccccgccctcctccggccgcgctccctccctcgcctcccctctccgccctcctccctccgcccttcctccccagtgtttgtttcaagcttgtgcaaccgggaggtggaggcggagggagggcgcgagcggcccggccgggaggtgcggaagttcgccgcagcagctcattggcgggcagcgccgctttcatcatttctcggaaaagtcaatttcattttcgcttccccaggtcgcggcggcgggagcaacaagcagcggctcgtgagtccgcggctcgcacccaggggcgcccgcacgtgcggctagaacgtccgagtcggggtccggggcggggggcgcaggcccgcggcggtaggggaggagagcgggcacccgagtctccatcctcagggtggcctgaaggttccaggagggcgtccggcgaaggcacggggctgcgaccatccagttagcagggctggtgtgactgttgagagtaaatgaaaattcgttttgtgacaccgaccacctccaaggaatgaaaggagcagtcagccgaaacgacagcattacttgcgtccttacctaattggaaccttatccgtggctgagggtgccaccattggaggggccgccgccccctctgacaccacctggcgctccgctccatttaggagctagaacgaaaaggaggcccatcccccagtaagtcacagcccacgccaagatgagttctggagcctgtgcgaccgaagtttcttcaccgcagggcgaggtggacaagggtgtgagttactttgacttcaagacgtctcagtggcggctggttctggagagaggctttatgctggagcacttccagcaaagttcggctggggcctccttaactcactggctggtcacccttggcctcggttttcaaccaaagcctaaggcctcagttttcaacgctgtaaatggaaataaatgagagaagaaagtacagcccgtgtgacaagtgcagcaagcaatgcaacttccttgggacctaccctttgtggtcccttgctttaaaagtatagattcacatttagttagacctgtttcttcctcgcatgcaatttcaccagtcttttcccagacttctgtactcaacagaggaagttccttcctgggagaccatagctgtttgtatgtaaagagttgcgaaaaaacaaaagcaaaacaaaaaactccaacacctctctgtcacagaagtattgaattatatagac

SEQ ID NO: 43620 - DNA, 1075 bp, Homo sapiens
tcctaaaattgaaacaaagtttcataaaatgatcattcaaataaaatctgttgagtgctcaggaacatttcccagcactagggatacagcagtgaaccaaatgaatgaaagtgccagccttctaagacgttttcttacagtcttgtaggttgacatgttgatttccactgtggcatcccagtaatggcaccgacatcatctccacctgtaatcacagccttcagaactgtacatgcaacttaggaatgtgtaacatgaaggcatataaatgaaaacctaagtatttatagctatgatttaatcaggagccccaggtctgcaagcagatgctcagttttctccccagaatcactgggaccacttctgtcttggccactggagctcccctccaaggtgctgcaattcaggaggttagaaagtcatggaaaacgagggttccacccttgccagaacagttgccaatacaaaagccacagattaacagtcctgagttgcaaagaacattattgtgaagtccaagttgaataaacacacagccaagttaaattttttgcggcaatagaacagcaatgggattgaaaaaaccatcagtcaaagttcaaaggtcattggcctcaagttgaaaaattcttgagcatgtttgactgttactttatgtaatggttccttccattttacaagaaactaggaagtgggggtcattttgttgcaactattttctgaaaatcatgagtttacattgagtaatacattgctcagttttgggtgatactcattctgccctgttctgaagggaaaacacattctctaaaattgcctggatttctgtgtgtgtctgtgtgtgtgtgtgtgtgtgtgtgtctatgtctgtgtgtgtgtgcatctctgtgtgtttgtgtgtctgtgtgtgtgcgtgtgtgtgtgcgtgcgtgcgtgtgtttttcctttcccaaaggaaggctttcaactttgaaaacttcatgaagtgttttttggcataatttcccaaatggctgtggaatatgtgaaatattccttatttctctatggtgacaaactataaagtagtcctttt

SEQ ID NO: 43621 - DNA, 2206 bp, Homo sapiens
ggaggaccggtaatatcacccttattttacagacaagaaactaagactcaaagagggagactaacctgtaagagataacagaataaatagcagagctgggtgtcaggccaccatcctatccttcttgacaatatactggaaaggaatttgcaatcacttctaactgctcaccttccagccaccattcactcttcaaccatttcaatctgacacaccccctaactcagatgttttgcttttttaggggggtgaggtggggactgtagttttccatgaattacatacattaagggtgtctgtcagtcaagcggcgccttaaggagatgtctcattcccccaggctactgtcttcagaacaaacacattaaccaaaaccagtgaaaagaacatgataagaatcccgggcccaaggattacaaagtacacagctcagaacaatctctaaaggaagcacgcagggtaaaatacccaacagcctcctctacgttcctctaaatttcccactgaaatcccttaaagagaaaacattcaccactacaataatatccaagattgtcagcctatcccacagtctgggagggattcctacaactccaaggacgatgtgaccaaggacaacagccagcaggaaccacctgtgctgggcccccgcagcgaggggcaaacacctctctcccggttcagagaagcaagatctgtgcccaacaaaaaactagacagccgtctctctctgtggtgcctgctgcttttttgtgaaagaaaaacataagctgttcccaataccttcccaagcagccgacaaacgagggctcttccgccttaaactttccccataccgggcggagccccaagccacaggaaacctccagcaggaagtcgggctgccagggcggtggcgggcgcggtgcatcctgggagttgtagtccgttctcggaggcgcaggcgcagtggtgaaggcggggagctgggggcagcaccgcagaggattgtactttttcctgaatgatacagtcctccttccacatccttggggaattggttccaggacctgtgctgataccaaatccggaatgctcaagtccctgatataaaatggcgtaatatttgcatatcgcctacgcacatcctccgtgtactttaaatcttctctggattatttctaatacctaatgcaatgtaaataattgttatactgtgttgtttagggaataatggtaaggaaaagtctgtacgtgttcagtacagatgcaatttattaaaggatattttcgattcctggttgattgaatccatcggtggggaacactgtggataccgagggccaaatgtatgagggtgtcgaaaaaaagtcagggggtgccgttaggagacctcgtttcacagagggagggtgatctgatgaatgtcggccgcacaggaagacttggcttggaaacgggtgtcggcctccgtccagtctcagatctgaaatggactgagatagcccccaagtggacagagtggggtgaagaataacccacacgatctacaaacgggactgtggaactgtgacaaaacgtcgtagaatcaaggaaggcgagccgacgcagactcagagaaagaacaaacctcagagtcatctaccttataaatagaactttttaaaaaatttttggcttcttcaaaaactatccccccaaaaaaaacaacaacaaaaagcaccaacgcatattatatattaggacttgtaggcaaatgaacgtatggcacagtctggactcatatacatcaaaatgttaaaattagtcttctttggatgagagtgttgcattttataaaacttatgtgtattttcctcattgtttacaaagatgaaataattttttggtttgaaataagtataaagaaaaacacatagagcaatttttaaacaccttggtatctacgacaaagttttatcatatttacttcagatccttcctctcttccttccttccttcctccctgtttctttctagaaaagaaaagaaaaccaaaaaaattatggccgtgcacgattgctcatacctgtaatcccagcactttgggaggccgagccgggcggatcacaaggtcaagagttcaagaccatcctggccaacatggtgaaaccccgtctctactaaaaatacaaaaattacctgggcgtggtggcacgcacctgtagtcccagctactcgggagaat

SEQ ID NO: 43622 - DNA, 1613 bp, Homo sapiens
tgacgaaactccatctctactaaaaatacaaaaattagccaaggatggtggcgcaggcctgtaatcccagcttcttagaaggccgaggcccaagaattgcttgaacctgggaggtggaggttgcagtgagcggacatcatgccactgcactccagcctgggtgagagagcaagactctgtctcaaaaaaaaaaaaaaaaaagaaaaagaaaaaattactgctgctatggtgactttgcctttgaaagttcagcaaacacttgtgaaatgtgcactatggaaatgggtcgtgtgctgagtgccaaaaaattcaactcccaaccagtgcagctcacacctcgtgggtgaggcaacactgcagggggccctgagaaccctcctatgcatgggttgattttcccagccagtggatacttagaagacaagtattatcttgttcacattttatttttaaaggggtcgtctccacacaaatgccacggatcacaaaaaatgaacagggcgtggtctctgcctttgggagcacgtcatccactaatatatattctgattatcataatgatgctatttcgtaaattaggaatgatttttcaaatttaacaagaggaaaccgaggcacaaagaggttaaataattttattatttccagcgtaactaaataatctcccaataacatactaagtctcagttctactaacttaagtctagttttcctttctcccgctgaactattcaatgtcttacctcatggtatcttttttacccaagaaatcaaagcactttgaccacattacccaatctgtttttctgtgcctagttaaattttatcttttctcagttcgagtgtttcaaaactaattttgcaccgagacatttactttagtgtgttttataacagagtgaactctgctaaaaagatttccatttaatggactctcccagttgacctattctacccataacctcaataatatatctgactagtgccactggcgcatggaggcttttctccaatatgccaacttcctttttcttccatcagttgagatgttagttttccagagttagttgttgtcttaaaacccactggcaccatttgtacttactgttaacatgtaatttaattaagctgtatgcaagacaaggaactatgagttcaaaacaagagacttgctgtttcaatgataatcattgagtgctttgaggaaaggcaagaaagctaagtggctgagaaatgctgtttaattagactatacaaagaatgcttttcaaatacattaaagttttcaatccactttaaagaaacagacactggaaaattggagatgatacatatgggggtgatttatgcaagaaagacttcatagggccaggtgtggtggctcacgcgtgtaatccagcactttgagaagccgaagtgggcggatcacctgaggccaggagtccgagatcagcctggccaacatggtgaaactccatctctgctaaaaataccaaaaaaaaattagctggacacacacacacaaaaattagctgggtgtcgtggcacatgcctgtaatcccagctactcgggaagctgaggcaggagaatcacttgaacccgggaggcagag

SEQ ID NO: 43623 - DNA, 1083 bp, Homo sapiens
ccacgctcagccaatgaacctctcgtttccatccaccaaataggtattgggctttgaagtcagtcagacctgggttcaaattctagctctgccacttacagtctatgtagcttgggacaaactgcttaaactctaaagcctcagtttccccatctgtgtaaaggtgttaagaagacttaactcaaagggcaattatgaggattgacagcgttgacacaatacctggcatatgatgaacactcaatagacagtaatcaagctatgctggccactccctatgtggagttttgaatcaggaggctgagtgcagagtgcagagtcctcttggccaggtccgactgcggagacggcagaggagtgaaggaggtgctgtgtaccccaggtcccagctgtgtgcaccttgaactgggggaacccccgcctcctttctgtctggcatgaactctgcttcctcccaaggagtttgaggcctgaattcacccatggtttattcacccctgacccaagcaaacgttcagtgttgagaggaagcaacaaatgtgaaagatcaaggcagaacacagagcatttctgaggaagtctgtcgcgcccactgttttgacaggctctggaagcccagctttgcctagcccagggcaagtacagtactctaggaagtagtactcgggtggggctgttggtagccgggggtggtcatctgattaccagggaaatgcagagtttattttatctaattaccagggaactgcctgagagatttcatctgtcataattctaaacaatgctgaggagactttatctttacagtttccagtgtaaaggccagaggatgctggttgttgagagtggtgagggggacataagcgtacattattcagttttgtctgattttgtatacacttgaaaatccccttaataaaaagcagcaccaaagccaggagcaatggtgtgcacctgtggtcccagctactcgggagtctgagtggggaggatggcttgagcccaggaattccagaccagcctgggcaacatagtgagacccacctctaaaaaaccagcaacaaacaaaaaacagaaaaacca

SEQ ID NO: 43624 - DNA, 2640 bp, Homo sapiens
tctactttttctagatagggcataaaagtaaaaatacaatggatgggcattcactgtgttatgccaggccccgcatttggggcaagacactaaggataccaagataaaccaagtccgtccctcctggagtttgcttgcaaatctagcagggaagatagtaaacaagcaactgcaaaggatatgacacatctctcttagggaatgctggctgcagaaagaacacagcataggaagatttaaccttaaactgtttaatgaaaacagaaatttaagtagcagctcttctaatcaaatgtgatggcgggagaaagggagtgcagaggtgttgcaggcagacactaggtatgaaggtcagcattgccgtgcagaaatcgaaccggtgctaaagataaggaggggtgggggcactcaggacccaacacacgcaggggtttgttagccatattaagtgctgggtttaacctaagggcaaaggacgagctttctagactttcatttcataaagatccctctgcctgtgctgtaaaaagtggactgcaaaggagcaggcgggtctggaagtggagagaccagggaagaggctgctgtggtcagacggctgaaatcagagatagagagacgcggacagatctggcagacatttacaaggtcgacaaggcttggcgactaagcaggaaaagaagtgggtgggcgagagggggctgcgaacgatgttttccggtttcctgcttgggtgccacttactgagaatgggggaagaggcaggtgcagggcacacccaccgaaaaccagagcgccgagtgtgagcagggctcgctaactcctcacggcctgggatttcaaggcgacgccaaccagctgtggccacggatacacagccacaggtatgagctgcgagcactcacgaaactctgcagggccgaaaaggaattggagtttaaaccctgcaactatctctctggaagagctaaaccacattgtcaacccgggataatccaggccccaggcatggaaggcagcagagacggaagcctcgtccaaaattggaaggatcagcccccagggcgagtatctcacagtcagcacccggccgccccagccctcgcagcaccgcttcccggggccactcctccgccggcggtagcgccgtccgtttcccagcttgccgctgccttccgccgcctgacccggccttccggcactcggccggccgccaggtctcccgccctcggagctcggtgccccgtgcccgacctcccggccccgggctcggttcccctggccaggcctcccgctgcctggcctccccggcccggcctcgcgctgcccggcctccccggtcccagcccagcctcccgcccccgggccaggtctcccctccgatgacctgaggcctttccttaggttacccccaggtccctctccctaaatcaaaagccttaacccgctgcctggcttccccggccccggcccaggctcccgcctccgggccaagtctctcgctccgcgggcttcactgctcgcccccgcccgggcgaggtggcaaaacaaacactccgccttccagaccgggcaggtacccgggcgggcgcagggcctgggagaacgcagggagcgggggcagggctgacggcccggagcgagggcggcagtcaccgcacagcctcctcataccttctacaaccgcctcacaatagcacccatccgctaggagccgcgtctgcactgcttccgcggcccgccgccgggagatgtgctccagcgccagccccgcctcccgcccgcccctgtcggcccctcgcgccgcctccgctgcggcccgtcccctagctcccgcccgcccgagaacccagccccaggctgggccccaggaggcgcccgcccaccgcagcgcgccccgcccccgcgccccgcgtcctcacgccctggtcccgccctcgcgtcccgcgccagtcctcccgctttggtcccgccctgaggctcggcccggctcccccgccccggatttgaaatctaggtcttcctgagagtccgcgggcttccgctcccagcgcgggattctggagggaaattgagggagacttggaaaccgcgccaggcccaacgggtacctagaagggagacaaagccaggcctgctgcccagtttgagctctgggaagaagaggagcaggccgggacgcccaccggtaatttctgtctcctctgcgatgacctgaggcctttctttgggttaccctcaggtctctctccctaaatcaaaagccttaacctcctgtcatcagggtgccaggctagaaataaccaggtccacgcatgctgtgttttccaccatgtcaggctgctgtggacgctctttcgatcacaaaagccacgagctgcgtggagttcccaaggaggcagttctcagcacttgctggtcactgggtagtcagagcctgacacacaggctcaagccgctcacgcatcatagtagtgtacttaatccacatataaatgttacaagttaagcatcccacaacaaagtagcatttaacatcatgaggaaaaagagatggggcaaagagattaacgaaccaatccagagggagtgaagaagaggaaaagaagcctggtttgggccgagaggtccttctgcaaa

SEQ ID NO: 43625 - DNA, 791 bp, Homo sapiens
gtctcaaaaaaaataatggcaatgtgtttcttcatgttttcaagatgttcccttagctttggacctgtctttctgttctagacacatcaacctattcaggacatctttggcatttgcatctctaatcctagatactgggatggccatccatgtccagatagtggtttctgctccaacatgatttatttcagtttcctggaaagtgcatgagaggcctttccatttcaagccttatctgcaatctcatttctggatttctgacctttgcttcggccttgctttggggcttcggtcccaggtcgtatcaaagatggcttgtttattgttccaggcagagcttcagggttgggataattctagatgtacgagtctgaaagtgaaaccagattatttatctcaggcctgggcccaggtgtaaaacaaagtcagtccaaaggagaaacacatagttagaatgggaacaccatatgaaggtctgaataaaagccaaatcctgagtgcttatcaaagcaggggtgggacaagagtccaaacagcagatgattgactgaagctcaggtaacaggtaattcagttcagagctgctagcgtcttagagtttcacggccacctagagtaaaaggcgtggacatggtcactaaagcactggcatgaaagccaggaacctgatttctggattaggggaaggtggccacagagacccagcatgctgttttcacaaggctctcgtcacctgcctgtttcctggtagctcagctggacgttccttctcagtctctctccctcatcct

SEQ ID NO: 43626 - DNA, 1238 bp, Homo sapiens
ttggtaaacaaaaaccgctcgagccatcctggagaaccgcaagcggcagctcggtcccccagccggatttatgctccagtttacggtctgtggtttgcagtaagaaaacaccagggtcttcaaaataagaaaactgattcccagtcagagaataaaactccactaacaaagtctggcaaaccgcaggcaatacgtatttgctgaatattttgctttcaagctagcactttgagactcactactttggacggcactccccctccccacaaaacgacacgacactggctgacgtctctcccacccgccaggcagtgttaggccccgacaggcccgtgcaggtgggatcactgttatccccactagactgaggaggaagccggggacccgggcgattggccactcgggcgacctccacagtggagcaccaacagcgccgggaggcgcaaaccacggcaggcgaggaagcagttcaagctggtctccggccccgcgctcccgagggtcggcagtacttacccctcagacctgtgaggccgcggccgccgccgcccccgcggggccatggtgccgctctccgctctcgagcgactggaagctcccgccaagcccctcgccgctccgaacagccaatccgggccgagcacgcgcgcgtgcgcaggacttcctgagcggcccccgggctcctccctggcctggagcgtgagggaaaactgggtctggttattacagcgcaacggagctggagtccatgccgcacaaccagttacctacggtccaaaacatgccaaagttttccgggctttcgcgcccacccgcatcgccagttttccggcgccagaaagcccgggagccacgtgggacggccccttgtggggtggggaaaggggaggagctagtgtccctgagtcgtgggcaggtaagagggtgggtggagacccgtgttcgcagctgttgtcgctgaggccgcagtcgtctttccaggcctacaggatttggcttccagcccctgctgcctttatcagctgtctgagcttagcatgttactttaccgctatcccaataccttcatttgtaaatggacagggttccttttgttcttttattttgtttgtgtttaaaaatgtgtaatgcagaagaatgtaattgaacccttaccttacaccgcgtataaaaattaacgcaaaatgaatcaaagacctaactataaaggctaaaattaaaactcttagaagaaaaca

SEQ ID NO: 43627 - DNA, 2189 bp, Homo sapiens
gggctcgagaaccacccaccctggcctcccaaagtgctgggatgacaggtgtccgccaccgcgcctggcctcattagcttgattttaagtgagaatattatttggtatcttacaggattctcatgaagataagagaagaatgtagaggcccctcgatacacagaaggggtgccatttcttattggactcaagcttttctccagggagcttttctgttgaattttcttttcagcactgggtccaccagggggcagatgaagaaagggcctggagattcgacgatgtcattggagcacagagcgcctcactttcagacgttgtaaatactgcttcaaagtcagttcaagaagatgaataaggctagacattttagttgcccttgcttaacccttttcctctttcacataaatgatattcttccacaatttatccagtccattcctgtcaatttcccataaggcagagtatgattctctatgacggagaggaaaagaactgatgtctcaaattttcccactttcttatataacttcctacagcagttactaattactgagtacacaggaatatctcactcaacttggcagtttaatgaagttatctgttttaagcagacccgttgttcaacctctgtaactataacactacaaaacagacttaacacatcccaggagggcaggcatgggggagcagaggaggatcatttcttttggatgttccctttaagaaaaagaggaaataaaatccagaaaggaagtactcctcgccttttacagttagagggcagaaagattttttgtagcaaacaacgacattagatctcttcttatgtcacatgcttttcaacatttcctgggtgctgttacccggctgctaaacttatttgctgtgtaactaatgttgttttagtttttccagacctaactggcactgctcctacccaagctgcaatcacatggctaaacaggtctggtcagtacatcatgaccatgcaatgtctcatgcttcagattccattctcagctccccaaagggtcaggagagtctggtgctgggatcctggcaggagcatgctagcaaaattcaggatttctttagccaaggaatggcagacttccaacctgcataagcagtaattttataactgaaacagatgtaaaaaaccgagtgcataacctgagaaagagaaaatggaaggacatcccagagaaaaggtgtttttttttttaaggaaataaggacagaaaaataagaagtaaaatgtctacagcagagtcttgtgtctgtaactctccctcaagctgtggttggaaaagaactttcttaaaaaggttttcacagctctgtaatgaacttgctcactctgacagcacttttggttgacctgagaatacacacagctgtgaggctgaccttgtttggccagtgtcctgacctcaggagcccttactgctcaggcaggaatggactcagcagatggcacctggcagaggcacctcccaggtgacgcagcaactttcttcatagaacctgctgtagaacgaaacctctggctgctgccctgcaccttataggccagctctctcaccccttatcactgagcataaagatcattctcacccaggccacaaacatgctctttgtttccagggcttagagaatcagggaaggcttctaagcaaagtgccatctccaatcctgtaggagcagccaggccagggtgagagtgctctggggagggaggccagcctgtccaaaggctttgcagtgagcaaaagcaggatgcactttgggagctggaataactgaggcatggctggaacagagttggggaagtgtcaagaaatgaggccagggaggcaagcaggggcccttcagttccctactcctcaaagtgtagcacaaagaccggcagcactggtgttcccaggaagcttgttagaaatgcagaattgcagatttagtgaatcagaatcttcatgttaagatccccaggtggctgggcaaggtggctcatgcctgtaaccctagcactttagggggctgaggctggagactcacttgagctcaggagtttgagaccagcctgggcaacgtggtgagaaacaaaaaaaccaacaaattagccaggtttggtggtgcacgcctgtggacccagctacttgggaggctgaggcaggagaatcctt

SEQ ID NO: 43628 - DNA, 795 bp, Homo sapiens
tttctaacaccttcagaaagagaaggactgactctgttttcctatgacttgttatgatatgtatatgaaaagatcttcctccggccatgttccttggatggaactctaatccaagtccaactgacggggatcaacttcttatatcatctgacatcaagcacccaagctgagcatggaccaccacgctcattctcctggaatggctgcctttaaacttgtgattggtatgactcttaagagtcaatatgaaaacaaaccaaatcaaacatgcatgttggaaattcaccaagactctccacgagccatccagggaaaagaacgatgaggctgatttctatacttggcttggcattagagacaaattagtaagtaaaaggcattaaagcccaaaggagacacagaaactgaaagttccacctgcctgaagctgtaattcccatttctggcatttccgggcacagcttgtcagtgctctggaataaatattggagtgctgaaagcacttgggtaaggtgtgaggtgttaacactgggcacacatgtagaatcctttttccagcaatgagacagaagtttctgctctctttcatgggttgcggaggcaaccggccagcgctgggactgcaccatagcactagatagcactggatagcacgtgtgagccaacacggccccagggaaagccttcagagaagggaaggaggcagggcactcacctccatcgccttcatgctggtgacttccaccccacacctctggcctcgttccaccagttcactgccgtaggcatccatga

SEQ ID NO: 43629 - DNA, 3427 bp, Homo sapiens
gaagtgaatgatatccccaataaagcaacatcttgacatgtaacctggggcaagatatttattattaccctaattagcaattagaataatgagaaaagcttgaaaatgaagcagtaaatgagacatctgtcaaaaggagacactaattgaaggctcgatgatacgggataaaaggtcacactgtcactcagttgtcagacataactgtaatttcaagaaagggggttgaataagaaggggaagggcacaaaacattaggatctgtgcttcaaaatctgtggctctatgaaaagaccacacattctaataatgaattatttttttttcccgaaacaggggcaggctctgtcgcccaggctagagttcagtggcattatcagagctcactgccgtctcaaccgtctgactgagctcaagcaatcctcgcacttagcctcctgagtagctgaaaccacagacacgtgccaccttgcttggctaatctgtttattatttgtagaggcaaggtctcactatgttgcccaggctggtctcaaactcctgggctcaagggatccttccgcctaggcctcccaaagtattgggatgacaggtgtgagccactgcgcctggcccagtgttgctattttttgaacagaaatgctatatttaaaaaagggtgttagcaaccttagttatatctacacaagcaaggggttgcaagctgagtgctgggaagcaaagctgtaacaattggagtctgaaatgcttgtaggttttacaagacagaatcacttcaaaagctggggacttaaatactatattaggtaagtccacgtagctatttctagggacgcctatttaaatgaaaaatagcttaaatttggcccttacggccttctgacataacctactgatcagcaggcagtgtgtgtgggtcgcttgggctcaagaaacagggcaagcaaagcagacaaccccagctgaatgtgtaggaaatcagtcatgagccagtgagtcagcaggctttaggagtcttttattcctcctgctatagacctctttaatgtggttacatagtgttcccagttaaaaaaaaaaaaaaaaaagatagtgagtcaaacccactacagtgaaatcggtggtcatgagtatattccgcaacatctctacaagctcaggttcctcctgaggtcagtctccccacaagggctgaattaggaaacaagttcaagtcccccttgggggcaggaagggcaggaaaaccgtgaacatctgcatatcaaaggtttccgaggccagaactctcaccaatatttgactaacaggaacgcgatggccagttattttgtgccactctcctatttaagtgcaaaagcaaatgatgccgttgaggatttcttaggggtagagaagcccaagctttaccactcatagactcattcatctccatctccaaatgggcatctgccagccatagcagttaaatgccccttgtgttgctactgtttatgcaggagagggatagggaggtggacgcagggcgaaagtgagaagggagagtgagagagaggagggcaaggagtagaagggggagaggcagagccaagtaacttctaaagagactgccaaagacgtggctgggttctaatgcgggatccatctctagggtgcaaaggagcatgtagaaccacagtccgggggtaaaaatgattcctttttgttccttctaatacctaacatgtggtctatacagctgttccccttcaggatacccaaatccagatgctcaagtccctgatataaaatggcatagtatttgcatataacctatgcacatctttctgtatactctaaatggtctctatattactcacaatacctaatatgatgtaaataagtagctgttataccgtattgttcagggaataatgacaaggaaaaaatgtctggcaatgttcaatagacaataccatccatttatttccatggaatatttttaatccacggatacagagcgccaaccgcgtccttctcagcatttacattttacacgcatcttagcctgctcagaactccatcatgtgcttctttttgtaaagacacaaaactacttttccatccagtgacctttcagagaggaactctggccatcaattctcatatctagcagactacatctttgatatattacactaggtcttttaaaggccagcccctgggcaactccccctccacaataatttctaaatgacaatggacagatatttttaaaattcccagattccccccaatacagtgaactgtaaatgtcacaaggtaacaatgaggcctcacgctcactattcgtactcactactgaactagctgacttcccaagatcctttcctcccagctgagcacagaagggcagaactatcctgacactggcatgcaggaaagatgggaggtgagtgaatgtgtatggagcctgctaaaggccagcccctctccagatgaggaagctcagacttgggggggctgcttcccttctcagtcccatgtccaccacatagtggagcagagcttcgaacctagctcaatgagacatccaggtacgtcaaggtttgcttggcggttcacaggcaggtcccaaacatgcccacacctccttcgtctgtgtgtggagacatccttcatccttgaggaggcggggtccaggtcacctgtgcctggctgggttttctgatttttcaacacttgctcctaaccctcagaaccttttttcttttcattcctagtccatctccagtttccaacttcccggctccccactatcccagaggatttgctgaagagggacgggggtaggggtaggaggctgacacggtacttcgcaaaacatctcatcaccagaaaaaaaatcagctgaccacaaacccgcctcaatgaaagggaagaaaatttgaagtcacaatgtccaaattcctacaaatacacattgttccagaaaataggactgcccgtagaaatttacatgccaaccatttgaatatacaaggcatctgcttcacttctgcctagttcaaagggagccacattcccatctactacctttggtcagcttttggacaatgggtgctgaaggtgttttgtcaagaaacacagcctacgctggtcatttttcatttggcaccagttggttccatctggctatttttaaacataagtaaatattacagcacgcatttccgtcctttatgcgtttctgtcatcaaacacgttctctgtttaatgaagcctgtgagaagcgacatcatttgtacaaaatcaaattgtgttttcagacctgctttatcatattccctacgtatctgtagtgacctttagctttttcttcctgggtaaagagagcccggaaatagttttttaaatataacaatcaacctctttctttctttaaattcct

SEQ ID NO: 43630 - DNA, 2935 bp, Homo sapiens
ttttaaatttaaacttttaacttcttttttaaaaaggcaaagcaagctcagtatctatttctaagccccacaaattctgaaaatcagagctaaatcaatgtctataaacagagaaaaatcaggaagcctctatactgggcagtaaaattatagattttcatttcttgctgcatatctcaagttttaaactgttctagagagaacatatgtaattattttaacaaggcacaatgcctttatgctaagctaaagctttaaaaccacacgtaagtgcccccacaatttctcatataataggaattactcatttcttacagttactgctaagttatacatgtcttaacactgcacttgccaacaactcttcatggagatggcagcgctgccgtgacacatcaggtgctctgccagtagagaaggaatgccagaacctcacaggaatcccttaggaaaagggagattccactcattccccagcctatgtgattagctgaggtgaaatattaaggtaccctgaccttctaaatagaaatcaagtagaaagttaacttttctcagctgtagttcagtcattctatatttatattttggcatgaattagactgaagaatcttttatatattttaagagtttcacattaatgaatccaagaacttgtctaaaataaaacaaagacctagaatcccataaataacaaaaatgctgactccagccagggctttatgtggaagggcacacactccctctgcggcagtcagcccgggggggtgggggaggccttccatctcttacatctggaagcagtaaatggggggatcttgtgtttcacaatgttcttctgcatatctgctgaatgcgggaaacactgaagggtgactgacttgggtaggggaaagcaagcgaccacagagaaaaccaaagaacaggtgaggagtggaagcaccagtgagcatgcggcctcttcatcttctccacaccctgcctttctcactagggaaggcagggagagcaggagcactaagaatcttcctgaaaggatcctaaggtttccttacgccatccctcctattaagccctaattgcccgcattccagtttcattttcctaacatgagagcacagcctccagtttgcccaagtcacacacaaccacggcgctcagcagcccagccagacgcgcctcttgagggttgtttcttcatgtcctgccccgaattctgcagccgtgttcttccgtcaagttcttactccagccctattctatttgaaatcccaaagtcccttccaacaggctagggatatgttctaagcgtcagatgtaccacgagtgcattcttttggtaacatttgtttgaaaactctcattcctgccagaatctaatccctgtgagaacaggggttctgtgctatatttttccttatggaatcctccaggctgaccacagtgcctaccacagcgtagaaactcaatgtcatttctagaatgatcttccatgtgacgagaggtagacacccaaccgacaccctctcatctgtccctgtgcctatattttgccctgtacctctatttaccaccatcagtaatttggcacatttccatttacaaagtgcagttataaacaaatatttgatcttgatggctatcacattcaacagggctcagctcatctggggaaatgcggagaaaacgcacgaggcaggctgggccctccactcaccgccacttccactgactgcatggagaggtcgcatggcggcttcaggggtttgggtctcgtggcgtaccagaaggtggtgagtgctgcaaaagctccgaagcccataagcgtgttggtcggaagagtacgcacgtactgtcggaagtcaaccagctctggcattcgaaaataccggaacagctcatgggcttgcattgtcctgtgttgatagttctctaagctgaattctgttgggagagaaaaatgtcacgttcgttccagggaagcaggacccctctccagaactccaaaattccaccggccagccatctaattgggtagctgctcggccagtccaggcattaaacccacaatctaatgatccggggcttttcctggctgtcaagtgtcatttttctaaaaacactttaggatttcattttcattctatttctccattaccttgtattgaaaaaaccccattctcttcctttcattaaccatattaaaaagattttactcaagaagaattcttcccataaaaactcaaataagtagatttaagtttctattttcttctttgctactacgtctctgctctcgtccatccacctaatcaaaaacactcgactctcattgtcaaggctaatgggaatatgagtgaaggggaagtacaagcccaaaccacctaagggccatcagtttctatttcttccaacagatctcagaacaagttcccaaactggttaaacacaccaatgtaaatttcaccttctgtactcctcacacgacaacagtggcaatataaatgctgggaaacccatagttggctatctggtaagatgagtttcttttacactccccaagacattatagccaaaagaaacaaacagataaattggtgtgcataaactttaaaccaaccaccagatatctaaagagggaatacagcacagtgttggaaagaaagtacagaatagtatttgagatcctagatgcagccggacgcggtggctcatgcctgtaatcccagcactttgggaagccgaggcgggtggatcacctgaggtcaagagtttgagatcagcctggctaacacggtgaaactccatctcttcaaaaaatacaaaaattagccaggtgtggtggtggacacctgtaatcccagctactcaggagggtgaggcaggagaatcgcctgaatccaggaggcagagggttgcagtgagccgggatcgt

SEQ ID NO: 43631 - DNA, 1489 bp, Homo sapiens
tggtcatcagagaaatgcattgtggttttgatttgcatctctttttctttgttaaaatacagaaattttctgctaaaatttaaatttaaatgaaattaattttaaatttaatggtctctgttttacaggccattaatactaccagaaccaacataatgtatttgctctgctcattcaatctctgctacaatgaatccatgtaagtgtactcactcacacacacacacacaaacacacacacgaaatttcaaggtttaccatgacagcaaagaaagaacagataagcagatttcttcaggccatggttctggaaagaaggcaccagcacttaacaaaaccactcaccatctgtgccaccaacagctgactactaggtgacaccccactgcagacacagaagagggcaatgagcctggaagtgggcgggggttagcagggctcagctgcgctcccccagcctaccaaggtctctcagggcacaagtcacatgccgagccccacgctgctgcccactgggctaaaggtaactagcagacaaaatccacacttgacttctcaggagagcagagggtggaggataggccaatgggcagccagcagcaaagtcaccccactgctccacccatgggcagggacaggcatcagtgagtgttgctgccaggaccggttctgaaaacagacactgttttctttctgctcagcttcccaataagagacaacgggcatatattttttaaaccactgaaatgaaggataggatgccgggtggtatgtctaaccaaggtaaggcataccaagaaagaaacagattgcccagagcatgctgacagcagatttattctagacgaatacataggaattgagctactcccgtcactgcatatctgagcacctagtgtgagccaggctttggccaggcgctgggaagacagtgttgatgacctggtctaggctttcagtgggctaaccttctagcagggaagataaaaatcaaacaagcaaggtctgcaaggcacgggggaaggcctttctgaggaagggatgtacaccaggcgggataagcagacaaatcaagtccatgtcctattgacactgagtgttcagatttcagaaacagtattgcaactccacaacctcaaagcagccttgggaatataatgtgcaaacttgccttgccctcaaatccttccacctctagttgtcttcatcaccctgcagcactccaggcctgaataggaagtactcaccccgacacacactgccatgcctttctctcttctctccccaaagctcctagagtaactcccataaaacctagattgtgtgaatttgcaggtgctgttcaacaggatcacatccctgagtgagaatcttaaataattcctctgtaaacaaatacagtcagacacaggggattaatttgtctattttaagcatcagcagtagccatgctatagactgctttacaccaagaaagtttattaaatct

SEQ ID NO: 43632 - DNA, 942 bp, Homo sapiens
agtcaagaacgggacaccaaccaatgtgactctaaatccaacctatgctaataattcttaactatgctaagccactgaccctctcccctgagaacacacataactatcacaagtctcctttagcccaacccaggttaggaaccatgaggtcaggtttctaaagtccttccagtactcacactcccaggtattatgacagctccctcctgaggtccacctaaatgctcaatgtcttacaaaaacgttagcatttattgtatcaccctggcctctgaacacgtggtgagttcaaggcccactatacacaaaggttcacctcttcaccattttatttgtaccatgaaaatagtggctcagggccagaggtgactcacaaggacatcattctcttgaagatacacatacacaaacatacacacacacacacacacactgcccctgcaactctgcaaacttttacttacattaacattgtattctcttcatgtcatttagaaaccaaaaaccgggtggtctggatgtttctctccttctaaagttcctcaagctttcatcaagatgaataatggcagtttgatggaatacttcactaggaatgcagccctcaaacaaacccacataaatgacacccttgcccctgcagtggcaaattaagaaagcctgacatctttccttaacgcagcaacccaagctggcaagatgctgccattccgtgccccgcctcctccccttgtacaataggctatttacagaggctgaaagcgccccctttgtcattcactagctgggcagagctcaggcttcagggaggaacaagagagcagcagccaggccatttgctgctctttcaaagcaccactccaaacctgttggattcgtgctccttaaccctggcttggcaaattccctaaagttagatttgcttaagccattcccttttga

SEQ ID NO: 43633 - DNA, 2817 bp, Homo sapiens
aacattatccaacctttaaaaagaaggaaatttggatacatgccatgacatggatgaagcaaaggacaaatactacatgatctcacttctaggaggtacctagaatcagcaaattcacagagacagaaagcagcagagaggttactgggggctgggcagggggaggaggaatgagcgttattgctgaacgggcacagagtttcaattcgggatgacgaaacattctggaactagatggtggtaatggttatacaaccctatgaatgtacttcaaaccactgtgtaactgtatacttaaaaatgattagcatgacaaattttatgttatatatattttaccacaataaaaaaagtttaattatttttaaaaattgcttaagtggatacaaatggacaaaagagaagtaattttgagcctgagaatgaatggcaaaacactgaagagacactgggaggaggagacaggagggtgatttgtgagcaaccggcccaaccttccagggtcctcagggccctccttcatgtgggaggaggcggcggttccacaactacccagaaatcctacacaatcccctctatgagaagcaatcagtccttcctctgaactccaggacttctttatttgtaacccctgtgtggtacttagcacctcctgtcttacacttacagcgaatggtacttagtacctatgtagatgcttcttcctctccccggccagggtctcctcccatctgtctttatatgcccttggttcttaacacagtcccgagccaaggacaggtgcttaacaaacatctactgagtcatgaatgaccctctgtgattctgaccgtgtcagaccctctgtgattctgactgtgtctctgcagcaagtcccttgaggatatattcatagaacagtgattctccaaaaagaaagggggtattaagcattttccaacttcagtagtctccttctacccgccaccagactcctacaccgcacaccagaaaggagtagagaacatctcctggctgactgggggaaaaagaaaagggtgcgagccactgatgtaaaggggacataaaaatattctcttgctcttattttgatcatgttttatatttctcaaattgtttcacttatgtagaatgtcagcccaagactgccatcaactctaagggctactgtctttagaagacgctgagatacagtgagatttggacagacgactgatgattcatttaaaacaaatcaaggctgccccgggggaagggaagagatcaaataagtacttttcttaagtaaaacagcaaatatcagaaaggcttgagcccagagccccataccagggctggactccaacttctgtgagttttctatgacagaaaagagaatcttccaaaccagggaaacagacaagactcaagcacaagatccagagtcccacgcgagggctctagtgaggagaatgctcccagaaacacagagctagtgggcggccacctgagatgtacggaatgctgacaacaggatatgcccaacattctccagagcaaacaaaacaaaacaaaacaaaacatatagctctcctcccttctctcttcacacacagctgcaaagatctgtcatgtacatccacttgagaaaatgatgattatagttaggacatgccccatgacgatatccaggtcatgtacagcctttgcgtgggacagcagggctaaattttggcggtacatatttaagagggcaagtttccattcaaaaaatttcctatgagaagaaagatgattccacttgtcttccaatactgattgaataaggctaagcaactgttgtagatatgtcacaatgaggcagataagtttactgataagagctagagaaggcagccaacttgggcagatagcctccgtcaacagctttgtggcagcggatggagacaaaaagatccgctttttaggctgacgcaatccttctgcaaagagcaagacagaaaaggcttgtgtagactaaacttctcactcatgaactggatcaatacggcatgttatttcagctgatgttcagcacaggaagagtcggaattgtgtctctatgaccgcaagttgaagaacatgacagcatgttctaagggtattaggcaagacaagcacggcctgttattacgaaagctaaagaaggaaataaaaggctttttgccactgaaataatccagaagactcttcaccttactggactcagctaaccacaaagtaagccctgaagcaagagaccacaccaggagaagagagcacaactgaacagcagagaggatcaaatgtcctttcacagtagccagagctggccccaagctatgcaggcactttcctcctccgagggccatggatggagaggaagctccacttgtttgagaaactgcacgcagagaaggtacctagatcctggggtcctctcaggtgctctgcccaaagtcaggatcttcccatcttcccgtggtgactatggaaataaacagaatatgaacatgtaaggctgggcacagtggctcacgcctgtaatcccagcacttagagaggccgaggcgggtggatcacgaggtcaggagatcaagaccatcctggctcacacggtgaaaccccgtctctactaaaaatacaaaaaaattagccatgcatggtggtgggctcctgtagtcccagctactcgggaggctgaggcaggagaatggcatgaacccgggaggcggagcttgcagtgagccaagatcgtgccactgctctccagcctgggcgacagagcgagactccgcctcaaaaaaaaaaaaaaaaaaa

SEQ ID NO: 43634 - DNA, 1939 bp, Homo sapiens
cagggaacagtgatatatgaagaaaagagtcaatgttaaaaccttcaattctatgtggcgagtctatgggtgtttttactactatgttgttgttctttgtatgttgctgtatttttcccaattttttactatggaaaaattaatataaaacttgccatcctaactattagctgtatttttaaaagtttctccagataaagaagctataagtgagtcaggtcagttaatgtcctcctgtatttatgtatttcccacctgctccacgaaggatttaggtagtgacctgtcctcagaacagaatgacagataggatataaacccctcctggaaaatatgtagctatgctttgccccgtctgcccacgctggacccggctcagccactgacctgctatgtgagccacttccactttcgtgcctctttgaaaaaggagtcacaccacaaaaaaagaagcaacactctgaacattccagggggataaccaactctccttagttcctgacaatcagaaagcctgaggataaaatacttacaaggttttctttgccttcagcaagtttaggatatcaatgaagacaaacacacctgcaagagttaacagagctacagaagacagatctgataaccacggcaggtagggccctggtgctccaggaatctaggggagggagaaaacagtacgcatgcaccaggcatccgagggagggctgtccagagagctgagggtggaaccaggccaagtctgaacaggcagagacaggagtgggtggagaaacaccagcaacagccagacagtgctgtgagcaaagaggcagggaggaggccctgaaggagcggcaggtgggctggggactcgcagccgcattgtaaggcaaccgtcaggagcctctgcctctctctctcccatgacagcattcttgtcaatgtcttggctgagtaagaaacagctggctaaaggaggctcgccctcacccagtgggtgtttagttcacagagccctcctgtcccctccaggacccaggcctggggggggaaactgggaagagtaagacccagtccttgtcttcaaggagtccacagcaccccacagctcgcagaggtcacagctatcacatatcagtgacctggataagaaggttaaaaagggcaaaggttgggtagagttactcacacctcttaaaatagaccaaggtttcagagactgataaccacagaaatggcttagcaggacacgggtgagaagacaggacacaaagacctctctgcccagggagaagaagatcagcctctcacgagtttggagaaatccacttctgagttgagtttttacagatttcaacaggtacctgctgttactttaaaaagcagagatgaggccaggtttacaggttcatgcctgtaaacccagcactttgggaggcagaggtgggtggatcatctgaggccaggagttcaagcccagcctggccaacatggcgaaactccatctctactaaaaatacaaaaattagccaggcgtgatggcacacacctgtagtcccggctactcggaggctgaggcaggagagtcgattgaacctgtggggggcgcagcggcagtgagccaagatggcaccactgcgctccagcctggacaacagagacgccatccaaaagaaaaaaaaaaaagcagacatgaatggaatctagaagataatcacaggctatgaggttccccaggactggacgcagcctgcaaaaaacatgggaccctgttctggcctctgaattgtgcctgtcatgtggaagacctcagtggtgttggaggaagcaacaagtgaaatagggaaaaggttaaccaggatttagctcatcgtattgggaaggagaagagaggtactggtgacaaccacgagacatgagctaaaattacacaaagagctcaggtaactataaaaag

SEQ ID NO: 43635 - DNA, 1114 bp, Homo sapiens
agtctagagattttcagtgtcttgatcttagctataggatcaaagacaccatcggaccaggacacaggaaggtcagtcaggcagatgacagcacccaggtacagtgtcttgggtacacagacccattaaccccatgccgccagagtttgctttctagaagcctcaggatatggtggtttggagaggagtggagatagcaggtaggaagcaagctgcagaagcccctgacaggcaaggtaagtaaacacctggagccttatggaggggagcctggaaggcttctgcttaggagggatttgatcagagctgtgatttagaaaaagcaaccatccccctctgcaccctgcccctcttcctaacaaaggccttcactgtttaaattggaggtgacaattctggttcacgatggcaatactgagaaggcaaggaggaaatgcatgtgtgttgggtaatactgcacagagagggtcagaataagcagaactgctgactgactggacttcagggcagaaaccaagggcaataccgacgtccagccattctttgaacaggcacagggcccgggaacaaactccacacgtgtgcatggccagagggtcaggcaggttgtgttaccttggccaagtcacccccctccgatccctgcagactcccaagtagctgggactacaggtgcccaccaccatgcctggctaattttttgtatttttagtagagacagggttgcaccgtgttagccaggatggtcttgatctcctgacctcatgatccgcccacctcggcctcccaaagtgctgggattacaggcgtgagccactgcacccggccagtcatgcgtctcaattgttctccagccttacaagaccaatgtccagggcaggcaaagccttttattttttaattctctagaaagtcacagctacatagcaagtgatcttatcactccctgagccacgctgaatcaaaatttgtggtctctttcagcactctagtggtataaagagataattcaaggcagagtgtaaatgagatgggggtaaaatcaaggagcagtgacaccgaaggagacccagctctgtccttcctgtcttactgccagctgtataacctggaa

SEQ ID NO: 43636 - DNA, 3164 bp, Homo sapiens
ttttgttttttacagagtcctgctctgttgcccagtctggagtgcagtggcgggatctcagctcatcacaacttctgcctcctgagttcaagcgattctcctggctcagcctctcgagtagctgggactagagatgcatgccaccacgcctggctaattatttgtatttttagtagagatagggtttctccatgttggtcaggctggtctcgaactcctgacctcaaatgatctgcccgcctcggtctcccaaagtgctgggattacagtgagccaccacgcctgtctgggtaatttttttttaagtattctgtttacagtaaattcagaaaacagaagtctttaatatgtctgttttaaaggggagaggtataaggtgtgcggctaacaagtttatttttctagtcgcagaatttggactcgtgaaagattttagtctaatgcagtttgttcacaaatataaggaggggggcctcagactagggaggtgttttccgagttgagtcagaacaagaaagtaagtctcccaagacctggtccttttccactatatcacactgcactgtctggctccaatctgatggcgagcaatggttccttaaaaagctccatcttctcaagcctacccagcacagacctacaactcaaactttaagttttagccagcctaaccttccacgtccacttgaaaaaagaaaaaaaagaaagaaacaatcaaccggaagcctttgatttttttgctagcaagaagccaataattgttttctttgggacaatcacaggttaagttgtgaaatgggtggcagaaactgcaagatttaaccagtttctctcaacgctaatcaaaggtcaagaaaataaaagacagggcagtgagagtcgcgggactttagacactcctgcaccaagaagcttaaaagtcttagccagggcactagagaacgcttttagaatggtcactcttaattatgctccataaccttgaaattggactgagtggggaaggggtttccacactctcacaacgcaccgactgggggaacgcctgtccccagactcgaatccacgtgtccattcaagtcatctaccgccactctccgtctacgctgccaggtgacagacatcatctttgcttctcaatttcaaaaaatgccagcactccttagatcaatgactccacggccaagtgcaagggccacgggcactcctctggagtcaccgagagaatgtctgcctctggcagcggcctctgagctgcctgtgggcctcgtgccgccgcgctgcgtggggccggcatctcagcgggcgcgagtgcagtctcgccccacgcgcggtccgaacgcccgcgagcccggcctctgggcaggcgggggccgcggacgagggcaacgtcagcggcccagctgggccacctcctcccagccgaagcgcggcctccggctgcttcgccgggccggtccccgccgccgcacacacaagggtcggtcccgcgcgcatccccggccgcgcaccagccccgcgcccgcgccgcccgcgactcagacacaggaagctgcggcagcacgggcaccccggaggcctccggctgccgagggaagcggggccgcgggcaggaggccggaaaggcggcgcggccccacgagcctggggtggctcacgcgcctccgcggcggccgctgctccgggctcggccctgaagggcaacgtcagccggcgcctcggccggggcccgggcaccgccgcgggagcaggcgcggctccgcacggcgggcgcactcacctcctccgtggaccggccgctccgccgccggctgtcactgcagcccactccctgccccgcgccggctctggatgctatttaaggcgccgctggcgccgccgcctcggcccgctggttgcgcccccgccaccgccgcggctgagccaggatgctgctggtgcgctcgccgcgccggccccgccctcccgcggccccgccccgcccgcaggccccgcccccggcaggccccgccccgccgagcgcccggccgccctcctgtctgggcgcgcgtggctggcgggtggccggcggtcgagaggctgcggcgggcgaacgccgctggagtcgcccagactgcctcggatttcataatgaatctgaggaaggacaaagggtacattggaccgcctcagctcagaggccccgcggaccctgggccccgcgatgcccgaggggcgggcggcgccctccggatcctgcaccctcagcccgtgccccgctggcctcctggcaggccgggcagaattctgctgcgagggccctggaggcaagggccttcctctccgtttttccttgacactgacgggcgcggccccacagggtttcccccacgctccctggccggaagaccttttctgtctggtgtctgcagagcctgacgtgggcagcgcccgcagctcgcgccggtgcaggggagctgagggccgactgcgcgctgcaccacggcggccacctgctgtgcggttctgagggcttccgcggttctgagggcttccgcgtccctgccatgcccatcttggggcttcagaagccaacacgatggttttcgggctcacatcccaaaggctgctcttccttttagcacctgggacctaccaggaacctcaacctctaacaacattggtccccgttaccgtggagtttgcgcccagcgttcgctggagggccgtttgaagaatgattgttgtcgtaaaggcctttgataataatagatactgtttacccagtgcttgatgccaggcattgctacaaacactgcgtacacattattctatttaatcttcataacccagtgaggtaggtactgtcattactgtcctttcacagaagaggaagctggggcacagaggttaaatgctagtgagagcagtaccacacttggcactcaggctgcccccagagtgtgggcacaaccaacgcagggctatgcctgggctgcaggcaggggaaactgaccgtggttcgctccaggcctcagccacactgcagttcactcccacaaataactgaaggactttccctgggtgtctcccacagtgtgctgggcgcagtggtgcagtggggtgaggacaacgcacacaccagcaacctctctagcagctcagtccttttagatctccatctt

SEQ ID NO: 43637 - DNA, 968 bp, Homo sapiens
aggccggatatggggagggtggggaggcggggatggggaggggtgctctgtgagaaaatctgaccgttttcccagccttttcattgtctctgtttccactcactccaatttaagagtccagctctcttctggccttgtccagttagttttctcagtgcccttgcccccgtctcctggccttagcccctctcattggctctctcaaggctgctcacctcccgcttgggtccgtctcgccccctggcctgatcagtcaagcagaaatgactccatctggaattgggcctggattctcagcactgctcagagtttcctgtaactgctaccaaaggccttaaccttgcaggtttggaatccagcatcttaaccttaatcttgtacctattcatggtacatactaataattattccttgggtaattagcacctaataaaactttcttgaacaaatatagttgtgagacagagtagcaaatgtaagaaggtgcattttctcaatttgctggccagcataatttcacaaagcccctgacactgtggcaagtgtagctctccggagggatgctttgaagacatggcagggtagagcacacggctcccacatctcttgcctgggtcgctgtattccagaaaaggtaagtgaccctggtctttgccctttcctagacgtaagacaacatctggtgtggttaatgattatgcctctgtgacctataatcagatgtactcttacatcctaaccttgatgtatttctgctttactgtaacttctgaacaagtttgatgtgattttgcataaactatgaactaaaacactgctttggaggagtctgacctctctgaaagactcctcccaggctgtagttctcagtccgtagtcctgagtcagacttctgaataaaactaactttaattctttaaaagctcgattttcttttcttcagtcaacataataccagagccccaaca

SEQ ID NO: 43638 - DNA, 3899 bp, Homo sapiens
caaaaaaaaaaaaaaaaaaaagccacagtatgggtttctatgcacatatggcagcgagcccattcattgactgtcaggtagcatctacataaaatggaatactattcagcctttaaaaggaatgccatttggatatattctacaccgtgaatgaaccttgaaaacatgctaagtgaaataagccaaatacaaaaggaaaaacattatatgattccctttacctgagtatctgagatacctagagtagtcaaattcaaagagaaaaagtagagcagaggtcgccaggggctgcaggggttgggggaaaggggaatattgcttaatgggtacggagtttgtgtttggaatgatgaaatgttctggaaatcagtggggtaatggttgcacaacatcgtgaatgtgcttactgccactgaattgtatacttgaaaatggctaaaatggtaactcttatgtacatctttccgcaattttagaaagccacaatgaggcagaattacaacacaggagggtaaatactaaggttctgcctaaaggcttggtcctcctcgtggccttggatgacctcatccccctcgagggggacgcccggggactttcccacccttctgaacccagccttctcattctctgattttcatccaggctcccctattccagcacagcctccatttcctcaggtgtctcgtaagttcacccccaacctctgaagagctccacccctcctcacagggcaagctcactcctcggttcttcttcccttccagggcttccattcttatcccgagtttccagcttcagccaggtgcccagggatgcttgctatggccggatccaaaggccaaggcaagaggaaacaacgcagctctctggggataagggtgggcggcatctcccagtcgggtttccttttcagcatctgccgggagggctgcaggccggctgggtattttcatagctgatctactcaaacaaacacatctcctaaagacaaatgttggttatgttctctgaagacactacagtttaaatccacattggggaactcccccactagccaggcacctgttctgcccttgaagtcggcgggtccccatccctgggcagaggagcttttggtttctgacgttgtcctcctgaggctgctggaatcacagaaagacctcattcccctttaatgtcagctttcccatcccctgcgtgtggtctcaagaccttggagctctttcttataacaggtgggtgggggcggggggcaggggaggggtgacagtttcttctgtcatataaacataaaaacttcagcaacagtgtctgattgtgtcaaagctgagacccagatatgctggaatgtggagacagagacagtcctggtgtgctggtgtgggggagcttaagggacatcagaccagctgctgaaccacacccttcatttgccaaaagctccatggggagaaacggggatcctgtcgaaagcttgcacatattctgacacatgcagatatgtcttatgggcttagcaggcctggacagaggcagggattgagcacgaggttggcgaatgtctgactccccacaggcgaagaaggaagaaggctgaaggagccacgctcacagcaggacaggaaggctgtgggtgtctggaaagctgtgggtgatgtgccttgattgcccccgtggtggagcccagcactccaggagggagaatacttgtaaagaattaaattagaatgatttgcctgggaggtggagtcagcagcataaggagactgctaaaagggcgagagcagagcgtagtgagaagtttctatacaggctggagatccctggaagctagtggtggtggagtgagagaggagagaacagacacgtcaaaggccaggggccgtcgctggtggctggactaggtgagcagctcagtgttaggggggcaggtggcctccgtgggagaagctgagggcagcaggatgaccagggccacaggaagcagctgggttatttgcagacagctcccacctgggctgcatccatcacccacgcactatcttatcctcagagacgcaggccaaaaacgatggcttcttttcagtggctacattttgaatcaggtgatgcttgataaaaatgaaacatcctgctcttcttcacccgacctgccttttcacctacccaaacaaacaaaagcaaaaataaaacaagacaataatagcaatgaggcagaggaaagaccgagtcccatcctacaagaagggaggcctccgtctccccacagccactcctatcaccccagatcatcactgcctgaatgctgcctttaccatctcagcccaagacactgtgttcttgacattttaatcattggcatcattatgtcatttctttggcaatcgaaagcaatgttcctgctcctgtgtgggtttgaacaaacagcccaaggggagaaataatgaattctcaaaggaaaaaaagtctgtttctcatctcaagcacctggaaggctaaggcgggaggattgcttgaggtcaggagtccgaggctgcagtgagctatgttcacaccactgcactccagcctgggtgacacagtgagaccctgtctcaaaaaaaaaaatcctgtaagcaatgagacacacaaggagtaatcagcacacagagccttagcacacactccagcctgcacactctgcaacgttctgctcttacctcagtgtcacaaggtgtggcttgagcagctcttgcccagacagataaaaagcaggtgtaacatagtgaccccaagggacccaagggtgcccatggtttgcaagagaggaaagaacagagagagcctgaacattcccagaattgcattgctcactagccaagctgtggcttccttgacacatgtagctggcatgggctccgcccacaagcaggcctggctgagcagaaggcagcttccaggaactccagggtacagttattgtgttgatccaacaggtgcccaggccaacaccaacgtggggcctgaagctgcctgcccactcctctctggcctctcaaccctgaccaacagccaccctcacagcagcatgggccaaagggtcatgggacaagccacaaatgcagttgacacagcctgggtacatcatgcacagcagggtccactctgttccaccatcaaagacccctgcctcctaattgggcttaagaatgggcaggacgcacctgtgctttagtagtgcagctcccataatggctggattgccacatgctggtatctcagtacagctgcccaggtgtcctaaacatgttttagtcatctttctagagaaggtagagactatggttatagtaacaggaaaagtatgaaacaggggaaagtaccaggatgtcccctcatggactgtcactactggccgtcactacagaacttttattcattgtttcattgtttttaaaacgtgcgtatgtgcaaggcctcagatctttctgctatgagtccctcatcgttgacttgggaccacagacttcggctagaaagctcactgtcatgctggatgagggcatggctcaggcaccgtggcttatcgtttgggctgaggacagatgtagctttcactgaactctcttccagtgcaccagtgcagttttgggtagcggggacgtagaagtgtgcccagaagggctgaagacgttttgctttttttgtttttgtttttgttttgagacggatcttgctctgttgcccaggctagagtgtagtggtgcaatctcggctcactacaaactcctcctactggggtcaagtgattcacctacttcagcctcccaaagtgctggaattacaggcatgagccactgtgcctggcccaaagatgttttttaaagagaaatagagggaagagcagctgccatagg

SEQ ID NO: 43639 - DNA, 698 bp, Homo sapiens
gaattagggtttagcaggtacagaggaagcttcagttggttggatgaaaaagttttggagctagggcacggtgatggctgtacaaaaatgtgagtgtgtatcaggccacagaactgcacacttaaaaatgaatacaatggggacttttatcttatgcacattttatcacaattttagcaaatcagtccaggttgcaccatgctgcatctggactgttcttgtcaccatctctctccagtgtgaggcgagatagaggccagatctgggggcagagtccagcattggctgcaggcctcctgtgagcaagcttagaccaaaaggcacacaaacatttcccaagagcaacaacagtttcctgctcaggccaagtctgcatgtggggagaagaacaaaatatttctccgaactctgcagggtgcagttcagcgggcactctcaaatgcactcagggcgtgcagggggccccaggagaataatgaacatgcctcgagttcatggctcccaaagaccccgcctggttcattttctcaaaacaaaagaagcctttctagggcattaagagcttcgacctccagtgcagaaactgctggcgactttgaaatggcagccctccagccacaaagaaaatctccaggctctgcatgccgcgcttacacacagacattgcggcactctcaaaatctgcacagatttgcaag

SEQ ID NO: 43640 - DNA, 627 bp, Homo sapiens
ctaaccccccttcccatcatgaccggaactagtttttcaggttgactttggaatgcccttggctgagaaggggacccatttagtcagttggggagcttagaattttatttttggtttacatcatctagaaaaagtaaagtatgaagttggggaaataggtcaaaataagttctagagtcacttttagctcctacgattctattaaaacttattttctagttatagaggtaacagttcatatcataaaaaagtattttaagatagacgactctcaaagacattatgcgaagagaaataagccagtcataaatactgcatgattcctttcctctgaagtatctaaagtagtcaaaattgtagaaacagaaagtagaaaggaagttcccagaaaggggtgggagcaattagtgtttagtggatgtagtgtgttgacaaaataccaaaccctgtaaaacatttacagaggttaattctgagccagcacgagtggccatgcccagggaacagtttcaagaggttctgagaaggcatgcccaagatggtcagattacagcttggttttatacattttagggtgacggaagttacagacaaagatacaaattaatgcatgtaaggtgtacattg

SEQ ID NO: 43641 - DNA, 795 bp, Homo sapiens
cttagtctagaatgagtagaattaatattttggtacaaggattcttgtccacattttataaatattttcataaatattaagattatactaatctcttgcatcagatggcagaagaggtggcggcaatgttaccaaaggagtgtgtgtgtgtgtgtgtgtgtgtgtgtgtgtgtgtataagcagtattgctttgtcctacctaaattgcagatctgccaaagaaggcataatctaatatattcatcccctatgttgcatggggcagggaaggctgtgggtttgcactacatagcacattgttctatccaggcaaaaggtcaagcgctgtagaaggccaaagctaaaaatacagtgtggcactggggaaaatgaaggagctgtccaggggaaatgagtcatactgaatcagtacctctcctcctatacacagcagtaacctcctcagctagggaaagcagactggttcttacatgaaagtgatttcaggtcaggcctggtggctcatgcctgtaatcccagcactttgagaggctaaggtgggcagatcacctgaggccaggagttcgagaccagcctggccagaatggcaaaacccccatctctactaaaaatacaaaaattagccaggtctggtggcacacatctgtaatcctacctactcgggaggctgaggcaggagaatcgcttgaatctggaaattggaggtttcaatgagctaacattgccactgcactgcagcctgggtgacaaagccagactgtctcaaaattttttaaaaaaaggaattttaacaat

SEQ ID NO: 43642 - DNA, 651 bp, Homo sapiens
taggcagcttctaaacggccgcagtgatcccatctgttggtattcatgcccttccttgtgtaatccccttccctggaatatgggccggacgtagtaacttgctctgacaaatagaatatgacaaattgatggaatattacttccaaaatgaggttctaaaaagactggtgcttcctcctcgggcactctctctcattctgttaatctgagggaagccagctgctatgctgtgagctgcgccgtggagaggcccacatggcgaagacctgataacatctggatgatagccaatgagtgagcttggaagtagatcctcccccatgtgaactgggaggtgattacagccctggcaagcagctgaacttgcagtctcatgagagctccgggccagagactcccagcccaaattcctgacctccagaaaccatgagaaaataaacgtttattgttttaggctggcaaacttctaggtaattttttacgcagcaatagataaccaatacacccaacataggccagggcgaaagctaacgctgatgtgcatatgtactgttagtaataaggtaaattggtgtaagtttctggagagcggttttaaaaatattcctaaagatagtcacaattatgttttgcctgaaggaaataaatgaa

SEQ ID NO: 43643 - DNA, 1589 bp, Homo sapiens
gcagtcattctaggggaaggaacagttgtatttgaaaacctgtatggttacatgaactgcctaaaaaacaagctaaggaaaattaaagctcagatttatatattttaagaaattaattgcaattaatttcctgggattaaatagcatttcctcaaccccagctgtcattaaaaagaggcaaatacagccaaggactggatctccggaaggctgacagcactgaccctcaagaaggcaccggctgacagacagaacattctgccctaatatgtgctgaaattccgctgagagcagagtggtacattgaaccctttaggggcttacaaaagaagtgtcctgtgttttagagtcacagagttttgcagaaacaagtatgaattcacctagtggccccctgcaccaggtctttcctgtgggcactgagtgccagacacatcaatatgtaatagcagaatgaatgactgaacgaacgattgaatgaaaagaaatgagaggcagcaggttgtcagattctatgaggcaatcacagcatcaggtgaccttagtatctatttgagaggactgccatttattctcgggagcgcacggctctaaagaggcccatatccaggcagtgagctctggtggggggcgcctttagatgcaagaaggaggaaacagctcgaaatccctgggcctgagcgcggcccgtgcaggccggagggtcaagaactctccaccggcggcagcggcccggtgtctgccccggcttcgccccggcctaaggctgcctgtgctataaatacgcggcccacatgccgcggtgacacggtgttccctgggctcggcgggacagataacatgaatgtgccctttaaacgtcccaagttgcagggacagcccccggcccagcctcgctcccggaagcgccttcgcccccgatgccctctgcagctgggaggagggggcgccccgcacctgcccagccaatgcgcggcgcgagcgccggccgcgacccgcctcctctcgcgagagcccggcggggatataagggggagctgcgggccaggcggcggccccctagcgtcgcgcagggtcggggactgcgcggcggtgccaggccgggcgtgggcgagagcacgaacgggctgcctgcgggctgagagcgtcgagctgtcaccatgggtgatcacgcttggagcttcctaaaggacttcctggccgggggcgtcgccgctgccgtctccaagaccgcggtcgcccccatcgagagggtcaaactgctgctgcaggtgaggaccgcgcggtgcaagaggcgggcgcgggcgcggcgggccgggcggggcgcgcgatgcggcgcgagctgcagggcgcggggcgccgcggaaaatctgcgccaggccacaggcccgggcgcccgcccgcccgcccgcccgcccgcgggggaagaaggtgccctctgcgtagagacaggtccagcgtcagtcgcagattcctggtgtcgggtggcgcccggcgttcgggtgtctatatatggaaacccacccggagccggtttacgtgtgccagatcctgcgcccgtgacagcacgggcgtgcactcaggcccgg

SEQ ID NO: 43644 - DNA, 1199 bp, Homo sapiens
cactgcactccaccctgggccacagagcgagaccctgtctcaaaaaataaaaataaaaaaaagagacaggtaagtttttatcaaagctgcctgagagtcactgggcacgccccacttgccaggtcctacagaccagcaataacaagactaatgctttcaccaaacatcaggaaaatacacagaaaagcaccgggcactttttaaactgtcatcttgttactgtgacaatacatttctgtagttaaacagcacagtaggcctccaacaagatgcccaattgggtacatgaaaatcccggcccaaattaaacacctgtttccaggaacgctaggctcttgtctacatcccctaccgtccccggaaggcagataacccctcgggcctcgtgggttaggttcgagtccctacaagtaggaagaagtcgtcagggcccggcatgtggtcgcggcccaatctcaatttagggctgatcctgaccctcaaagccacccggaacgcgcgagagggcgggacccgccattctcacaggggaccggggtggaacggcgccgcgacccgccgccgcgggcgcccctgtcgtgggggcgcggtctcccaccgtccgcgcaggcttcgttaaacccaccccgagtactcgccgccgcctgggctccggagcggggagacggatgcgaacggaaaggagcgtggcgggcgccccgcgagcagggagccaggagccgctcgcgcgcccctcacctgagagccgcggccaccacagccccacgcgcggcgctggcgcactcccgcggccctgaacgggctcccggcgccgcgcgcccgcgcttccggaggcggagagagcggaaagggaaaggaggggcggcgtggggcccggcgcttcgggagaggcgggggcgcacgccgggcctcgtgcggccctcgcggcgggcgtcacagagcgcggcgggcaggcggccaggccggggctccacgcgggcggagtggaggccgggccagggacgcgcacactagaagagccgcggaagaaggcggtccagcccgcgtggttgccatggcgccctagaggcgttactgctgctcccggctgcctagggcggcgcgggtaggccccgttgttctcgtgcgttaatagggaaagctgccttgattatcttgtaattctctaccaaaccaagaataaaaaagaacggcggctg

SEQ ID NO: 43645 - DNA, 2248 bp, Homo sapiens
acaggaagttaaaaaataactaccacttaatgcatactgaacagaatcttgtttcaaagaaaagatatgaaatatggaggcactttcaccacacaaatatcccactacatatgctaactgcagtatttatgttcaaaactgtaagaacgtgtctgataccctttattagttaggaattcctgaaaatgaacttctgtgcaaacctgaagcttcaacacgtgttttaaaaagcagtgcttattgaattgataaacaaaagcgaaactggcaatatcaacgtgtgctcacctcacaaatctgacaacagtatctctacactgccgttctttaaacatcattaaaagatattgtgaatagtttaaatattaaaaatgtggaatataagaacgattctatatatttgaacacacatttatattcaaatattcatatgaataaaaatgcttaaaactaccccttgggtaactaagtataacaacataaacttgcgattgcaaattttatggctcttactacaaaacaaaaagtagaatgaaaagaccacttatctttagaggacaagcatgaacttgttttctaacagcataacaataaacgtatttatttctccgagctttcaaaggcatcaacagaagggaatcactaaaaatgtaggggaaaagaaacactcggctggagctttggtttctaagcagatccttctggaaagacgcttagggagagtctagggagcagctctgacgtcagtagctgccatcggaagtcaggtcatgttctacaaaaagcagtgacgcacgcccgacagcacccgcggggccggacagcggcttcaccagccccgcgggtccgaatcgcacgcggccgggtccgctctcccgggaggagagcccggcgtggaccagcgtgacgaccccagcgtgctgcggcctctccccgagggcccctccacaagggtccctgcgcgggccgggctcggccgttgccactcgggacagccatcccctcgagttcgcgctcgccgtccccgccttcacctcccgggttgggaggcgggcgactgcgcgcgaggtaaaggaacttgcgttccccggcgccgaggcggcagcagcgcagtgcacagcggcttctgaaggcggcgtcgacggggagctgcgcgtggctcccagtttcctggttacgtgcgcgccggcagagccaaaacctgcagccgaaactcccgcttctccgtaaggattaaagggcgggcgcactaccgggagacgtgtcaaactcagcgcgcctcatggcggccgcggagccccacccgctcctactccagtcctctcacgcccactgacttaccctgcgcacgcgcgctgaggctccgtggggccgccgcgggccccgccccgaggtgggagggcctgacgcatccacagctggccaatcggcggatggcctcgcgcgcccgccccctccccctgcccccggcgccgggctccacgtgccagtgtttgtgtacgtgcggccgtggcggggctggacagggtccgggtcgttgaggattaggctgctcgggcgtaaccggagctggggcgcggctgccaagggccggcccggaagtcccagcggtctttaaattctcccgtgctagggccagcctgcgcattcttacctgtcggggtgcggcgagtgtctcacctctctgcacttccaaggactcttgtcatctgccttaggcgggaaatgctgttgctggattgcaaccccgaggtgagattcgggctcacagagcccgagcttttgtcctgcaggctcaagcttctagattcgtcttctcgttaatgcggggacggaccactgggcgctgcctggtcagagctggttgtgaagggcggggaggtttccagcccggaggggcgcgggactggacaaaggtgggaagggtgctggatctgttctcttcctgcaggtggatggtctgaagcatttgctggagacaggggcctcggtcaacgcacccccggatccctgcaagcagtcgcctgtccacttagccgcaggaagcggccttgcttgctttcttctctggcagctgcaaacgggcgctgacctcaaccagcaggtaactaggtaactgttgctgtgtacagccgtcccctccaacccagacacacacaaacatttctcagacgccaagagttgtttcagctgttaaaaacatgtctatagcagcgatgtccaacagaaatataatgcaagacacaga

SEQ ID NO: 43646 - DNA, 1702 bp, Homo sapiens
cttaggtgactaccccagatggatagatctcaaggccaaggatggtaagagtggcgacagtgacaacagacagacatttagaagtagcatctataggacttgattattgactgcatgtcggggagttgagaagagggagatgtcaaggatgatttccaggttttgggcaggcacaacaggatgtatggtggtgccatctacagagttgggggttcctggaggaagagcaggtgtgggctgtggggaagtggaaatgctcagtttggaacttgctgagcttgaaatacatatgagctatccaagtggaggcacggttagcagatttgtgggtctggagctcagaagaaaggtctaacttagagataaaattttaggagaacgcatagggtgtaaagcgtccctgaagagcaccaccatttaggatagggattggagaaccttgctgagcaatgagacaggagagaaaccaggggagggaaataccacgggaactaggggaatataatatccgaagaaagttgcgcctgtcccaggttaagcccttcttgcaaggcttcaaaaacgccgaagtctctcaaaatactttcacacagagaagtagcagggggtgcgtgtccaaggtggccgaggcggggtgcacacttgtgtagggcactttccccccggcccagcgcggagacaggcgaactggagagccgccctgcccacgcagctcgcagctgccatcttggaccccggcaggaccagctcctttcaggcgctgtgaagcccgctcgtggcggctgccaaagtccggggaaaaacacaggggtcggtgacgagcagagatactcaccatgtccgcgacgtggcggtgacacgggcgctgacgcctgcccaaaagttccgggggccggccctgaagtggtgtcaccgcacggcccaggggcggggcccgggcggaccaactacaactcccgacatgctcggcggcatgacgtcacggagcgtaccacaccgcagtccctcgcggacggcgaggcggggcgggtagccgaagacttatgtttggtaaattctattagttaagtcttttctgtcctacagaagctcacacatccttctgtgtgttcttcgatgcggattcgaatctcctcgtatcctcccacagcgtgcttggaatggattctcccgtacccggggcaacacatcacacaataaacgccagctgtggtggaacgtgcagaggcgctgcgcagcccaggcgtgtcgcgcgcttgggaaccctcgccgctcccgcagcgcagttaacgtggacaagctggggcaacctggacgagctggggcaacctgatctcggctgtcggagtgggtgtcctcaagaaaggtgacttggtcctcgcggacgccaggtgttgccccttagatacctgccacctcccagcctccgtttcctctctgggaaacagactcctcatcacctcctccagttttctgccccttcttcacctctcctgacgctccatccgtaccttttgcaagggaacgtgccataattcggctatgctctattttcttgtctaatagattgtaagctccttgcgggcagcatctatgccttcttaaatctgtttctagtttctaccagcaagcttgccccgaaggggattgcagaatatctgttaaataagtgaatgaataattttgtaaatgttgctcaata

SEQ ID NO: 43647 - DNA, 583 bp, Homo sapiens
gggggcgggtttgaaggctggggcggggcgcagggatgggatggggcggagagactgggcgggacctgtgggggcagaggaatggggcggggtcaaggctgaaggctggggcggggcggagggatggggcggagggacggcatcaggccgggcctggggcggggcgcggcgctttccgcaagcggccacccgagggcgcgctgggcgggcggcggcggcagaccacgtagccagcctgtaagccacagcggacgcagggggccgcagcgggtgctcagccctagggccgagcgggagatgtgcggcgagtgcagaagggcggacccgggatgtcccgggttttcgagcggggagccgcctgctgaatgcccttctgctgccctccgttcccgcggctcccctaggagccccgccccgtccaactcttacccgggctcatcgccgcggctcatctctctcgcaaccgccgccgcacgcacccgctccgccgccccgcgcagggcatcctgtcgccaggtaaccgggtggccggggcgccggccccacccccaccctcggcggcgcgcgctcggctggggtccct

SEQ ID NO: 43648 - DNA, 1749 bp, Homo sapiens
cctgaggtcaggagtttgagacctgcctggccaacacggtgaaaccccctctctaccaaaaatacaaaaattagccaggtgtggtggtgggtccctgtaatctcagctactggggaggctgaggcaggagaatcgcttgaacctgggaggtggagcttgcagtgagccaagattgcgccactgcactccagtctgggtgacagagcagggctctatctctgaataaataaaagttcccttgtaatggaagctgacagtttttcaatattttgtttcaacatttgtgtaacttacactgggtaaggataatgtattttaagtaacatcctgttgcctgtatttgtttccctgtgtttatacagaggaggatactatgtatactaaatgtatacacagttcatgtatgcatttactaaacactatacgttaacaggggtgggggagtttaaagtgaagtcttgattcttagacgtgacttttcaacatacatttgggcatcttttttttttcatgagaatctatctgaaattgtaagtcaaaattgctgactcatgtgatgtgacaatttggaggtatatctaaggagtgacagtcacaatgtgctaaatgttggggaccttacgtttcaagttgatgaatagaaatttggttttcacagttgcctttagtctataaagtcttaaaggagaagaaatgaactgtcgccaagctgtatcgtaaattccagggttaaaagtgaaacttacactatgccactcccacatttgtcacagagcggcatcctctgtgccccgcctgaaccgccatggactttcgtcaccggagctctcacactccgcgttccagccggacggtcatctgaaaaacaaagcgtttccatttatggctagggaacagctggccgcagcctgtgcttggcttctattttaaagtgtgcactttaacctgaagttgcatctgcaccgtcattccgagaggggcaggactgatgcaatcataagggacgctgttctgaaatagggcattatagaatggaattagtgaaaacatttattttgttgtggttggaggaaactgttacaaaaacgctcaaaggagcagagggcattattattttttattgtagcaaaatatacataaaatttaccattttcaccatggttaggggtgcaattcaatgacattaggtacatccaaaatgttgtgcaagcactgccaatatccacctccagaactatttcttcacctcacagaacctctgtacccatgaaacagtaactccccacccatgaaacagtaactccccgtgctcctgctcatagcccctggtaactttcattctactttctgtctcttggatttgcctattctggatctctcaaataaatggaatcatacaatatttgcctctttgtgtctggcttctttcacttcacataatgtttgcaaagttcattcatggtgcgccgtgtgtcagaatttaatttctttgaagactgaatactatttcattgtatgtgtatactacattttgcttatccattcatcagtcaatggacattgggtgttttccctctttgggctattgtgaataagataaatgctggcatacaggctgggcgtggtggctcacgcctgtaatcccagcactctgggaggccgaggcgggtggaccacgaggtcaggagttcgagaccagcctggccaagaggtaaaaccccgtctctaccaaaaatacaaaaattagcc

SEQ ID NO: 43649 - DNA, 674 bp, Homo sapiens
agaagaatcatctcataaaattcctctaaacctcccacctccttcctaatttttgatccccaaaggacagacatagggtatactagattataaataactttgagaagtattacaccagatatttgtaaagtacattgtagctttcgagagacatatacatttggtccttacctgatttcattttattgctatctgacacataaagctctacagataattcctcaaatcacctttatcaccaagcctagatatttgcaataaatccttagtattttaaaaaagcttttcacatagctttctttccaagcctagatatttgcagtaaatccttagtattttaaaaaagcttttcacatagctttctttccattaagacaatgttaaaagacaccagtaaagctgacattgcccacgtgtttagttaatatgcccatggttcaaagagactcatattacctcatcaaaggtgtttcccctagggctgttgaaacctgaccctggagtgtttccataatattgtcatctgagtacaactgcataggtgtattaaactgagcatgtacaatcttcacaccaggaagttccatttccaaaggaatgttaggggccagcttagccgcaactttcaagtcacctgggcaaatggtactaacagtactgacagaagaaggggt

SEQ ID NO: 43650 - DNA, 1197 bp, Homo sapiens
catgtatgaaaatgggccgtgtctcacacacttaagagtgatgtgcattttgacaagatggtgagtttaaatgttctgtctaaaggcacttaaattctttttttttttttaaacaaaagaattaaataaaacatgcctgtgaaataaatccacctatgggccatcagtttgcaacagctgcggtaaatcatattcaatgttcctgtcggaatcaatccggtctaaccaccagcttccttcctgtgggctgactggcttagctgaggtcagaaggatggaacagaggtttcctgaagtcactgtttcctgatttggcaatacagggcattattttctttccccttaggttggagttcaatttctagagaagatatttgaaaaggatgatctgaagatgatcagtttctctactgagagacgagaaggaagagcttgctccttatcattctggcttgttcacctgattccttcctcctaaccggggctggtttccatgctcgctcctgctggcagggctttcctgacctgggatagacatactgactgcccgactcaaaggtcacagtgttctggatgggatccccagagcctcaggggtgttcgctataaatacacgtggtgattgcatacaatttcacagctctgtcatcttgtcaatatttactcttggaaatgcaagttatttggcttctgttctctgccaagtgagtttgtttctttttgcttttgaaataagcttcgcaatgagaaaagccactccaaacatctaccagttacttttcttgatgattagtaagaactgatttaagaagcatgcactgcaaactccacagtctcagcgcttatgacctgcttcggcccgggatcacgaaaggtttgggccgaatattatgcttgtgttcaaagtagttcccgtcctgtgaaaacaaagcgttaaaaaggccctcagtggaaggcggacactgttgcagataagattaaacgaacgatagttgtacagggaggatcatttaccaccaactactgtcataactaagaaaggcgatgacgggaccaggacgatgtcttctttccaaccatctatccgctaaacggtcaggcactggcggattggaccccacaacaattagaacatgttttagatgcttgtctttaaaagagaaatctgatagtgccttcaggaaagtaaaaataaaa

SEQ ID NO: 43651 - DNA, 612 bp, Homo sapiens
tccagtttcacatttgagagagatggtggttcctgggctgctgttttgatggatacacacggcatttctcactttgggaaaactgattcttttattgagcttctcaggcttgaaccctgcccaggctcatctccacccactcatggagaccggttacctaaggctgcaaacctcagctgctggaaagaatctcaaggtctcagagctaacgcaacaaaattggcacagactcctgcttcatttttgtctgatgaaagccagcatgtttgtccaaatttatttaccattctggtttaattagaccacagaaacaaaaacaaaacaaaagaaaacccacggagttttatggaaacgtaaacacaccttcaggaaatcctcctgcctctcctggctttcaaagccagtgttgcacaatgggaaatgaagacaaatccaatgttaaaaaatgctgttgtgaaagatgtgttggtgaggtgagtgatggtggtggggtaaggatgcctcaaaaagaaaggtgtcttttaaacaggaaatgctgagccagactggaagccctctcgataacttgcaactttttctagaacatatttcactaaaactctgaattgtagt

SEQ ID NO: 43652 - DNA, 471 bp, Homo sapiens
tccctccttccagcctgcagacccctgcacgagataccaaggctcgccaatccaagtggcagtgcctggaactgaagccattctattgtgaccactggcaattctgagtcagaaaagtggccccgccaagggggatttttaaactctttcaatgaatggttgcattttggagcaaaaggcagggacaaggtcacagaatactttgtttgacttgtttttggtgaagtgtatctgaaagatcttacacaattgtaatcattctctctgctgataaaagatctttatcttattttgtaccctgggttacagtgtgtcctttcagcctatccttcacactttggttaaacattcctgaagctgagaataaaccaacagtgggaatgaatgagataaaccagtattagttctcatttccatgagaaaagtcaatccttttgttatgcacgctctgagaaaagaaaagaaatcctc

SEQ ID NO: 43653 - DNA, 2565 bp, Homo sapiens
cacattcacttgtgaaaaaaacacaaagctaggactaggggccagagtccttaatttctagtgttctttagtagacagtcactgcttcactgaaaatccacgaatgactaaatggtgtaagttttcccctttcctggctgttttgcatgtgaatattttaacaaatagggtcttgaagaatgaagagctccacgtgctcttaccagcccttttccttgtgtcgaggcacaaactggtgagtctctgtctgagattttgtgcaagacattcccggttccatgtcaggggtggaactggatgccctccatggccctttccactgttatcattctaacatgacagctttcgtgtagctgtgtttgtgatacgtgtcacatcgtaatctctactctcaggttttatttaaatcccttttaactgatatgctctattgacactatcactatatttttcttgaaaattattattttgatgcctataactcatttctttagaagactcaagtgctttttaagaattattttaaaatgttgattaaattcaggtcaactaattgagtgcctactgtgtttctatgtacaattataacccttttcatttattttcttcatttattctcatttattctgacaaatccttgtgagtctgggaaacgattaagctttcagagaggtaagaaatgacaaacaatttttcattggaaagaaaggaaatgagatctagacagactaattttcttaagggcatgaaacatgcaggtggtatcgacaagaccctgtctcttggcggagtggtccccatactgcggcattcctttaggctgacaaggggttttggtgaaataaaatgttttcaattgtttctcaatagtcattgtcttggttttggcataggtttaaaatatccgtgtgtgctctgatggattgtccagtgggaatttacttcttataaaaggaaaagagaaagacagactgactcaggggacaaataggtggtgactcagattgactgtctgatcagagaagggagtgaaaatggcttgggaccttttctggaggttttacataaaggctgttgtattttaacaatatcgaaggcaataaatatttatcaattcccttttgattcacatatagacactgtatcatataagttcttatgaaagctacatagaatgcagttgtgcatattaatgctaacttctttattcaaaaatataatggaagcttctttgaaaaagggggccaggtgtagtggctcaggcctgtaatcccagcactttcggaggctgaggcgggcggatcacttgaggtcaggagtttgagaccagcctggccaacatggtgaaaccaggtctctactaaaaaaaatacaaaaattagccaggcatggtggcaggcacctgtaatcgcagctactcaggagcctaaggcaggagaatgcttgaacctgggaggcagaggttgcagtgagccaagatcgtgccacagcactgcagcctgggcacagagcaagacccacccgtctcaaaaaaaaaaaaaaagaaaagaaaagaaaaagaaaaagggatcttactttacgtctaattgacacaaaagagggctgtttttaaacaattatgtccaaaattcagtggacttcattctctagaaatcatatgcctagtgatagaaaacttaaaatagcccaaagctacattgttattactgaagattatttcatattcctaaagtgtgaaatgttttttttttcttttttgctgttgtaattccgaagcattaaatcttttctatgaagtcgagttatatgaaattgcatgtagttcagtttcgactctccacatgggcactgtggaagcagtgtggcgttccctggtacgtgcgtcaaggttcacgtctgagtaggttggactgagatcctatttggttgaaatgtcaatgacattcagggtattggcattccaattacacgatggccctgaactcttacggttattgtcttacttgccttcattcctgtttctcatggtatccaaggtaaatacatctgtagtttttctaacacctttttatgttcatacgtgcatgagccactacatacaaatagagatttgtatagagatttttttttaaccaaaatgaggtcatactataaaccttgcaatgcatcttgcattttcttttaacttaatatataactgaactcactagcctggcatttaaacttggacgttgaaatccatttgtggattagaggtggtgaacggaagtgggattctgcatatggaagttcatttttttttctcaagaaaaactcagtagtttagaattaagtggctgtaaagcgaagaacaccctgagtatttaatcaacttctagatgtatgtgtgtagaagactgtgatatgcataatgagaattaaaattatttaaagatgccccatccctttctcacttctgctgtaagacccattaatcttataaataaaaaacaagcagtccccaaactgcagctaaccaaccagccaaccaaccaaccaacccaccaaccaacccatcaccaacag

SEQ ID NO: 43654 - DNA, 1909 bp, Homo sapiens
tggccagaatgtatcttaaattgtacatcttaaggcagtttgattcattttagaaaatttgaacgagaaaataataagccaatggaggaaaaatatcatctgaagaaattttgaatgcattaaaagttggaaacttttgatatttgtgttgaacagtggatagtttattacattattctttgggatctaataaaagtagacaataaagacagatatcttccattttaatggaaatgtattattcagaaatgtattattaatatttatatactgctgctccattgttattcagacatttgaaaaaattctttacatttctctatgtactaaatgtacaagtgttaagcagaatcataggtgaataaaaggtactcaatttgaggagtaccctgttccgactgtgtctgcaacatttttattttagggaaaaacaaagtggtgtgtttattgattctgcagaaggcatacacacgagaggggaataggtaataagtagaaagatgatcttgacaggctgaattaaatttggctaaactaaatttcatgattaggttgaagagactggcttttcaaaaatttatatggaataagtctaagggctttaatgcaattgttgaaaaatataattaaatcaatgtctaaatgaacagtggtttcatgaatcaaggaagattgggctccagctgcctcacttttaaagtgtccacatgagtctgtgcgtgagtcaggctggcatgaacttgagtctctaggcaggctttggaggctgtgctgggtggggggagggtcacagaacgatatggtagagacactatggtgagtttccaggtgactaccagcagcaacaggaaaagttactgacatgtacttgaggtttatttttttctttcatctcgtggaactcatcccagtggcccttagggttaatgctcttaaatataccaaatttatgctttaaattgacaagaagatgtataaataacagttgcagctagaagcttcaatattccctcaagatgtacctgaatttaagaaacataatatctaaataagactgtttctcagtgctgggtttttaaccatctggttcacaattgtcatcagaaagaatgaaaacaagtccatcctagaaataaggggtttaagacttcagaactgtacaacaaaatgggatgtggtgtctattgcccttttgttcagcaaaatgccaactcagatgacctcacttctagttcttaccccccacatatgttcccagcattcttcatttttcatacctaatatagtccttcatgctctgccactatttaaagctaaaactttcactcaatccaccaaaaataggcaagaaaaacaacatacaaatacaaatttatattccacagttacacagtggagaacagtgaagcttatttgaacaaagtttttgttgtttcataatactctaacttatttgacgtactggctaaaggtagaaatgatcagaacactttttgagattgttagttggcatattttaacatatgtagtgaaatcctactcagtctgatctttattagccatttctcccccttttatctacagaaataaactctcaacactctttcttttatcttggacttttgccactcttggaaaagcagaaaaatttccttttgacttcccaactacacgaactctttcagggcagcctggttttagctccagggtagtctgccatgatgctcagggccatggatcaccttacagatccaacctgggcctcttgttcgcatcgactctaccctgggactcagcctgttctccttcaggtccacaggtagagaatgtctgtgtggacatcttcatggacagagatacccactgacttctgatctgatacctactgacttcatttccatttcttctt

SEQ ID NO: 43655 - DNA, 7896 bp, Homo sapiens
ttgggttgcttctagatttttgctatattggagagttctgtcataaacacgtatgtacatgtttcttaatgcttttcttgtgaattaactgcttggcagataatttaaatgatatagctcctacttaaaaagtattttctatgtgccaaaaactgatctaagaatatttacagatattacatgtatattaattacatatgtgttacatatatattacatattacacatatattaattgacctgaggcctcacaacaaccaaacaagctaaatactattgttatcttattttactgcaaagaaacgccaaaccacagggaaggtacaaggtcacacagctattaagtagtgagtgaagcttgggaatgcaggcagtttggcttcagagtttttgtactataatgtctttcttggatctaaggacataaaggattgcaacagtttataacacataacttagttattgaccagaatttgagtgtgagtctgtcataatcaggattaatcaggtacagtacaccctgtaatgagcaatattggaaatgctcatgtatactataattactctaagacaaatgtcataaacatctttgttttttttttttatcatgggtacaaggcacataaatttatttcaataggacagctgctgcttttgatgcttgttctcacaattccgtggtggtagttgtatttgtttgttctcatgttcctaataaagacatacccaagactgggtaatttataaaggaaagagatttaattgactcacagttccacatggctggggaggcctcacaatcatggcagaaggcaaagggcatcttacatgacagcaggcaagagagcttgtgcaggggaattcccatttataaaaccatcagatctcatgagacttattcactaccacaagaacagcacgagaaagacgcaccccatgagtcacttacctcccaccggatccctcccatgacacgtgggattatgggagctacaattcaagatgagatttgggtggggacacagccaaaccttatcagtatttctctgtgtttctcacaaacatccctgagcactttattgttatcacccaccataggatggtcaggcccatctttcttccccttgaaggagcccaggcttctcctaggcttcagtgttaagggcacagtgggttctgggtgaccctcataaaatcagatcatgaatttaaggcagagccgacttgggctctcactctccaggggagatgttcttagatgaacaaaaattctccttagtcagaaaagcagcatcctcatcaatgtatggaattgtggcaaacatattaagcatgtcattccttaagttaatatctgtcactacataataactcacgataaataaatgtggtcaagaaactatattgtcacaggtacatgtaatagataaagacagggagcacaaccagcgtttgtttaactttgcaaggatcaaaccatcatcagaaccaccctttgtgtcttcattaattttttgttcatgctgattctgaatgtttagtctcaagaggaattatgagccatcagattggatgagtcaccttttagttataatcacaggagcattcaaaaatgaaatcactttattcagctggatgaaccttataaaaagtaaatgacttcatatacatttggcataaggctaatgagctatttttagtttttcctggaattatcttagcccttctttccgccctccgtgatgcctgcctccattttaccccttcccagtgctttcttggtcatgctaatcaaaaaggaaagggggaagaaacatgtggttttgataaccttcaaatcattaaggcaagggggaaaaggcccacaaaaggtggctctgaaacgtggagcgcctttccaagatccaaataaagtgttttctagagagtttcatgttatttttatcatgacttttataatctactactatcttttaaaatctgcattagaatattatttctggatctccaatctttatatctatttctacgtgggtatgactgtatgtgtccctcaaaaaatttcaattcagttcttgtgaaccagagaactcttcaaccttttctctttttttgagacggagtctcgctctgttgcccaggctggagtgcagtggcgggatctctgctcactgcaacctccgcctctcgggttcaagcgattctccctgcctcaacctcccaggtagctgggattacaggcatgcaccaccacacccagctaacttttgtattttttagtagagatggggttttgccatattggccaggctggtcttgaactcccgccttggcctcccaaagtgctgggattataggcatgagccgctgtgctggccaaatcttttttttttttttttttttagtaaaaggaaactaaagttacaataaagaaataaagaaacttacattttgttgacactaaatggcaggtttcatacaaagactaatcttttttattagggtaggaataattattggtgactttctctgccaattttccaagtgttggtaatacatgttgttactttttaaatgtgtttttgttacttttaaaatgaaatgaaaaagacatataaattatagcatacatgtctacccctacatttaaaacaatatattcctatgataaggcagaaaaattaacctacccttccctaacacaaacttccctttaatgcctgtggccatctgtagatcctgtcctctgttagcaaactccactcatttgctttttgaagttgagttcaagatcctcccatctcctcacctgccccgtcacccacatctctgcattactgtaggctcactgcatgtgcccttcatctgacattgaatctaggctgtcttgcaacatttctgatattactgccatttaatttaactttttatatgcattgccttttttttttttaagactagtcaagtgcagtagtgagaaggaagaaagagtggaacaaggagttcagctgtaattgactaaggtgactcactctgtggaccagcctgcattgcctttctggctacattggtaagtatgttaaggagagggacaaagtcacttgaagtttttggcctcggtttcctcatctgtaaaatgaagggaaccaggcctccgaatgttgttaatccaacacctataactctttttcccaaggttgaagatccccagtaatatttcagcttgctttcactcgatgttaatccaacacctataactcttttccccaagactgaagatccccagtaatatttcagctttgctttcactcagtgttccctgactcagagatctcaaaccctaagggagaggcagagtgtccttcagtcttgacgcctgggagctgtggatgcctcattgttgctcgtcttgcgacataaaataacagcatgctagtggccaaaaggcatgaagtgttcaaacttattcaaagttcaaagtgttcaaaccttttatgtacatgattctttaaaacgagggaaaagggaattgctctgttctcaatcgactgtgtctgagttcttaggatttatattagatccacactcccccccaaattttgaagatggaatgaatgtgttttctcctatatttaccactcaagttttttctttcctacatgctgactgtttgtgttatggtcattagattctagtactgaaggggttttggtttttgcctttgttctctgtgtgagctatgcagtggcttttgtgctgaaggagggagctcccgtctcatcagtttcagaacttgagtgatggattcgtcgtggctgctgatggtaacggtgggcactggccagcctgttgctcatgcagcgtgggaggtgagcgggcacagtgcccgtggagaggtggtgctgcctgatgagcttagggaaacccggtaaacaccgatgtgctctcccagatgcaaactgagtcacatccctgtcaggaaactgcaaataaatcgtgtgcaaaacggaacaaggatcctattaattaatttgggataactttattttattttttattttttttagagacagggtctctctccattgcccaggctggagtgccgtggtgtgattatggctcactgcagccttgactgcctggattcaagggaccctcccacctcagcctcttgagtagctgggagtacagatatacaccatcacactcagcaaatcttttcattttttttttgtagagctggggtcttgccttgttgcctgggctggtcttgaactcctggcctcccatctcagcctctcccatctcatcctcccatctcagcctctcaaagtgctgggatgacaggcatgagccactatgcctggccctgacatgagactcttaaccaggccattttacaaccaatttcatgcattctacaattaaacaagatagtaattgtgtaacagatctagacaactttttcatacagatatttattttcccaagttcaactagggctagagcggtttgtagaaatgtataggtctaaccaatgcttcagttcacatggtctcttgctgtacagcaacagccaggtgagttctaagtgtcaaagtgcccacaaaaactgcagtgtaagtgaagctaatctttggtgtctaacatatttttactgtgtattcacttcccttcatctttttgcattattttctgtctcaaagcaatctgttctacatccttccccatccaaattcccaacatatgttggggtttaggcaataatatttgaggcaatcgtagaggaatgtccaaatgtgtttgaatgaggggctgtttaacctcatgtagagctatttgaagattcagaaatgtacttctgaagcccgggtctgtctttaaaaggccagacttggtatatcagcacctattcagcacacgcacaagctgcccaacaccacactcagctgaccgtgctccccgccacctatcctctccactgatggagtttcatttttctatcaagagcatcaccattttgcttgtccagccccaaaacactgacatcatatttgactcataactcctcctactatcctcatgttggagcagatcctactgatatgaacagaagccagagaaattctaggcagaaaagggtgattccccagcaaaaccccaccctcaagctgaaaagcctgaaaccatggcccaaagtgagaacttgtatccctctttacccgctaaaatgttgcctttcctaaactacctataaccatgccccaccccatcctgtgcccataaaaaccccagacttagctggtaggtgggactacagatgaatgtcagagagaagcagcttgactttggagggacagcttgacggcgtaacttcggagaagaatccagccagagacagctggattcaaggggaagactacctacctgcccatcccctgttcagctccccttcccactgagagccactttatcggcaataaaatcccccacatttatcatccttcaatttgtttgtgcaacctcatttttcctggatgccaggcaagagctcagaagccaccagtgcaaatataaaaggctgtcacactggcctttgccctcgctggcgggggtagctgcctcatgcgaaaaggcagagggcccactaagctgttaacacttaagccgcccgtggacagcagagctagaacagcactgcaacacgccctctggggctttgggagtcacaggcacccccacctggatgctcgaacggggactgcatggagttcgctcctgccagtgccaaagcggccagcgggttccagcgctcatgcacgccagcttccactctgcttgctggtgcactccctcctgtgaggagttgagaggggcaggctgagtaaatgaggcacccccctcgcaagtgccgtgaaggggtcaggggaatatcctgcatcgctactgtctctttaaaatctctccagaacctgcacacctctcatcaccaccttctgtttaccacctaacaccttagtctagctttccagtaaccttatggtttttctcccttcctccattgacatcacctgcgttccactgttcccaaagtatccagagtgatgctcaaacatctgagagacatcaggcattctcctattcaaagccctccagtcacctcccatctcccctcctttgctggccggcagcatcctctgtgtcctgggccctcactgcacctctagctcatggctaccactcttcctctttgtcctccagcctctaatgaggctggctacctcgttaagccttggacactccaagcccacactgtcctctccctggagccccaggtctctccttgagttcttcagatttatgctccagcacctctgtatcagagacctttcctaactgccccatataaaatgcagtcctccatgtttcctttgtcttttaaaagtttttctgcagaacacttcttatcacctctcatcttacgtgtttgctttttatctctttcccaccacaaggattagctcagaagagcagagactttcatcaggagaacgtgattcagaggcaggaaatttaatcatggggtggaacctataaggacgttcagtccacgtactggcatcgtgtggctctacacagggtagttaggggaagggatgagtattacaagttgctgaaaacaatatatacttttttcctttagcaaatgcaaagaggtagtcagcttcaccacttaggcaaatgcagaaatattgctgctgtggaaaagggtgcaagagaaagtcagagtgaaacaaatcggtgctttataatttagtgagtagaatctgtaatcattactataatttaatcattactatcatttagtttcccactgtcatgatattgcagcctggtacacattaatattgccatatgttcatactgcacaccattatttgcctttgtcgttttgtgtgaaactagacaaacatcacaatctgactttggactctgaccattagcattgatttcaaacagtgctgaggcaattctgtgaaatatggaatcaccaccactacacaggatcttaaacttcaattctagaaatgggatggaacagctacccacctatccttaagtataatgaaaaaattactttcctggtgataacataaccttcattatttaagtggatatatggttgattttctatcttacatttaatttccttgggttttgttaaaattatgaatgatgaggcattgctttatcaaaataatacatttgcattttaacagattttcttccattctttctaaaggagtatctcaaataatgggaggagtcagcaggctagagtgtaggatattttgcagcagtgtcttgctttcagcttcacgtcatcccattgctccctcagccagcctctgaccctacacttggtctataccaggtttatatactgagtttcatggatacacttaggtggcattaagtagaataatggcagatgtaatgtttatataacttcacttaaatttagtttaggcttttttttttcacctcatcaacacagaaaacctataacctaaaatttgtgcagaaatgtgtttcacaacagcaattaggtatacaggtgtattaatctgttctcgcactgctaataaagacatacctgagactgggtaatttataaaggaaagaggtttaatggactcacagctccacatggctggggaggcctcaccgtcatggcagaaggcaaaggaggagcaaagtcatgtcttccatggtggcagacaagagagcatgtgcaggggaactctcctttataaaaccgtcagatctcgtagatgtattcactaccacgagaacagcttgagggaaaccacccccatgatccaattatctcca

SEQ ID NO: 43656 - DNA, 5096 bp, Homo sapiens
ctgggtgtggtggcgggcgcctataatcccagctactcgggaggctgaggcaggagaatcgcttgagcctgggagacaggcgctgtaggaagccaagatcgcgccattgcacttcagcctgggtgtcagagtgtctgtctcaaagaaaaaaaaaaagaaaatatgtaatatacttagaaaaatagctggcgcagaacaaatgattacagaaatatgagctatcattttcattattattattagcatcataaacattatttcgttgtgctctgaatgcagctgaacagtactcaagagtttcaggatcagttgtataaaattacaaaaaattagaaggtcacccatcttgagaaaagacaagtttgtataaacaggacaaactactgaaagcaggagagttcaaggaagccaagagaagctgagaaagttttcttaaatctgctgtcttgttggttgctgatcaccacctcattctccatgataggtgcacagttggcgtacaggttacctagggctggatactgattgagcatatcctgtgcacaaggacacctatgtttattccacttagaagtctgaggttgttctgaatgtcaagcaacaaaacaatgcacttctttgggagagctggggcattccagattctggtcattaactgggtgagtgtctttaggcatcattccacctttgtggacttctgctccctcgtttgcaaagtgagagagtcagacactcaggttatgttcccttaatctccacctttaaaaaaaataatgttctgatctaccttcataagagcagttgtgtgccttaattttctttgcaggtttgctctatgcagacctgtcatgtggaaactcagagttataaattagaaacaggtaaatgatttatttttgccctgcaaatgagtcacactctctacaagtggattattaaattccattaaataacaagcttgcccaataattctaaaatagaatctggttttaaaaaaaaatcggtgtacctgttctctgttgtataaagaaaggtatgtgatagcatcgttaaagtatatgttttagaaactactctggcaaataattttcttagagagaggttaccgagaaaagagaaaagaaaaatttagtttttctggcttggagaagcagcaagtaaaagtcacagctctggaaccaaagcaagaaagctccttgaagaatgaggtaatcagacttgccggtaggtactctcaaaccagcgtgaactgtacactgcaattaattattaaatgtgctcaggctaggtcaggctatactaacagaattcagacacgtttttctctccagcatttggttatcagttttgtgacatatagagtaacagttataaggatcagtttctgcaactccatccctcaacctacttttttattgtaaatagactgaatgtggggaaaaggcaaagagaaaaagtgctatgcttcaagaacatttgtcttgatattttggtggcaagcatcatcaaactaactatatttggctctgactagcttagcatgagatgttagtttttagccgcaaatgagtagcacttgacaaggtgagaaatcttccttcaattgttgaaatcatccaagacgtgtttctaatctacattttgaaaacaaaagccctagcataatgcaataggaattcttcttgcctgtataactggattctgctctagggtcttgtgggatggttattacacatggcagagaaagctacgtgtcctcttgcacccagtccctcttcttaatttataacggaagtttcagctgaacacatggctttagccaggctaagattacatttttcagtttcccttgttttatcaccaaattttgaccagtgggtgtgagaggaaatgctgtgtgcatcttccaagaggctgtggccttaaaggcaagaggtgccctctttgcttttccctttcctgctggctggaacgcagaactgatgtcaggagctggggcagccctcttgaccaccaagggaagccatgtttagcgctgagaaagacagagcaataaatggaaggagcccaggttcccagaattgtgaagcctccgtactagccttgcaccaccaatctgtacttttacatgagtgagcaatacacatcttttatgtttaacctctgttaatttgaatctctgtaacggcagctgaggttttatcgcaataaatgtattcccacagtcagaatccagacaatttcaatagttccattttatatttatgtataatcataagaagaaagtccccaattttacattaaactctgtattccttctaactgtcttgggttgagtgacacggcggctattgaacgtatttctgtggcactgtaacccagtagatcacacccatgcaattgctttctcttccttaggcccaggtcacttcacctgcacctctttaaagactgtatttcctttctgtgtccctccctccctctctccctttcttccttccttccatgtatctaagagattggcctgggcctccggtacccaggtgctctgccttgtgactccatcttatgtgaaaactgtgccaggtgctagaaaacagtttgcaaattatattttggtttggagaccttgaggatgcatttactgaattttttgactggtatttacatgatcatctcaaagaatgaattgcagttttttcacagtggaggtactgataattcaccccttgaaatgaggccgtgtgggatgagcaaccttgaaccaggaccttaaaagcttagattccagccacggctccgacacaaagtgacagccgcgtgaccgtaggcccatcgctctgtctccctgggcctcaatcttctcacccttgcattgggaatgatactaaagttcctcatccacctgcctcatgggattgctcagaggatagtgtgagacaatctaccacaaagtacaactgtgagccacttcctaactcctgctttcccacctattcttttttttttttttttttttttgagacagaatctcactctgtcgccctggctgtgatctggctcactgcaacctctgcctctcgggttcaagtgattctcctgcctcagcctcctgagtagttgggattataggtgcctgccaccacgcccagataatttttgtatttttagtagaaacggggttttgccatgttggccaggctggtctcaaactcctgaccttgggtgatccgcctgccttggcctcccaaagtgctaggattacaggcgtgagccagcatacccggtccccacctactctttaactatgacagatgtgaacgtttgatctctttgcagacaagatcagcacggtgactgggtctttgccctaccttcctaagcaaatgacagaactggtagcagaactggagcccctgaagcttctgcaggcaaacttcctggagcagcccaagaaagtcagagcccctccttttcgtcacattcagttggaattttggaaaccaagcataatggagaaataacttttttggtatagccggaagatgaacccttgggcacagtttcaaagtcaaatattttactgtaaagtggaagaagaaaatacccagatctttctgcatagtcaagtggcttatgttttgcacgcattggaaagaagggaaaacaaaagctgtcttagaagacgaaatcaatcacatgaggagtggcactgctccagagagctgaggtcttcctcttaggaattacagactttggttccgtataattaggccctgtgttgctcaacttccaaataatttagagagaattatcatgtgagagtgcacatatatacatttttttccaaaacaaccttctcaatatgtagcaaaatgtagtcaaggaagaaaaaaaatgagaagttctttagatttcagccaaaacaatcacttaagctccaagtcactatataaacaccattaatacctgttaaaaggtcgtgaattctgtaagagatgtttggaacaaacagtgcttcagaactacccacaaaaataaacaaaaaagagatcatattatgtcactgggtccagacaggatgatgaaacggctatgatcacgtataagctttatctatctttccagagaacagtgtcagggacatatgggttactttccaaattttgtttaaaaaatatgaaaaacatctgtgaaattctggtaagacaaaaagagtttctaattctttggatcgcaaaatgattcttcagttctaattagctatgataaattatgttaattctaaattattatcattcatgtgggcatttaatttaaaaagtggcattatttggaaaacagtctctgcaatttattctaatgtagtttaacacgaagcagctacattgcctttttggatattttcagaagtgtgaaaactgtgaatatcacttcaggctttgcagaatggtactctacaatgaatctgtgtctggcatctgattggtgataaaaaaaattattgggaatagattattagttattctgagacagaattttgagaaacttgttgaaagagtcttgtttgaagagcccataaggaacctcctccttcacacccatactctggctaagaatgttgactcttttttcttaattaaaggctgaatcactgataatattgttgatattaagtgcctactaaccagcagcatgagcttttaacacttttaatgtcacccaaaagcctacccaaagtgcccaggaaaataaacagttttctaagattcagtataattttattttgttttgtagctaaaatgcgccagagctgtattcatgtcatcacagtgggaagaaggcaaacatctgagaaattaataaatcccacagccgatctgagctgtcacccaaccccaaagggcctcagtatctgcatctgtatatggggataactcagttctccagagtttgtaacaggcctagcacagtgcctgcacatgtaagagctcagaaagttatttgtaaattagtaaattaatttataaaattgtaataaatcaataaccattaaaaaaaaataaaataaaataaatcccacagccactaaaagc

SEQ ID NO: 43657 - DNA, 1837 bp, Homo sapiens
aacataaaacctaaaatactgtctggtcaaaacctagacagcctgtgagacccatgagagctcggagaccctgctttcggagcataggtggggacccgaggggtggggccgtgagcagggtctcaggccagccgtggagaaggcggctgcctctgcggggatgggcaccgcagcgtggtgggcagatatgaggaaggcaaggactttcccattgaccatgcaaaaccttcacgaagtcagggtctgtccaccgtctaaagatcgagacctcatgttgagttctgaggtaaaatgggaaaacagttttaacagtgcagtgaagcttcctgccaataagcaaacctttccaccctccgctcagctacagaaacacatttgggagctccagggaggaggcggaggggcacaggcgctccccagtgtgggccacgctcaggtgtcccttcacaatggcagccacactgcttcgtgaaacggacacactacgggatggaaaacagtgagagggaagccacggcatcaagaagcaataatcacagaatgtttttgtgctgtccacgccttcctcaacatctgcctccacttccaagtcaatcgagacagcctgtttatgtggagctttgagatgacacatacactttactgaccctagaacaataccctttccacatctaaagcaattttcgtgtaaatgactgtgccattaaccttccagggtcattcaaatattttctgagaaattggctgctttcgggattttcttagaatgccatgtgtttcatttttgtgcagaacagatgacaggcgaggcattccaacaggacttcagttgatttaactaattcctgtcaggggaagtgaagtgttgggattcataaagccgatcccagcccggagattttccttttcccaaaacagaaaaaacaagacatgctgtgtggttttgcaaccgggcaagtttcgaaatatttttaagctttctactttgccaagtatttcataaaaaaactattttctttttgtttcgtgccaaaaaatgtcacccctaaatattttttcccatatctggtcacatgtccaggattttttcttttctaagaataaataatttttctgggttataaaaattccacttgctctatcagattaaacatatctttatatagaaaaagcatccgaaacattccccaagtgggtctaagggaggagtcttaatacaattttgttaaattaattttgattaaatattaggccttgaattctttttgtgactctcacaaagttcaggcttattttgttacactttcaagtctccctttttttcactctccacatactgtttccttttattagaaagcattcaagaagaattgattggtgtgtttgaccaaaataatatgttggaagtgataccagtgcaaggggaccctctgggttccattctctatttgcatagttagctggagttagaaggttcagctgtcagggattcaagaactctagcatcaaaaaagtgtgaacttgcaaatgagctgtcaaggttcatagcaagtgaataatgcagctgagagctgacttgtctccaccctggtgttctattgatcttgctgctggataaagcataggcacataggaacactgaaaaatagcaatttgtatgggttggactggtattttcttttttaccagttaaaatgttaattacattcacaaagtcaaaaagctgaataaatagtcttacagttggaaatatagggcaaaacaaaacacaggcttgaaaaagcaataatagctatacacctaaaatgtgaaaaatattcatagagaaatgaattgt

SEQ ID NO: 43658 - DNA, 1848 bp, Homo sapiens
tgagggggagtctcgctctgtcgcccaggctgaagtgcagtggcatgatctcggctcactgcaacctccacctcccaggttcaagagattctcctgcctcagtcaccggagctaatttttgtatttttagtacagatggagtttcaccatgttgaccaggctggtctcaaactcttgacctcaaatgcccgccttggcctcccaaagtgctgggattacaggcgtgagccaccgcacccggcctgtcctcactttttatcacatactcctgctcttgtggccctgcttgaacacagcaacagggtctacataaaataaattaaaatacatttaaaaaaaaattacctgctttacttctggtccatagcattggacatacccagccagaaatcatacactgggctggtttttgggagccaactcaaatgcttgtcctttgaggtaagtattagggtgctcgtggcctcccgccccacgggtccttcactcactgaccctgacctgtgctcactttgtctcaccacctacatttcccaacagttcatgtttgatacagctgctggtcctgccaaggctggaggccctccccatccgctgatttgcctttctctgaaatcggcatcttggctcctctgcattatttctgattggacttgtctctctggcttgttttctctgctaattctgatgaagacgataatctctagctctcaggggccagccctggctacacagtttgggggtagtgttcaaacaacccttgagaatcttatttttcaaggctgttggctggcactttagggctaaagcaagtggtgaattaaaacacaaaacaaaacaaagcaaaaaccacaggcctaaataaacatatgcacccaggagcatgactgtgcagacagactgcctggctttgaatctcattgccaccattgattggccacttaaccttgcatatcacaagatgggaataataaggcacctgcttcatagattgttcttttagtcttctatccgtttgttcattccttcagtaaatatccatcgagcacctactactgcccagacatacggatccagaaatgtccagcacagattaagaggccacagcctcgtggattttccattccagggcatttttcttcaaggatccaataagatatccccctaaactatacatcatagagcctttgacacagtaaacactcacatgccattagctgttatcacggtaacaataaaaataaacttttagcaaaggttttaactaaatgaggtgagaatcataaataaagatatatttgctatagtgaaaaggagagaaaatgtaggaaagtcaggcaagaggaatatttgccaaaatcattcatgaatctgacacattagattctgggcgtgtcctaagccttgacctgtgctacttgatgtgggatttgcacacctgggacacacgagcttctgaagttcagactgtctgcactctatctgacacactccacagctgcacaacttgcagcatgagtcagcaccatcctaacctctaaagagccccgcgggcacagcgaatgcacctcccagccctttggacgtggtggcgaccagctggtttcctggagaggcatctcctttacacccatctgtgaaagaaatctagatctaagccttagatctcaaggttagaaagggggtaaggttgaggttccggagtgctactctattagacacattgtcctttttaaattatatttttacaataatttccatttattattttttcgtggcatcctagtgaggcaggctagtttgacaacatgctgcttaggggaaatttgctgttaataagtcttttga

SEQ ID NO: 43659 - DNA, 4366 bp, Homo sapiens
acacccacatcaactctgggtcgccatgcttttctgagggacattgccttcactgagagctcctttattctcagtataccttacattcccagccacagtactgaacttctcaatgcttgcaatgttcccttggagtatatcagttgagcaggcggaaaaaaaatatctggaagtttattatttttccaccaatatatttgacaccacctttggagagggaacaaaaggcatactgtcaagcggatagacctggacaaaatgttactgtttgttcctcacgagcacagaggtatatttaagcaaagaaaggcattccacggctctcccgggacttccttccttcagctgaattataccaacatgttcacaccactgagggccaggctgctggaatttaaaacgcagacctctatctgccagtgcttcgatcccacggctacaaacattcacattaggattgaacctggctttcaaacatcatgagataaatgggagtttactgggggaaaacgtgtgccctcatgaaactatagtagaagatgcggaaataggactgtccctgttcagcagattctatactaatacaataaagcctcaaagtcaccagaagtcacctggccttgggttatgtttcaaatccaggctcactgacattcatgaaacctttggcaacacaggccaagtttcgtgcaaggctgggtagaatacttctttcatgtggaagctgggtgaaactcggtggctttggctagctttcacctgaagtttcacattcaaacaatccaaagtttcaacgtaaaattcaggggtgaagagaaacagaaagaaaaaaaaaacaaaacaaaacagggggaaaatggcttgcctgggaatggaatgatcacctaccattctccaaaaagatttcatcctggtgccatttaattttgccgctggactatcacctctagcaatatatttgcactcagccctgcagaccaaggcttcccagtactaagggagagtgagtattctagctagacgcaccccatccccccaacaaagcccaggctcaaaataacgggaggatttaaaatggtaaccatacacataaatgcgatgattgacatgcttcttataatgtagatttgaaggggaaaagtggcaatgaaatgcccaggtttgggaaacttaaagattagactgaacatctctaggtttttctactataaatccaagttctggagattcgattgcatctgctcctaatccagggagatctctgccgtagctttctccacagctccgcccctttggagatttgtcctgtggccacttgcgtttgtccttcttagcaaggtgcagaggacggggcagactgcgtcagcgctgaggagctagcgtccttgactgggacttaaacagtctcctgacaggattaggctcattctactcctaaccttcaacagaacacgcagggaccgtttgccagggaacgtcaaactctgtatttggctgaggactgtgaaaataccttgtgcttggggtgggaaagaagaagggaacaaatgtcacacacacctgtgctttcttcacaatgaagagaatattccaaagctgattgaatggctagtaagtgctacattttgcccattttaggaaatacatttttaagaaatcccttatcccttacacagcagaagtttcactcgtaaaacagacttctggctactaaggttttttttttttttccagttttcttttgattctaattttctttttctttgttatttcttcccgtttttgttactcagacgatccttatgtggttaaaatgcatgctttcctttgatatgtgctctgtgataccaataaacttttctgaaaaaaaagtatttctgaactccaaagatttcagcatccatgtttttaaaaagcaccagttgggccccaaggcacacggagattctgaggcagcagggcagccagcgcggggctctgtgcactctcatttgctgcttgctcttacacatctgccagacaggggccatgaactgtcctgaagtctgtgttggggagaactttaccagagaacacttttcttacaattgggggtccctctagaagtgaaatctaagacagatcagtgaggaaaactaaagctccaataaattgtttaaaggaaatgctatgaaagcattaaaccaaaaggaaaaaaaaggagactttttactgagcatagtaaatagccacaatcaaagtaaatgctgtgtttgaagttaaagtccacagatcaaagtacttcgcaaaatgtcaagtgcaagcgtaacgagggggagaggggagccacagaaactgacccgaagtatcacattgtcacgttagagaaacctgccagcagatgtacccagcaaaagacagtcagcttagtaaggaatcctcaacactgtcccctaaaatgtgctaggaacatacaaaacaacaataacaaaaacaaaacccccagattcccccaaatcaaccactctaattccacacgagcaatgaacgaaacagtgatgaaaggagaacattatacaatacggctcgctcattgcccttaaagaacaattacttatatatattatctttactcaggtggatggttgcatctttttcctctttttttttttttaatgcccctggaaagttaaaaataaagcagtctaaacaacaaaaatatgatgtctgaaacatcctctcattgctctggcaatcaggcttaattagacctctgatccatggcttagtcatagtcaagcgtgtactgcaggtcactattatgagagctttaagcaaagtttaaaacttacagccacaaaaatgcccagatgctcctgctgtattctggaacaccgtgtttacctgaaaattgttcacaactccccttattattttcactataagtaagttattttaaagacattagttatgaacataccagaaaacaattaaataattccagaataaaaaatcttacctacaggcagctgagttcaacagttgctctatacagaggaagtaggagtcagtggccttttacatgtagagattgtttatttagccctttttaaaaggtcttgaactccagaggtttaagattaagtccaatccaagtgtctgaaggaaaaaaagcaagagagaggcaaatgagagagggaaagaatcccagctgctgggtggtgctactgttctgagagcatttgagctattttcagcattaacagcagccggggttgtctgcaaagggatgaaaatgccttgcccagatcgccaccccccactccaggggggagaaaacaccaaccaggaaacccacaacgacttggttcattgtgcaaatattcatttaaattttgaggaaaactgccagcaccattgaaaacaaaacaaacccaaagttgactggaatcttaaagaaacacagtgctcctcaagttttcaaaatgaattacctgattcactgaaaacgagatgtcctacttatgctttattgagaaggaggcttttcttctgatatttcctagggggtcttaagaaatagttgagagccctctggtagcagtatctgttgtcagtctattcttaagactgaagacaaatgatttcttaaaagagcccgcacctaaatttccagtttcatcaactatgctatttttgaaagctactgggttaagcgttgacatctcttatctattggcagagactggggaccattcagtgacatgaggcagacaaacagtgacccctgcttctgcctccacaggccaatgaagaaatcattctggttgggtcactggcaatgactgacaaactttgagccttcattttgtttctagaaataaaaattaagaagtcgtattcattcattcattcagcaaatatttatttggtgagcacttcagagcttactataagccaagcactctgggaatacagtggtgggcagaatgaagtgtccttgccttcaggggtttagagcacacagatgcagtgagaataaataaaaacagaatttttaaatattttccagactttttcacatgatgagactattcacatcatggcagctgaagactgagatctctttctattgtggatgaaggaagatactgtgtgtcatcagaccaacttcaggcttccattgagtcattgtgcctttacaccaccaccagggaggaaaattacttactttctaccaaggaagcagttaagtatgtttatgaacgctttcattccaatagatgaaatccctggtttttttcaaccccctactccccattacaaaaagaatgcttaagtagtcagaaagtactgctgagaggctttccatcgggagatgaaaaga

SEQ ID NO: 43660 - DNA, 695 bp, Homo sapiens
taacatattcccctcaatgaaaaagactgaatccaagaaatctcacctgcgtcagactttctaagtcatagagatttatagtaataattttaaatgagtctttgactttcagacccagcgtatgaaggaggagagtgtgagtcagtgccgttcctgggcgtccgctgggaacttccctgactgtccttctggctctcaggagtggagctcacttgctcaattcattccagtgtcccagaggtcacagtctcccctctgtgagctgggctgtcctcggtccctgggcctatctctttgctgtcctccctgggatcttgcccctggggtagccctgcttcccttgcagctttcttctctgctgctggtgccttccccagggctgtgcatgggcttagctctttcttcatttctctccctctctcctcttttcttcctgctgtcttagctgggccccctccatccttttatttcctaattgtacctgttgcttccatacccttaaaagcatactccattttctccctagatgtattgaggtataattgacaaagctgcagacatttaaggtgaaccacgggctgctttgatacaggcatgcactgtgcactgatcaccacaatcaagttagtgatcacttcttatcttttttgtggatggtaagaacatttggatctactcccctagcaagctgcaag

SEQ ID NO: 43661 - DNA, 5805 bp, Homo sapiens
aataaaactatgggtacattcttatttttgattgtggcagttttttcataaaaaggctactgaaatcaggcttatttaaaaaatactaataatgttatctaatatagaacagagggtaggaagtctctgtaaacaaacctatatctatatcaagagtgattctaagagaatattctctcccttacccaggtactcaagttgtagggtaacataactagtgtaacgtaactagtgatttccagtcaccttttaggtttacttaggaacattaaaagaaatgctgccattgtagacttcatttcaattatttaatctctttccagttcacgacctttactttcttctggtttcagcaagaaaaacaacttcataagtgtcttacattataatcggctactaatcatcatcaactcaacattagttttaaacagtctgattccataacaaatttgtaatagggatattttctatacattttataatagccatggatagaaaaatagtattatttatatactaaaacattcaagttgttttgtttaaaacatacattgtaaaattttccctcgggaaatttggatttattataggacagttgtagcttttatgaaattgggatcctgaagccatattttcaaatcagaaaaatgaaagcctcattgttgtttttcaaatgttttaagtttccttgataaaaggcagtattaggacttctatttctaggtcaagtctatatttacagtaactaataggaaaatattgaagtctgaggttaccagtacaatgtctgaatgcaaaattctggacactggacaaagtactttagaatcagaggccagcaaagctctggaaggctgtgaacagggacaaatgcaatatggttcagcagacagaaagtcagaagtaagattcagatgtagccaagcagggtgggggacagtgaggggggatgtctagctggacttgaagggcgtatgaaagcagctgtccttgcaggggagatttaaaggaaatgactcttcagggggcactgcatttgcaaaaaaaaaaaaaaaaaaaaaaaaaaatctgatatagtatgttttggaaattccaaaatatttgatattgccagcagaagagttggaaagtggcagaaaataagggtctaaaaatagccataagcgaaagtgcaaagtcttgaaggatagagattatgtctctgaacctggttctcaaaattgttgaattattaactatggagatgcgctgtacagaattgaacttaaaatggtcatctgtgtatagcatgtcatcttaaaaggttactaaaataggaaagaacttgcacaggtataaagtgtgtgccattcctcccgtgggctaagggtcttgtctcacttggtgccactatcaatgcaacaggcacagcagtcgggtgtgccctggatatttctacacctcattcttctaaaagctcccccaagaaaaattaataggaaatcaggtgcttgctgcaggtctttgcactgtgtcaattctaagaaatcctttggcagtgtaaagctttgaaggaaattaaattggagagagattttctctacctttcattcagctcatatagaatcccttacttagctgatatttttgctcatagaattggactcagaactaagtctgttcatttagctttcctttgaatgttaaacataatgaagtacaaggccgtcacctcaccattttatcccctacaacccgcataggcgtacacttatcaccaaacgtttgcacatgtttggctccactgagattcttagtctctatctttatattttgactattttgacatttagaacaaaagtttggaaaactattctcctactgctttagcattctcttatcttagggcttatgaacattgctacatctctgaaacaggcggttcctgcccatatctatcagtgaaaattatacttaaaattctgaagagactcatgtcatccagattttggaggaaaaaggtagcaaataaaaatatacttcttagaagtagatctcagttactacttattttaaatttcacagtagattccatcttttgtagataggggttttgttcaaagtttttgaccaaacatttttattaaatattttcaatagtattataagtgatctgacatttttggtaacaaaacaaccaaagaactgacttgagtaaagctgaaatgttgctgaaccagaatctaatccttactccgtcattttcttaccagggattttgatttgactgaccagtttcaatccacagtaacagctttgttcctaagagactataaatcaaggaaatactcactaccaggcaattcctcctgcaattcggggtctgtgctgttattatgaagcaactgacagcaaacatttgctgcaagtatgagcgcagatttggatgaggtgtgcggtgtttttggtttcactctttatctctgaaacctatctgcttgtgagaaaaattgtgcaagaaaagaagttttactgccacatacctcagctgtcctagaactcaatgcagaggcttcgcttcctttctttccttggattctgagccgggggagcacaatgggggtcttgtgctctgggccagcaaggcatgcagatactcggaaaggaggtgtgaacggcttccaatacctacactgtttgctttacaactaccccaactaaatcaaacaggacaccaagacactcagtccagggtaagcaagtacaaaatccactggctattatgacccacatagagaacagaattcttcaatttaagtgtgtacatagctgtgttaagagttaaataaatcatttacgaggcttaaaaagaaatgcttctcatgtagttctttttcatgtagttctctgaatacaagtcaaagtgcaggtcacgaaagaatccattgttcacaagcgagaaatgttgttggctgtgaggacggttcagaacaagccatcgtagtctgctcaaacagtaaatattggttttaaaaccccaaagcatatcggtcatgttttttatcttccaattgctagaaccaaaattcactgaaacaactctatgtctctgatactattttctagaaatgtgtgtgtatgcgtgtgtgtatgtgtctgtgtatgtttgtttggtaaatccaaatcacacaatcaacgtaaatctttcaggctaagttttgccccagttatttttatgctgtgctttcaaaaaggtcaaaaaagcttacctctgtcagtgtactgggacgctcaggaagccccttctccgcctcggcctcagcgtgcagacatatgccctgggagcccacaatctgttaacaggaagcaggtaaacccgagagcgtccgcctgcgttccagtccagtgcccgtcccagcacacacctgctttttcagacctgccgctcatatgccacagccacgcacaggaccagcgttagcagagtgcaacaccctccgtttggatccctcgttttcagggtaagcagctagggagctgctgagataatattgcagggaaagcttgccttcccaagacaaaaacctttgctgctgcctgatagcagatatgcagcattatcactctgcattccacattctccaatcagctaattggaacggcagtcaacagcctgtccaaaaggcagcttgcaggcctgcgtggctgtgatcattgtatactaacatgcccattgcttctctcttccctgaagagatgtataaaagaggcttcttccagggcgaagctcagcagaatatgccacactgttttccataagtaaaatggctggtcctctcagctctgctgcagacagctcattgggttccactggcttttcgtagccatagcaacaaccaacagacagacttagcaagcatggctgatcatgtgcagcacactcacacagcttgttaatttcttttcatcaaactcatcatttttttgaggagggtagcttctgttatctttctacacatttcaccgatagtgcaagtgctccgatttttctgctctcctgaagaactcttttttatatgagccggggctatgtatgaaatcgaggaagtgaagccctattagtggctatccaggttaataacatgcaaatcacttaagagaccctaactggaagcattgtcaaaacaagccccaccttccagtcatagaatgagtgcagagagctgcaaacgggagagttacactttttgtttttaaatgataatcttagagccacttaattgaaacaaaaccctgtgaattgctatatagggtcagaataataactaaatcaggtagactattttaataagatctttaaatatccatttacttatggctcaacttatctgattactttaagatgctttttatgcaatttaaaatagaatttttaaaaaatcctattgcttctacggcagaaaatgattctttaactcaatcttatttgtaaattaaaaattctttttaaaaaatccgcacctaattaaaaattctttgactttaaacattaccttcaaggcaagaatagttttacttcctcagtaaaatggatcacattccacccgtccataacatttcacctcctctgggaatctaccatgattaatgccatgaacaacgtaaatcttctgcagaacccccaggcttttcttctttttcaggactctatcaccagtcatattctatctgatatatttccaaggcactgtcccatttatttttgtttctagcaatctgtttcaaatagttatgttaacactttggacttgtaaatatagatgttctatttgctaagtagtcattgatttaggattccgtcagtattgcgtttccctacccatgttaacactcctgccttcagtattaattcccaaattttgactgcataggaatcctgtggatgtagatttggggatgcccgctccccttcctccccaaccggattcacattaggtaggtctgagccacccagggtcagcgtatccatggaggacaagtgggtggcgctttcctgcttgggagagtcctcaccgcttcagatcgcctccagccagcctaccttttctcactgaagttcccttccctgaagttattttgcatttgctgttgctgagcgtgcccctgccttcgccctcagcctcccattctactattcactgcccacgtttcagaatcctgcattacacaccatttccttgccctgcagatgctgctactattaaaaaccttctcaatctgactgctcctcgccccagcacctttaacctccatcccaatctgcctcctcttttatcttccaacacctggcccaaatggaccacctcactcatgactctcccaggtggggtctgagcgacctcttctgcgactcccctgtaccggggtccacctctgctattacaggccttgtcacgccctgggacttcttagcagttctccttttatgtctgactcccagactgttctatcaactctctggaagccaatctggtccatgtcttctttgccctccatgcttggaatattctaatttctcaatgcctctaaatgaggacctacgacactgtatgaatagggactgatgactggctggtgtgaaatctgtgttttaatttacttttcaacatcacacatttgttgactcatcacttcagaagaacttcagtgattttgacaaaatgctggcatgttacaaaaggatatcaagaaaactctaggtgcacttgatgttttagggtggcttttcttttcattgtatctctgaaaatgtctttataccctcac

SEQ ID NO: 43662 - DNA, 869 bp, Homo sapiens
taatatgtgtcagtaccaggtggggaaaaaataatggtgttatccaataataacaaaagaaaaaaaaaaccacccacaattaaccccctcccacagccctgttaaccagtcccaaacatataaatacatcttgctgtagctagagaaaagtactcctggcttttattaaacctgcagtggggagagattctgcaagcaatacagaaaaggctgcacttgctcccaaggaatttgactgtttatacttcataatgataagcttaaaaagcgacctggaaagagagggctggctgctttcatgctcctgtgaggggccacactttgttcttggagaggcactctgaccacattaatagagtgtagctcccatgacctttcccacttagcattgtgtcctgtggcagcagtggcccccaggtacttccgggcaacgtgccaccctacccagtgcagaaaaagcactgggctctgccgtcacggcattgttgaattagtaacgaaacgcaccaggctcagcaaacaaaacctggcaagaaggattttaaaacaaatgcttctggtttcacctgagccactgaaacaaattagaaggtgctgggtgaaactgggcagcttccgtaaactctgaagaagatcatgctaaagccctcagctgccaaatgtgcaaatctcaaaagaagtgaaaattagagggtcaccttgtgtcttctagaagtgcttctgaaatacatgttcagtaagattcattggtcaagataataagatgggcccaagtgatgtattaatacaatcaggtacacgttttaggatccaacggtccaacaacaagtggaaaatactgttgaaaaataaaaatccccaatccgcac

SEQ ID NO: 43663 - DNA, 4232 bp, Homo sapiens
atttttttctttgatttccctgattactattattaacctagatgtagcacattgaatggtgcttaggaaaatagtgagaaaatgcacattctggttggccctctagatgctctcaaatcatagtttggagaatgagccactaagctattggaattttcccaatgaatggatttgcaagatgaccatatagaggtctgaaacccagcacacataggtgctgtgaggtgggtcagcacatttttgccacctagctctttgaatcacccactatctgattttgagtctgcaaatagaaaatggttatggaaggaagcagctgaacaaatatcatcataaacgctgaagaagtaggagcatatcttttgtgtgttggaagaggcccccttttgatctctgaagtgcaaccaaattaagaaagggagtggcttcttcggggaaagtaaaagctcatggccaaaggatcaagaacattttctcaggatagagacttgctagttccattgcttcttttttcaagtgtaacccaaatgtcttgggttggtgctgtttgttgaagtaacatggttaattatttacctttctcaccatttggctaagattcttttcttatcaaattgccctgtctgaacccaaaacaaacaccctcctgagggcggttagccatcaccttaagctgggtttgtgtgagggtggctggacatttttctactatttttctcacggcctctgttgtttccagtagccattctgctagaaaggcccagagctaacttgtgctactatatgggtacttagggtttgctgtgacttggttcttttttatttttttagacctgctctttataactcttccttatttgggcgctattctaattcctccattcaacacggtgtttcagatttcactagagaaagtagccttttatcttctcaaggtttttctgccatttgaacttttgatcgtacacttgatcgtacactctaaaatggacccaacatggtcatctagaactgggatgatttagtcattaaaaataattagacagcaaaagggatattttgggctcttctcttctttcctccaagactcctacaggagcagattgctctggccaaatgtggcagaagaagagcgggtaggtggggtggcttcaatccacagaggctctgttgctgcagcaactttcagtctaaattccatgcccagacgaggcagctattcttagccttgactttggaaatagttttctcccttcttcaagtacatcactcttgaccttttatctttactttaaaggtcttgtgcagctgaatcctttatttgtttcctcaaatcatttttaggaacaaggaagatgttagaataggaaaggaataacaaatggatagggccctgaggggttaaatcacctggccagatcacacattgagtaagcagcacctgctctccttcagtgagtccggcattccatgaagggttactaagtttttattatgccgcaggtatgtggacgggtgttggccatggagtggtaaccaagacagagtcctttccctcagggagcttacagtggagactgaaggacagttctcttgactcctaaagttctattctttccactacactctgagatgttaccagtgctttaaaaaatacatttcctatttttccaaataggactgaactgaggcaaaactgtgaagtcaacaagacctcaatgctgtcatctctaaagtggaactaatactagcaccttattaaaatggtgaaagattaaatgaagtaactccttcaaagggcttagcatagtgtctggcacatactaactgttcaataaatgttaaatagtattaccagtattgtgttctctggttttaatatgatcaatccttttattgaagagaagcaatttcaatatatttgaaacttacgaatattagttctttgaatattaacacttggtaaggcagcagctttcagtctttgcacttatgccatgatagatggtttccctaaattaagctgaatcatgttataggtagacattcccttgtctggaatcttttctaggcactagttaagatttaaaatcatctaactttatgtaaaaaccccatctgatgctgttacatatctataaaaaagattgtattattttcttagattttaagattctacctttgcttaaaagccttagagtattaaatagccttaaatcaaaaatttaccctgaccaactataataagattatgtttacttactttacttctatctatcttggctggttaaaaataaactccacattttgacttagaagtcaatgattttgatttgtgtcaaatgagagtatgggagaatttggtcaccatggacgtggtttggtcacaatttgttttggttattataggttaaagcagaatccagtgatagctgatgaaacagaattattccttttcttaatttcagtttcttatatcttaaagttactctcatcccaagcttaaaattggtctaggatgtgcacagttgtaacttttttctgaagatttatttaaaagcacatttggttaccagcagtctatgaaaccttccttgtaataattcaatttgctcaaagttctcctgtggaaaaaagtgtatatgtatcttccccataaaggactttgagagaacagtaacctactttcacagcataggttggagaccgtttctgaacaagataaaactatcattcatgattagtccgaattcaggggtaatgctgaggtctaatattttttgaaacttatgtttacatccttgataaaattcttttcttctagtgatggcagaaacctaaagcagttttgatattctaaggtctttcctatctagctgttacagagtattaaaagcactactgtacatagttggaacatttttgttatcacattttcttcatatgtggtcttaaaatggctaattccaaagaacaaaagataagttatccatggaaaatgaagtcatgattttatctgtaccaccccatctgactataactaccatgcacattgtgtccaagtaatgtgaacatgtctggttggcacagctacaatagcagggctgataagtaactgatcagcttatccacagcattcctttcatgggaggtcactgtcccctttgtttctaaaagtccagcaaagcttaagcattccagaacctggtaattcaaattaattacatggtatcatgtacatggctcctgggattatcaccttgtaatactgtggcttctatgcttttaagtttgcctaattaaatcctttcaaatgaaaccagttaagcaattagtgctactacactatgtaattaatatatgccttaaacacactttttaaatggaatggtttgaaaaagaaatactttggataatagattactacaatacacaaaatacaaaaggattatcagtttttaaaattacataactatgggattcatcatatttctccatatgaaaaatgggaattatagtatcaaattcatagggttttataaggatttacacaggacatttaattcaattaaatttaatgtttagttttcaattaatatttcatattcattctcaactaatctttatttcagttaatacaaaaatgaaaatgtaataaaatgcaacactacaatcatagtggaaataattcgtttcatatattgcattcaaaagcacttgatgtttttgcgtcatataaatagtgtctatcttcctcattggactgacagctccaggagtctgattcctggaacataacatatgctccacaaagagttctagaattaaccaatgggcagtatgaacataaattatgacattggaaatgccaattaatagatatccagatgataaaataatgtttaaacagccttcaaatgtatgcttcataagtaaacacaaagtataaaatatatacacctgtattagtcaattctcgtgctgctgtagagaggtttaattggcttgtggttccacaggctgtacaggaagcatgatgctggcatctgcttctggggaggattcagacaacctacactcatggtggaaggcaaaggatcttgttaaaccatagaatccgcccccgtgagccaattacctcccaccaggctccacctccaacattgaggattacaattcaagatgagatttgggctgggacagatccaaaccatatgaacacttaggacaca

SEQ ID NO: 43664 - DNA, 2534 bp, Homo sapiens
aatattgctggggaacccaaatacgaatgtaataaacgatgacccagagctccagtgtggtgctgattaaaaggtttaggtgaagagctacagatgtctacttgggactcagatcaagaaccgatttctcatttgcttaaaaaagaagaatcatggagcgttttacagaagcagttgggaagtgaatgtgtgagcatcatactgacctgctgaggctaactgaaagctttccctgtcacactgtctcactgtacccttccacacggctttactttctgctcaaagcagcagctactctgccattgctctcatcagagtagacagataaaaggtcagtttataggagaggtcaggtgggacacagacaaagacaatagtgattagaaggacaaacagcagaaaagtctttcataatagtttagtaaaagcaatttaaataacaacaaacaatatttactaagtgattataatgtacacaccaccaagtgctttagggaaatcgctcatttctttttcacaatgaacctatgaattgggcatgaattttatccccgtgtcacaccgagcctcagaaagtttcataatttgccaaggtcacacaaatagaaagtggcggggtctctattcaaacccagctcatgaggcaccagagcttgacactacactgtgtaactataatgtcagtcacacccaaggatcaaatacctcttgtccacattatttatagaaaaatgttcttttgaattttaacacttaaaagtgtagagacaaagaaattatgcgagaacttggagtgtaacaaaaggtgcatttttgctaaaaactggctctgtgatctagggagagtcacccatgacctcttgactccagagtcctcagttcacaaagatagctaagctgcctcgaattctaaagttgtatggtgtttctgttcacacagcacttgaacatctacttactgcccttcacttatggatatttaattatgagtgaagggttttgaagagagactttatattattcacattatacctcttgcctctgcataggacctcacattcagttctaatctttatacgcaccagaaacaaaattacataaatctaagtaaacttgctcctatcaaatgtgctccggaaaattgccaagtttatatggatttttaaattttacatcaaacagatcctatcaactatttgtccctagaaaaaaaaaagatgaaaggccagaactgcctacaagttgcaatgtcattgactttccagcaagcattgcagctgtcctgggaaaactgaacctgaaatatgtttttgaaactgctgaatttcagcttctagtgtttttcacattttagaaacagggaaactattagctttaaaatgcttgtatttaatagtttttttcttaagcatttcaaaaaccccaggtgaaaagctaagtatgagaaaggttctcatgcaatcgttaatcaaatgcaactaggttggaagaagatacatgcttattgctttgcggaagtggcttttgttctaactgaataggttgaggtagattattcctatttaaacttagaaacggaacctctaatacaattgttaacattcctgcagtgaggtcgtttcatacaaatgtaactgtgacaggctgagatattccttttgcaaagcctataatctctatgtagttaatcagcataaagtattaaaatcataaatatgaaaagaatctcaaaagaaaaatgatttaaattactctaagactatacagactatccccaaaggcataatttctttaatagaaaaaaaaaaaacccacattgctttgagaacaaaaaagattctggattcttttgtagggctgcttgggccagtcccacctcttccacttgaagttttttgtttgtttgcttttctttgaatgtggagaaagtctctagcagccttccatttcctctggtctgaaagtctgtgtccctactgaagttctacagcttcttttataacatttcccatttgacactaattccaacagatgatgcttttctaagtttgtgttgtttataatttacagcacctggttgtagccagagtcccttgcatctccccagcagggtgtgcgggacccatactacctgcacccaggcctggctggccccgcccacaggccttagcttcctgcccagcttcccggctgcagtgggcctagctataacttgctctgttcccatggctgtgaagccatggccgcagcctctgccatctcatctcctcacgctgtgggttgcctctagctcccctgggggcttgggcaggccaccatcatgccaggggcgtcagaaccctggaaattctccaccctcctcaactcacggatgcgctggttgccccaagggctgtctggggggctcacggaggagagcctggaggagagggggaattgacactggccctcagagaggacacagagggcagagccagcagattcgagatgcagtagttccattagggcctcactcccatgtgacacaacagccg

SEQ ID NO: 43665 - DNA, 1038 bp, Homo sapiens
gtgctcagccaccacagggttctcacggtgtttatttctatgttgtttctttgtccttccagcaggcaccgctgctttccatggggcataaactggacatctctttctcaccctgcctttgaggcactgactcttcaaggccccaacactgcacgatgttattttgcaaggaaggggagaacactgctctttctcataacatgcagtctgtcctcagaaagatccagtaacggtgggacttatgctccccattgtgaaaaagaattttaaacttgcagaggggagctaagtcagaagacaaatgcaaatggcaaacactcggggtaacttggatacaagcctctgacttaacctcagccgctggcttggagcagagaaagagggcatggagaagatgagtaagattctaagaatttccaaatgagtcattagaccaggactgaaacagtttgagaacactgcgctgggattcctcaggctattttacccaggactcatttccttactgcagttctgaagacaatgaccctggccccaggggtcggtccagtaggagggctgcaagggatcttttctgctgcatttacaacatccacgtattctgcagtcagagttcccaagaacaagccggagcacactgagcgctccctagggaggaggcctggggagagcttaagagaggaatgtactccaagctttatgtgcttgtaatttgtttatagtgctgtaaagagttgtttttcgatgggactgtcttctgagtcctgtacaataaaggacatacgtataaaactctaaaatgtaaattaaaagctgaaccaccataaaataaaggcagtttgtacaaactgaaatattcagtgctttgggtctgggtgaggtggaacaagaaaccctaggtaaattgtagcagcgttagatgtttggcctgtttaaagaaggatccttagagggatggagtcataaacacagggcacactggcctcagaacagaactgagagggctccagtaagcagagtggagacataaagcatcct

SEQ ID NO: 43666 - DNA, 1421 bp, Homo sapiens
tccttgccccactcccccatcctcatcaacacccactaatttaactctattggaaatcatcctcctggttgaagtgtcatatgcaaacctcagacctaaaatcagcagatgtattattaccggtctcccttgagaactggttaaaaaacaacaacaaaaataagaacaaaacctgaaagacttaggagatctataggctttaacgggtattaagttctggaatgggaacacggaaacgtacagaacaccatttcaagaacatccttcctaaaggaatgagttcatccactcaggacattttcaaggcactcttagcctaacttttagacgtttccttccactttaagcacgttatatttttctttagtcctcgataatgtgacctctggttctggtctcagagaacgctagtcaagctgtggcaccatcgggttttaaagtctgctcccaattttttatcagatactgtactatgaaaattctagctctttcttgataaacatgccttttaatttatcttacacaaggtgctgagatttttcttttaatgataaaacagggttggctctgaaataccaactgtccacaaactggtttcaaatggcatgatgtaactaggctttttgccatgggtctctgtgaactctcgcccaggaaatgcaggttttgatatgtacaaattgccaaaggaaattccagaaggcctagaaagcctaaaaaatgcagccatatttaagagtgttttctgttttctaattcttgcattggtttctgtggttaaaagattcctgtcaccagccagttgtcattgtaagatactgattaccaaggagtggccggggttgctagcgttccctgagtaccagtgctgagattaaatgtgccagtgttcccagcctctcagcaaacaaaccaagcgcagtgtttaccaggaagctgaaatggagaacctgtcccaaatcagacttaatttcatttaattcacttaccctaattgttagtaagaagactgaatttaaattaaacactttgccttggaactgggttttacttaaatagaactgtccctcctatggaaaacaagtatacactcacatgcatattgcacttaatgcacattcaattttgtaagggacatgagccccattcaagagcgtcatgtttcttcctcctgtttcttgttccatcctatacagtggaggtaataacggattcgcttgctttagttcaaatcattagaaagaattatttctaggcaaaacagagacagtttcacctcatttctcttttttctccatctcaaaattgacagttctaatctacataacaaattatactttatgacaagctacttgtttcctatcttgaatattgtcttgaaacctcagtaaaactcgtagattactgccaccttgcaattt

SEQ ID NO: 43667 - DNA, 1568 bp, Homo sapiens
agtataaaatactcgctgtgatcccaatatttctgtgaaaaacaggcatgcataactcgaggagaaaagatcaaaaaagatataacccaatggttttatgaaggcggtgaaattacagagaatctgttcattggaatgcaagctttctgagggtaagagttcgggtcagtcttgttcagcacctggaacaggcctggttcaaaaataagggccccaaagatgcatgctgaatgacttaattttcttatttttcatacttatgatttccaaatttctgttgtaattgacaaaatgcatttttaaggtcctaatcaagctaagaagcagctttagggccaaggcgttttctaatgccatttcccacacacattccattctctactgatacttttagatagtttcataaggaagctaactgtaaataaactctgctgtatctttatgtatttcatcattgtgttcagttacttgctgacactaaccttccattagttgtccttggctggaattgtgtgagtgaccttgctcctaacataggaacgaggccatttattttatcccaaagttaaagcactattattggttttaccttaccctgattttttttttttttgcatgctacagtatattgtgtttggcacaatgcttcacatatgtgaatatttatattttaaaaatccggactctttttatttttattatggaatatctggctgaatgggatcagatttcctcatgaaagtataggggtgactcagagaaactgtgaggcagtcatttggaaattccctggaagttctaataccaggaagtatgtcctcaactacttgttttatagaacatccaaatctgagggtaaaactttcctggttaaaaataaggcaagaacaaataaataaaatagtaaggaataaatgcaagatatctattggatgacatagtaaatatagttaataacaatttgcaaattgcaaacagagtacattttaagtgttctcaccacaaaaaaataagcacatgaggtgatacatatgttcattagcttgaggtggccatcccacaatgtttatatatttcaaaacatcatgttagtataccataaatatatttggttttcatttatcaactaaaaaaattaattaaaaacaacaaaaaataaaaccaaaaacgtctcccggaggcagggatttagtccctgtggccaattcccatcgctctgtaactgagtgagtctgcataggaagtatgtttgttgaagcatatagttgtagagagtgacttttcattttacagtgcttagttttaaaaaattatgcacataatctatgactaaattttctctgttaaagtttcaggcaacgcagatgtgaagagaataaatatgaaagtctccctcctggccctggcttgcagccctctgctccctttagaggtaaaccctggaaagtgctttgcatatgtctttccaggactgatcaggtccatgcttacgtgcatatgtaactacacatgacacacatatacagtgttgcttggcttatcataaaaggcgttctagagtctgtatt

SEQ ID NO: 43668 - DNA, 664 bp, Homo sapiens
gaaattagagttttattacatgaatcttttgatcagttgtcatcttgggaagactaacttcaataattggtctggagagaggatggggcaaaaacttacatggggaattctatagcctctgtgtgaggaagaggttagagataaaaatggtgtttttacttaaaaaaaaaaaaaaaagaaaaagaaaggagcaacatgcatgttcagtcctgattgctttctggatcttgctaaagctgctagaacatttcctgtgttatcgattttgtatattacctcagttcacctctgctgacagcagttggtttagctgcactgggattcatccaatattcccaaccgtgatgttaattctatggcaaagtaaataaaagctctgttctgacgtcataatcgctgagttggaacctggctttgccacaggcatgccttcacagaagtcacttaactaagtctaggttcctcatctgtgaactgagaaaactaaaagcactgattccatggggtgctgtgagtattaagtccatggaaggttctcagggggtgccttcccggagcaaaatatgcatgtaacaaatatcagccatcattatttctactaaagcactgaaagaaacacaactaaaagacctaaaacacagctttatattttatagtgattttg

SEQ ID NO: 43669 - DNA, 911 bp, Homo sapiens
aacttctttctccctaaaatctataaaaccaagccataacccgaccacctcagacagcctctgtcaggaccccttgagactgttctctgagtcatggccactcatattggtgcagaataaacctcttcagctgttttacagagtttggttttgccagtaacactcacgctttgcactttgtccacctcgtccttggggtatcctcactctaaaccacagtgtttagtatatggttggcacttgatacatattgctgaataaatgatcaggccctttaagaactggttaagaacaaaacaaaagcaagactgccctttctatggaaaaataaatacttagatgtccagacatgtttatactcaacttcctgaatttcccaaaaggaaatgcggggaggggatgagatgaggtctgctctagttaacttgcttggaagcagcaattttgatcatggaactattaaaatgtatgtgaccttccaaaaaaaataaagaggggaaatagtttcaatgttccaaactccctctttgggtctgaaacatgtgtcactggcaggtcaccctcccgggagtgcatgtctgaaacgtgtcactggcaggtcaccctcctgggagtgcacgcctgcacgaagcccatgtttggctgtgcctggagtgtctccattagcgctggcacataatgctgcagcctgcgccagctgcttttcaaacagattcactggcaacagaaaaggaagaaaaaaaaaatccaaggtcttagggtacatttttttcattctctttctacagctaaaaggaagctggaagcttgagaaggattcacagtagctgaataatagccagaaagggagattagcaaggagcattgtgagagctgggagatttttcttgggtttagcacgagaagaatgt

SEQ ID NO: 43670 - DNA, 2208 bp, Homo sapiens
gtaatcgtgtttggcaatgagaccttgttgcatgcttgctaatatcccactggtcaaagctagtcaaatggccaagcctagagtcagcgtgggagaaggccacacaagggtttgaattctgaggacgagtctctttcattgaaggccaaagaaacagtctacctcagagggttgctggggagctataatgcaaagaataaacctcaccctgccttcaaggcgctcacagagaagaaatcttttgaatattagtgaagttttcctggacatcccaatggatagatgtgagggacagtcacgtactcaggacatctgtttgcttatggtgttatgttacagatgtcacaaatgaaaatcagagacatgtagccctgagcccagtaactataaagcggtctagctgaagctggagcccacaagagggcactttgcaccatgatgcacgcttgtttcttgccatcagctctgcaatgagttcaagctaatgccatgtcccagccgtccagttgttttatgacttgtgtgattgaagcatatggtggcttgtggcatgttcttaggcaaaccactcacctccctaggtttcgttttcctaatttctcaaacaagggagttagattaggtggtctatagttccttccaattgtgatatttcactatataacaatatagttataatagatcatagcacatctgtaatgaaaaaaagtgagttcatttcttaacaagtacatttacttaactagttggagtcattaaagcaaattaagaacgaaattcttagttaatctgaacttttctgggcatactgatctgttccctaacgcgtctgaccgtggaaaagtggatcagcaggagtgggactggctctcagctttgccatgtttggctctttctctgctgtgaaactcagtttcttcctggatcaagaggttaatttctgccggtgttattttacagtgttgcaaagagataaaagccagacgaaagaagggaaagtacttcagctttgattagggatttttttttctgtccctgtgaccatacactactcaattctgacagcttcgcatgagtctagcagaaaattgagggattcactgttattccttaacttgcagaggtccagacccgcccacatcaaatggtgaggtccccactttcaactttagctgttgctaaatctgtgaccctttcaatgaaatccaaggatctcagcttaaaaaaagttaaaataaaataaaaactaggtgtttttcagaggcggtttgaaacgcctctctgaggttgtcagagattgtttttgttttctccctttgcccttcttggaatgcaccaaacataaaagcattttttttcaagctttactttcactttcgagagtgccgtctatttgccacacacttccctgatgaaatgtctggatttggactaaagaaaaaaggaaaggctagcagtcatccaagtaagtgaaggtgttcatttcacgttcttactgggcagggtctctcttgctgagtagagtttgctagcagaatgcatgtggttttagccttctttggtctttctttgatctggtgcttgaaatctagtcagaattattcaggaaggaaagtggaagaaaagggatatgatatgggcatgggagaagggtataactcagaacacaagtaatagcaccaatatctagttaatgtgataatgtatttatgcagtatttaatttttttctctgtagcattctgtacctggaaaaaacacattagggaagctatggaaatcattttgcaacagtctttttagcaaatcacatctttgccttaaagaaacaaaactccaagaggttaaaagagcgtatccccttttgttagttttattggctggaggggagacaggagctggcattgtatgacaatgtcttagataggagagaacattcaggtatgcctaggagtaagtaaatggctttctttcacctaatgaaggataatggaagaagtggagaagtggaaagttgttaaggtgtatgggaagatcagaaactggtatcggcaattgtggggtactcgggtaaaaatggagttggcttcagcaagttgattcccaggtttacagatgattacgtgctggtatgtgtcttcatatgggcgtgcctgtgtatgaacctactacaaaggttgcaaagtttacaaatcaaactatggatagt

SEQ ID NO: 43671 - DNA, 1408 bp, Homo sapiens
gtggatgctgctgtttcaagctcgttcgcccaaatacatctttctacccaccttccctatcgtcagagaggtggcctgaccccagcacgtgcaagcttgtcaggctgggtaagttccagaaccttctggagccaggattctctttcccagccctgggccctgagctcggcggatgggatctgcgaggctcggggcgcaggggaaatgggggcgtgttcctttaaggcggaaccaggcggggagtgggacgtcccccgcgggcacagcccgagccgcacctggggcccaattagcctggagcgcggccgggtgtgttgaacgtagcaaccgcgggcggcgggcggcgggcggcgggcgtctggggcgggcggcggccgcgcttcccggggctcctggcccttcggccctcgggggtctcacggcgctgggacgaggcggggctgctctccgcagccggggcgctcggcggacggacccgggccggggaagggcgaccccagcggcgcggagctgagcgtcctcggggaggagagggagccaggggcctccggggctccgggtgcggggacctcaggctcctcgccccggcccgggccgcctcggccggatctccgcggtctgaactctcgggcggcggcgaggacggcgtgtccactgtcgaggcatgaaggctgctgtgctggaccttgggtctctcttggccaaactcttcgagacctcgacggcgccccccgcaggcccctcctccagaccctcgggaggtgctgccgctgcagggtcggggggctccagggcgggcaccccgttgggtaccgccccgaccctcctccgcgccctggctccggactccccctccgcctcgcggcggtcgcccgccccgctgctctcctccccctactcccggggctccgccgccagccgcgccgcgggagcagtggggaccctgctctcttggcccagtagccctagagcgggtaaagccccgccccagccccccactccctccggcgggggctgctcccctgctcgcctggtggtcccagcgcggccgccctcgggccccggcggggtctgggccgcgctccccaggaacccgctccagcctggccccggagagcgagagctcggcgcctgcgtggcccccggggctggccccagaaccctgttccttacgctgcctgacatcggcgaggagggggcctcggacggcgactccggggatggcgaagcgtgagtagcagcgtggtccgggcgcgtgtaccttttgccgggacccccgacccctccgcctgccgcactcaccttcgcaggtgcacttcaggaaatgaaatatttgtagtaactttcataaccccctgggcaccctccttgcacgtttcctgggtttttactccttggctttgcgggc

SEQ ID NO: 43672 - DNA, 2114 bp, Homo sapiens
actggggtttcaccatgttggccaggctggtcttgaactcctgatctcaagtgatccgcccacctcagccttccaaagtgctgggattacaggcgtgagccaccctggctggactactgtttttgttattggtagtgatttcttgtcaccgtgctagggtggtgcatcagaaataaactgggctttttagtaaaaactcggaaatacatggtttacctctgtaaatacgggatacttggcaggagaaattgtacctgttgaaacttagatggcctcagctctcaaaagagactggctacggcaggacggggatgagtgttgtaccggcacccagtgcactaactgtcattactaaaatccctgtcgtgggaaaggcatgcctcgtgcagtgcccaccctctgagactcaaaaatgtagttcacctccgcgacctcaccccttcttcccttagcatgtgaaaatgacggcttggcagtttcaccagctcacaggagagcgtccagctgctctgctcctggtataatcctgggcctccaaaactgaaacgagcacatggtaacgcaagcggcaggcatgctcggggtgtgcaggagatgcaccggcttgtgtgagccggtagggcaggacgggcgtggaagggtccacgtctttagtatgcatgcttagatctagcgttcctgttgatggagtaatggttctcgcattgaccagatccggggcttcattttttaaacctcattcgtccactccccaccccagcctggtgtgcgcaccctttgatggggcggggataggcgagatggtcctgtggttctctgccttcttctggtgaattaaaatccgatttggaagagagaagggcagccagcaccagtatgcacagcccccggccccagagacccgggaaggagtagggaggccgggccgtgcgcggaggagtggccgctgggttggaaacccggcccggcagggagcggggaaggcgcgctttcccggaggtcggcgcggggccggggccggggccggggcccggagcggggatgggcgggcgcagccgggattagctggcgggcgagggcgcagcgcagggaggaggaggggaggcggcgccggcgcgggcggggcggaggatctggagagggaaggggcgtgcgagccccgcggaccccgggcgcgcccgggccgcctgagctgggccagccgcgcggcgggcgcgggcgcgggcgcgggcgcgggcgcgggcgggtggggagccccagccccggggccgcgggggcgcgtgaccggctgtctgcgtggggcccgcgcgcggtgcctctgcctgacggtgcccgagcctagcgcggagcctggcgcgggggctgcgagcacaggcccggggctgatcgtaatcgggtgagtctcatccggcagcagggctcgccttctggccgctctgcaggcgatgtgcgcggtgttctccgcccgcgggccggctgcgtctggcccgggcttccctgcaggcactcgggaagcgtcaggccggccccgggcatggctcacgcggggaagcgttcgccgccaaagggactccttcgtcactgcggtcgctcctgggacttgctggtgttgggtcagggcggtgtgagtgttccgtgctgaggagcggcttcccatggccaccctggagtgcccctgtgtgtccccccatccagaaaaccagcctgcattttaacccgttcagagtacagtgcttatgtcagacagtcctgtcaactaggaatagaaaattttgaaagctgctgtcactgacattagaatttctacaaagcagtgtggcagaggtttgtgggctgtcaagaagcaacctaaaacagtaactctggatgatgattttcctgacagctggaatggagtcatggagattggaactcacccttaacctccatgcgccaacaaatgagtgcagtctagtttagtgactgcacttcagtccaccctacgaagacctgtccccaaatcaacagccttgctctatttaaacagtatggacaggaactagtatagaacttgcatgtctatgtttagaagcttcatggacatgccaccatattcaagttttaaaatacctgtg

SEQ ID NO: 43673 - DNA, 469 bp, Homo sapiens
gatgtgttttggatcataagtcctctgggagtcagaagaaaaatatacttttcacagagtagggtaagatatgaaccaagccctaaatgacaggtgtgattcgttaacatgagaaaggaagggaggctcttcaaagcaaaagcaaaactgcacctggcgtgggagcttctaaacccgcgatctttgtgagactgaagggacacaggcctgaacagaacctgtgcttcggggagcagtggggagaacagagcgtctcagaggcttgtttcactctctagtgtaagtcttctgtgccttttctgttctaaagaaacttttggaattgctacctgcttattgtatttttttggtctctttaaactgctctgacaagttcaatacaacatttcccacttaaaaaaaataggcagtatgaatatcacacaaagagcagtggatgagcctttaaatatcaggcaaaataaacaga

SEQ ID NO: 43674 - DNA, 942 bp, Homo sapiens
tgcagaattacattttcttaaggttttttttatctctctttccctattatgacactataattttatcaggcttaatagtgcagttacataatcaaaatatatttcttcaggtatttatccttaggagacctgatccttagtaatgtctaactaaaagtttccaaatagatgagtgaacgattgagcatgtcgagattttcttttgtgtttttaaggattgcatttattttaaacaagaacatactatccttcatttagtacagaggaaggcatctacaaaaccgtgtgttgagtgccatgcctgacggtacagaacgatcgcgtcttcgagaaagaacagccaccctggaacggttgtcaaggcccagcacaacccacacgttccgggtgggttctctgtttcctgtaactttaattttgaaaaacatttgaaaaaaatgaaacttgtccctgattttatttttcttccagcagtcggatacgcctcgaaaaagttcattgacacaaatggaatttgctgctcacacatggacaggtcaaagtattttgacaggtcagcttttctccatatgtaaataaagtgatgtagtaagtgagatttcaagtttcagacagtgaaatggaagatgatctaccttgataagcctattttgctgtaggagggaatagcaaatgtttggggcctgtggcctgacctcagaaacctcgatcacagagcacacctgcagagacttacttacctgctgtgaggtcaagaagaggggaatgtccaaaagctctcaatgaactgggggcctcactcaaaaaaaaaaaaaaaaaaaaatgctgtcttaggagcagtgagtacctctgtctgctatagcgttttcatgctctatttctaagtgaaactctactctcagattctctttgaaaatctgatgataaaaatgcttgagaaaa

SEQ ID NO: 43675 - DNA, 3136 bp, Homo sapiens
ctcactgctgcccagagcaatctcccttctctccttctggaggggaggggttgtatgttacccgcctggttttatccacagaggttagcagagactgatacagacaaaccctttttctttctaattttagattcaagagcacatgtgcaggtttgttaaatttgcctgacgctgaggtttgagtttctattgatcccctcacctgaatagggaacacagtacccaatacacagtttttcaaccattactccccttccttcctccccctattttagaatccccagtatgtagacaaattgtttacttttatagctgtaattaaccttattatagctcagcctcaaccctttagagaggaggaaactaaagcccatgagacttgcttaaagatactaagtgaacatatttattttttaaagtgttaaagtgattaaacaatgtagacgtgaatgaaataaaaagcgtaagttccccatcttcattcccactccatagagctgatcagtatttttacttgcagacattagtggagccgtagagaaagaaaccttttctccaaaagaaggcattactttacacactccgttctgcaacttgttttgttcacttgctatttcacgtcagcccatgcagatgacttaaaacaaattcaaatggagaaaagccttaggcatgtttttctctgcactaaagaggccctgcaggtggctgtggccaacttatgcagtggcttcgagtgaacgaacgtaattagtaattaagcaaagcgggcatccaggacattcagtttcatcttcctggcactttagtgtttaggaagggcctggcctctcggggagcgacactcctcgcccggccactttgtaagaagcatcgagcgtggaaaaggggctggggtcagcactggggccctctgccgggaagagagactggcggccagcacacgcgtctccccaggctgaaatggggcaccctctcgcggcccttccctcccttcccgggctgggtggcaggtcttggctcttctgcgagtaccccgcggctgcggtctcccggcacccgctgagcagcctcgcccgccttcctctcccacccgcccctgcgtgctctccggggctccggcttcctcggtctggtgcctggtgcgtattttggaaaatacctggctcataaccacctcattgagctcccagtgtcccagtgggccagcggacacacacgggtagctgacttccctaacgtgtccccaaagcctccctggattacagcgcccgctgctccatgtgaccccgcgggagccaggacgcgccccgcctcccggggctgcaagttgcgcagggagcgagcgatgcgcagcagagctgggctccgagccggatgcgccttcctttcctctccagagcaggctgcccgcccgcggaatcccgcacgtagagcaacctcgcagcaccctcagaacagccccgctggggcgcgccgggctgccgcggtgacctttccgacgcccctgaccccgcatccggaggcggccggaagtgtcgccggcctcctcccggcgcagcctccgggcctccagtgcaatcactacgccctggggcccggaaaccgttttccggtctttcgctttcggctggggcgtggaggccgcggtgctgcgtaggccgggccgggcgcaggaacagccccgtggcgccctctctggccgccgcccgggcgggaaacgtcgttccggggaccgggcgaccccgcagcggggagcgcgccaggtccgcgcggggaagtgggcggtgtgcggccggcaccgcctcgcaccacgcccccgcgggcccgcactttcccggagtgcaccccgcggccgccagccggggcgatggcggggctctggctggggctcgtgtggcagaagctgctgctgtggggcgcggcgagtgccctttccctggccggcgccagtctggtcctgagcctgctgcagagggtggcgagctacgcgcggaaatggcagcagatgcggcccatccccacggtggcccgcgcctacccactggtgggccacgcgctgctgatgaagccggacgggcgaggtaagggccggcgctcctcctggagcgcaacggggtccgcagccccgttcccaccctccgatcagccaggaacccgctgcttgtggcgctggccgcaggagagaggagcctgtcaccctgtggagaatgcactcccagttctagtcgttgccccttggcacccgccgacactgctagtgccccatcccaaagtgagcattttctttgtgtgtagcacaggatgcggtatttccaaacccctgccctcggtcttttcccacctcaccgctgctcagctctcaaagccctgccgtttcctcctgccttggcttgggaagccttaggaacagaagctccctgggagcacagagcggttttaaactggccaacaccttaacgcccagagccgccctcctctcgctgccactttggaaaataagagactagagattcactggacgcttcctcccggcatcacaagacttgactgctgcttcagttcccgcttgaccttcatactttagccctttaaaggatgttacataataacaattaagagacggcagggccttcaggcagacttctttggagggtgtcaaacgccttgtttattaaagagtgaattttttaattaaaatcatgttttaaaacagagatggacattttattgatggaaaaaaatcacgttaagttagaaagctctcaaaagtacctggtatttacaactccctgtcagggagggcgaactcgatctcagagttttattttcatcagggattacgttgaggtacccagaaatgagaagatttgcccaaaatggcatattttaaaattggcccagaccagaacccagtttcctctgggattatttgttagtaatcgttttacaggctgagcattaactaactccaaagcttgaaggactttttctcattttcacttgttttctctaataaaaataatgctgtaatttcaacttcacaagatgaggcctcatggaagagtgtttaccaaaatattaaaaatactttgacagaaaaaaatcaagcgaactctttgccaaccaaatatca

SEQ ID NO: 43676 - DNA, 2520 bp, Homo sapiens
ggggtgagcccagcatctgggtccacatggcccagcatggagccaagatctctggaggctgacctggtgctggatctgcaggggatggcctggattctaggcccatgggtgccaacttggagcctggggttgctggggctaacgtggaggctagatagagtcttgggggccaggctagagctggagcaggcctgaagtctaggttttgtgtggccatcttggagcctgaagccccaggggctgacctggtctggggtgagcatggggctgaggccacagaggctggtctggcctgtggcaggcctgaatcctggtgctggggtttactggagtgggcttggtgcttgggatctgtggtgaagttaggttctatcttaactgtccctcctccatgcaagagggcatctctctccatactgtgctgcccaggcttgaaggtgagatgacaccggtaatgtgaaattgtccttcctatacacttctatgtgtcttttcttatttctgtgctgcaaccaggtggcataacctctcacctgattccttagctctagtgaagttattttcgtgcatggatacttgttcgaattgatgtttctgcaagggatgagcgctagaaactcctgttctgacaaactcctattcctattcttgctgacatcactccctgaaatagttaatatacttaacagctgaacacggataggatgttcatggaatatgttgacaggacaaaaagttgaaactgttggcagaaacccaaagtcaatattgaagccaagcaaaatattgcctgcagtgccacattagaacagcttgaagaccgttcatttttaagtgacaagagactcacctccaagaagcaattgtgttttcaggtagcaaatttttattattctgattgtttccaaataaactataatttttaagtataattttttactttatgagaaaattaatcatttatattctaatttcctgagtatgtagagagtatagataatgttcctttatgtagaaatatttaaatgtaagatgattttaaatcagaaagaatatttgattgatttaaaatttttaaatgggctttaatattttcagaggttttctttacttagggatttttggactgacattattgccattatttattaattttgtttttgcccaaatcaagaggtttcataattgtttactctctctctaccaattccctttccaacattactagccacagagttggccaatgaacaataaacacaacagtagtctggaggtctcaatttgtatcttgggaagcattataaattttccaactccctagacacaaatgtaccaaaaaaaaacccttgttttctataccagtaattgtgtgctttgtcttgcaattcagacatttacaagaaaatctaaatcaccttaaattaagatttatgttaaatgtggtctaaaaccagcagagttatgtattgttttcttttttagaatgattttattcaagcaagcaacttatttcatttccttgtttgctacagtttcctgtggtaagtgaattatctataaaacatggaattcaggctaagacaggagtagccaagcaagtggcaccacccctggagaaagctattgaacatacagcttcgggggtggagattgtccctgatgattcaggacacgtgtctatttaatgttccacaacaaggaccacttgtcaggtatattgctgtagacatatgttgcagaccagaggaaggagctcagaagtaggaatgtcttgggacttgtgttaacaaaaacttctgttcgcagatgacactctgcaaagcaaaacttgaaacaaaaaaaaattagtcctctatttttattatcaacagtaaaaaattaaactttatctgaaaattcaaaagagtgctaggcattttatagtgtctgggtccaatccaagtatctgttaggaacaccatacatagttttactctggaccgctagggaaccatttcaaaaatgaaagtaactggtttaaatttaacttagcaaaccatgcatttggatagttctaggtgaatagctttcaacaccagatttagatctcatttctctattaatttcattaatttttggagaataaaaatgattctggacatttcattaatcattacagagggagttttctctgtgtccccacaaggcatgattctgggtctatggtgacttaagagggccacacaacaatgagtatttaattttcctcagatgtatggctacaataaacatctataggtaaggtttacattcataaagagacctttttttttccaggaaaaaagacttttattccccctaaatcacaactcccctgtgtctgtccctcaaccctgatttctcttctaaaccgtaatttacaaacccatgtgcaaacccactgaaaggtgagaaggagcataagccagagacactgggaaccacagccaactacagggggtttttcatttttttgttttgttttgttttttggcaaaataa

SEQ ID NO: 43677 - DNA, 4214 bp, Homo sapiens
ccctggaggctcagtggatatgggctattgcaatagtaattcaaggagcatttttaggcctggcgtggtggctcacgcctgtaattccaacagtttaggagatcaaggcaggtggatcacttgagcataggagttcgagactagcctggccaatgtgacgaaaccccatctccacaaaaattagctgggcatggtggtgcgcacctgtaatcccagctcccccagaagctgaggcaggaggaccgcttgagcccggggatgtcgtggctgcagtgagctgagatggcaccactgcatcactgcattccagcctgggcaacagagtgagactgtctcaaaaaaaggaagcattgttaggtataaattattattattattattattagtagtagtagtagtagtagtagtactgagacggagtcttgctctgttgcccaggctggagtgcagtggtgcaatcttggctcactgcaatctctgcctcccgggttcacgccattctcctgcctcagcctccggagtagctgggactacaggcacccgccactgtgcttggctaattttttgtatttttagtagagacgggtttcaccatgttagccagaatggtctcgatctgctgaccttgtgatccacccgcctcggcctcccaaagtgctgggattacaggcttgagccaccacacccagccctgttaggtataaattatttcataaaattcagacttgtaaatttatggtagcctttggaatgggtgatagatgtcctatgccacacaaattcctcacatgccgaggctcaccgtaactgataccagctcgcttgattcagttcagttaaactgaacaacatttacacagaattggcgatttacaaaatcttatgtaagttaagtagaaaaacagaaaaaagttttctgaaagagtttgggtttttccttcaatgctcaagacagaggtccccaacctttttggcaccagggaccagttttgtggaagacagtttttccatggaccagcatggtggtgggggatgattctggaatgattcaagtgcatgacatttattatgcactttatttctattattactacattgtaatatataatgaaataattatgcaactcaccataatgtagaatcagtgggagctctgagcttgttttcctgcaactagacagtcccatctgagggtgatgggagacagtgacagatcatcaggcattagattctcataaggagcctagatccctcacatgtgcagttcataacagggtttgagctcctatgagagtctcatgctgctgcggatctggcaggaggcagagctcaggcggttatgcttgctggcctgccactcacctcctgctgtgcggcctggctgctaacaggccatggaccaggtactgttctgggccccgggggttgggaacccctgctcagagacacaccgggtggtaggaggagctaaaggtggagagggtgaaggaaaatatgaggtctgggctatccacaaaccagatagcaggaaactgaagagttaaacatttacttcagaattgaatggcttttgtaaaatctggctagattccatgaaacgattttaaaaatgcactatttaaattttgcctttgcatgcgatgaagacattagtctttgttcatgtggatgtttttttatgtttaaaagggaaaaaatggtttgcaatgaaacttttatctcagtctttgagtattgatcatggggtgttggaacaggactttggaatgcttgcagggtaaacctttggcctctgttagtcagggaatgacctagtttggcaaaacagaggagagttttgaaatatggaactttcccgaggcatacattgtcattttaaagtggtcaatcaaagcccagtaggactgggctggtgtcttggtgactcactgtgtgctcatatacaggggtaactgaggagcccttcacacaggtctagcctcgtgggactaaaaagtgtgacatgggctaggaaaatgcgaggctgggatgccttcactcccatgaggaagcgtgacgggaggaggcgtgggccactggcagttctacttcacaaaggctgctggcagtgtcaatcctgcaagctggccttgccctcctgtggcggcagtgtacacgtggcatgcaagcacatgcacaagccacctggctccaaggtcagccaagggctccaacatctgtctcagtccctgccaaggcatgggaaccccccacgtaaacttggaacttttcctttcaattgttgcttatgtctgtcactttacttgactgtgagcagcttctagggaggctctctcattcatagtgcatatcatgggcatccagtaaacggctaatgatgatgatacacctttattacaaaaataaaggcaatggagactgaagaggtgaaatgattagctcaaggtcactggcaaggacagagctggaacaaagctcagcattcctatgccaggcaatgtcctctcactgatatccggttgcttctcactaggagaaggatgaaagatgacagagcatttataaccaccatttgttattttcattatcaactgacactggtgtttctctgcccggagcgattttgtcctcccttcacctcaggaaacattcggcaacgtctagagacacttttggttgtcctaatgggagagggtatgcaactggctgtagtgggtagaggccagggatgcagctaaacatcctgcagtgtgtgggacagcccctcgcaagagagagttatcctgccccaatatcaataatgccagggttgggaaagcctgatctcatgtcagcattaaaaccttgtaatgaaaagaggacatttcggccgggcgcggtggctcacgcctggaatcccagcactttgggaggctgaggtgggcggatcgcgagatcaggagatcgagactatcctggctaacacggtgaaaccccgtctctacttaaaatacaaaaaaaaaaaattagccgggcgtggtggcaggcacctgcagtcccagctactcgggaggttgaggcaggagaatggcgtgaacccgggaggtggagcttgcagtgagccgagatcacaccactgcactccagcctgggcgacagagcgagactccgtctcaaaaaaaaaaaaaaaaaaaaagaaaaagaaaaacaaaagaggacatttcaggaacagcaagaaaggggttgtaggacatggcgggctgtgccctttctcttcctttattttttactttttgatacattctatttgtacatatttgtggggcacatgtgaaattgtgttatgtgcatagaatgtgtaatgatcaagtcaggatgttggcatacccatcacccaaccatttctatgtgttgagtacatttcaagtccttttctagctatttagaaaactataataccttgttgttgactgcagtcaccctactcttctgtcaaacattagaaagcattccttctatctaactctgtggttgtaccccttcaccaacctctcttcgtcctcaccaccacccccccacacacacccttcccagcctctcgtaaccaccatatactctctacggccatgaaatcatctttcgtgggatcatgcaatgtttgtctttctgtgcttggcttactttacttaacataatgacctccagttccatccacattgctgcaaatggaatgatttccttcttttttattgtgtccattttcaaagcaagttctgaaagacaagagaaggagctctgagagttgattatggccatgcctgagaaggggtctcagtcaactaatgccgttgtggacattcctgtcccaagcagaaggctttaggtcacaatatgtccaaatgtccaatacatctcccacctatgatccattggaaagaaaacaaacctcgggacccccaaaatcactaagccacatggaaaagtaaagctgggaactgcattgggcaaaccttcctcccattctattcctaaataaaatagctttcttaagctataaaaaaccttttttaagctttaaaaaggttttaaaaagctacattcctcacaatttgcccatgaggaaattccttgtggaaaaaggacaggcagaagtcagagtcacccctctgctgacatgagacaggtgcgtatctgattgcctcgtttgccatattgtttcactgggccacactaag

SEQ ID NO: 43678 - DNA, 2388 bp, Homo sapiens
agatcgcgtcattgcactccagcctgtgcgacgagagactctgtctcaaaagaaagaaagaaagagagaaagaaagaaagaaagaaaagaaagaaagaaagaagaaagaaagaaaagaaagaaagtaagaagcaagcaagctgaaatagcttatttttctgttttaaaaaatagacttttagtgttcacaagtaagaataaaaaaaaaaaaagcttggccttaggaggaatcctatctgcttaggcctctgagaggcagcgtcacctgaagggaaactgactgggcaagagccaggctcttaggagctgtctgtactttgcttcccatccgtccgctctcccccagcagccaaagtctcctccctccattatattgcaaatcaatgaatccattagactttccatgttttctttttagactttgagattcaaggtcagctagaattaatggttaacagctgacaggtgaaagtgtggttaaatgcagctttggctagcaggcacacaggcaaaatcaagttctacatctgtccctgtgtatgtcacttgtttgaatacgaaataaaattaaaaaaataaattcagtgtattgagaaagcaagcaattctctcaaggtatatttctgacatactaagattttaacgactttcacaaatatgctgtactgagagagaatgttacataacattgagaactagtacaagtaaatattaaagtgaagtgaccatttcctacacaagctcattcagaggaggatgaagaccattttggaggaagaaaagcacccttattaagaattgcagcaagtaagccaacaaggtcttttcaggtacagtttcagaacttactatttaacattcctctcaagcaaatacgccttgaaatgctttttttaaatcataggaatttaaaaacactttacaatagagaatgattgatttttaaaatgtgtctgatttagctttgtagagatgttccgctaatatccataactaatctgagaggaaatgtggaacaacagaagagtaacagtgtctactcagtaacaagcgttttacgagttaaaaagacatccaaatgcagtactgaaaaatcagaagtcttgatttgtctcactgatgactccgtttttcctagagcagtctgtttaatgcttactggagataaatagatttataggtgaccaagacaatcgattaatgtatcagccacagacttttttaaatagaaaattttctaagtaggaaatcattcatagctctttgaaagatatagggagaggcctcaaggaaagaaagaaaggaaaaaaattgggaaaggaaacaaagatgaaaaattggggtggggagagcggtcagatggtggccatgagaaggatctgaacacagagagcggcggggccggcggggaaggagggaggaggggagagcgctgcttccctgtgggttccggcttctgcagagctgtaagagttgaatgccacacacagtcacactaaggaatgctccaggattgggaaagaaaattcaacattataatgagaacactgtgaatgctattgaattaactactcccctctctccctatttcttgtaagtcttagtgtcagtaaactaattataaatttacattttatgttctaaaagcatgcacctttttctcattgtaggatgattttcttatatcaagtggtacatttcattttatttacttcagtttctggtggtaagtagagtgttatcttaactatgggctgggagagggaaatcacactgcaatctccacacatgtgggagaatcccacaccatttatgccgggaaggaaataaaatgtttttattaacttcctgcctgaggctccagaggttttcaaagcagggtaggaattgaggtgaaaaaattgtttgtactggtaggaatctgtgtctatatgtgtaccatatctacatccatgcctacatacatcattcatttaaatgatatttaaaagcaatattaaaaagaagaaatcttgatttgcctcactaattagttggtttttcataaagcagtcagttcaatggaacatacacacacacataaaataggaattttgtactgaaaaatgttatgtaactattcatacacagtttatgcatttcaataatttaactaccctgttaattctccaccctatgtcacatctgctaaatttgtttataaattacttagccaatattaagtaggatatatcagtacaggtattgtttagttccatgaccattctttatttaaaatgaaagctgaagcattcctttagaaaaatagcttatgtctacatgttatatttaatttctgatactattgctagcattttaagcatagtaaattctttttgctggcctatg

SEQ ID NO: 43679 - DNA, 2424 bp, Homo sapiens
caggggccggtgacgacagcatggagcaaggcagatggagaacgcgctccccacggcaggaagctctgctggacggcaccggtctactcaggaggcataattcacaaatcaagatcctgcaagaaaccctgcagggtgggtttacttttctgcggagaacacgtaagatatttcagactgacaaaaacaaacaaataacaacaacaaactttctttctaaattcacaacacttagcaaaaagaatcttagcaaggctgccgtagtgcttttccctaatgccatctccagagagaggccgtgcatgagtgtcctatgggggtggcaccaggtgatgcaccccctctgcgaaaaattacagtaaaattagggcttcctgtgggattttcatacaaaatgaaaacagaatttcctaatgatgtaatttaatactaggcattctgggtgtcttttcgaggtgcgctttaccttacagcaatcaaccacactgagtgcctaacaccccggggaacgctacccgaaccccctgcactctggccatacaagacaatctaccgagtgtgttctgtgttcacactcattcacgcctctgtgagcatcactcctgctcctcatcccccccccacccccacccacttgaaacatcgacttcaaacataattctaaagtacaactgctccatatacccactacatgttattaacctagtaggtagtaagtgtcctagtaagtatgtccacttctttcattttcgacatctgtgctcatctgcaatattttttgccaaatcccagaaagatatatacttaaaggaaactgtacagaacttcagaactagacagaaacctttaagattatcaagttgagctgcctgaaccaaagagaagttaaaattttccaaggccactagtaagtcattaacaaagccaggagtaggatttcgttctcttgaggctcagatgagcgtttttttctccctatcacacctgactgcgtaatttgctgtattatagtatttcaacactccatgaactctgaactgtgactttcataaactgtaacgaaaaaaccaggaatgactcatcattagtcatttaatagatccaaaaaagcaagttaggagataaaagaggcaaaagcagaaaaacgtatatgcaactgttttctttttgtaactttgtgtttcatcttcctcttctgccaagcactgataattaaaaatagaaaggaagaaaaactagaaatttttctttccttggtccagaaaaacactgcattctatataataaaactatgataaatgtaggtgggctgagacagcagacacagtatattctcaccaatgagcagttaccagttcaccccagaaatgtatgcacaatgcagtaacaaagtttatggcacttgaggaacatcattaaaaaccactcatggcctttcaacgccacttagacatttagagatgagttcatttagaacagagagaatgtcagatcagctatgtttcaatataaaattgtgctctttgacatttcttataaatcagtaacaaaaccatctccaaacttctcaaaattcaagagataaagtagacttcgcgaagcagatagacgtaaaagtgaacatcaaaggactagtaggtgaagacagtcatgtgacatggtccacacagctggagcgatgaatgcattcagtcaactgtgttgtactgtccactcagaaagtggagataagacagtcttgtttgcaagaaaccaggatgaaggctagaagttggcaaagactactttacatgtgagaaacagtaagacaggatagattgtagggcactgacagaaaacacagtgcaggagctacacacagaaaacaggaagcaggaggaaggctcttgccagcaactctgtgttccagaaaagtgtggacttggttggaagagaagacacgtggtctagtcattcgtgctgctccaccattgcctgacatgtgagtgaggccaccgaggaccagctggccaccagccaagcctgcacaagagtggaagaagcacccggcagaaccctaaattatgagttatttcaagggcggaagaactgcccagcagaaccctaaactaaattatgacagctatttcaagccactcaattttgacagtttgttagccaaggtattatgctttaatagatacttcattacatatatatatatatatatatatatatatatatatatatatatatatatatatatatgcctgtaaaaaactgagatatatccacatatgtatatgtgtatatcttcacatatgatgtgtaaatatgtgaagatatctccatttttacaggcttagagagattaagttgcttactcaacgtcatttagcaaagtattgaagttgggggttcaataaatctagtaagtctacatta

SEQ ID NO: 43680 - DNA, 1972 bp, Homo sapiens
aaaaaaaaaaatgaaataaaataaaataaacctcagaaccaaataaaaatgagctaactggttcctccgtacagcagacaactgaagatgaactcaaacatgcttccctgttctctaacccaagcataatgcacacacactcaactggtctgctaaattagcaaaattatatctgtctgtaggctcaaataataacctttcccagttcctctgattcatcacatctatccacagatacaaagacgtcaggggataacagaatgttctctccgggaggattacacattaacaaaatgtacacaactcctcctgtgtgctgctacttcattaaaatgcaataaaattcacttgacaggtgaagtattattagaaaatctcaagaagacaggtacgtggtgcttttatctacctcttttgagttctaatcctccaacaattcatgcttccatctactgttttaaaatgtgcccctctaaatgtgactagaggcatttacaaacagtgataattacagaaacaatttgctcagtgtttactaaatgccaggccctgtgataagtgtcttacatgcattatcttatataatctttacatccaacctgcctagatatgtgatgctattaactccatttcactaacgaaaaactcagattgagagaaatgaggcactttcccagggccacagtgaatggcagagctggagtgtgaataccacaaatctcatcttcagcgccagcaatatccttgtcagtcctacggctgttatgacaaaagagtaaacaaaacttaatgtggtaatttgggaaagatgagtcaaacttcctatttcatccacctgttctacatgtcagtattcagcaggaatgtattaaatgttcactcatacacaatagctttctctaatctcaagggaaaaaagaattatgaaatggaagtatatcaccctcacatctgaggtttgcaattacagatagaaacagctatgatttttccgtcgtgccttatttctagttcgggccgtaagcgtccagactgcagtgtgcaattctgagatggcatctgctggtccccaccgacccatcagctgtacaaccagggggtgggggacagtcatgtccatcaggaggggattgtcggcctccccggtaatctacggatattactaaaggttaagactgaggcaacaaagcgactctattcaaatatcggagattgtgtaattcgcaattaaaatagtaagtatgaatgagtgagatgctggatgttcctatttcatgaattcatgactgtgtacttttataatgcctatcgtgattgctgagataagcttctgcttcgatgcattttaattattacctctttgtaagataaaaaatcactgaatacaacttacggagaactataaagtaaatttcaactgccaaagggagaggagggcacaccgaagaatcttatcttctaaccaaaatcctcagatccctcatgtccaccaatcacgtcactagatgctttatgtgcattaaatcattgaaagaacatggaagttgcatgattttcatcccagctttacacatgaggaaagagaagcttagatccattaagaaacttgcttaagccctggagtgatgaggaaacaaggccagggtcaacagctaactggtgggatccggagctgagccggacagtctgactccaggcctcagggtcttctccactgagcggtgggctgttgccactatcaatcaacagcaacactgtcggacaccaaaggtgctggggacctggtggggctataaccatgaggaaaggccacaaggagtttcccagtgtggaaggaagggtcttcctcatgcatgcaggacaacagacgggagacgatctgaggattccgctcagagttttggggttcagtacctaggcgctattataggcactgcacaaagtgggtggaaggaagccttaagcgtgccaa

SEQ ID NO: 43681 - DNA, 1760 bp, Homo sapiens
gtttagttttgactaactggaaatgctcatctcttcttatttcggcaactccttttatgccacaaccaagtcatgaattcaggaaggaagcaggcaagtctgatttgtgcatgaaacattatctaaagggaagaaagtcagccagtgccctcgctaatcccttgggcaagaaaggtaaagtatacagccacagtctcaaagccagagtgacacaggagtaaccaggagcgcacattcctgccttatctggcgttactttgattcacctcacctttctttcatgacaggaagggcactccaagggcattacactgagatcaaacaaagcattccagaaaggcaaaggctcttctcacagggaaaggaagaataagtcttacatttcatgaatgaataagctgtaacgaaacatttctatatccttaaataaaatgtccaatagctgataggatacggaaccgtagagaacgttaaaccaccaccacaataagagcaacttagccaaacccctctatttttcagtaacaccataaaatatatgaaggttaaaaattcctatctcaaatgaaacatcttcactaagattttctaaaattcacagcagagtttctaaccagcatatgtggcctggggttgctttagtgtttctgattatattccttaggtaaggattacgcagtcagtattttttgactctggttaacttttcctttgactgcatctcagaggttcctttaacttttcaaagcacttaaccagtggttattttcaacctgcataatgctttctacatatggtattctacaattaaaacataactctgatttctataaaaccaacatacatttggttactgtaaaagacagtcaagacatctgtaagagactcgtattcccttcaactgaggtgagcattgctctctctactaaaaaagagaatactggcaggtcctgagctttgctctatctggtaggttgcatttgtagatgagtccgtctctaagcagccagcaagctgtaagcacaccggttgtgagaatctgtataaggaaatctacttccctcagttaaactctctacaccaaagtaaattcatcaacctcagattcctactctaaattcttggactctgactcacttatgacaatcctggaagctggaactcaaatatctatgggcagtcagcaaataaaggcctgaagagctgtaatcaaccaactgttccattaaaacagacaactactgtctggtttagaaaaataatggatttcttacttccagatgattaaagatgcattcatttggtactgctgcctttagaagagttccccatggtgcaggaaggcagaaagtttgtgcaccataattatttgagaattttcacccccccccgacattctgaagaaaacatgtagcgatttttttcctgcattcttcctccacattcatcattttattggtaaatcagactctatattgcagtttttatgagataccagaattatgtaagtatgcaacactaagctaatgaagaataaaatatgtgtcaatttttgaatgagtgttcttttttccaagggctcaatgaaagcatcttggcataattaaatcaatatagtaatctcaacatctgggcctgctctgttgaaatgcaaccctctgcctcaatacaaatctcattttaatatttaattattgaatctattgcctaaagtcagcaactttaaactggtttgcttagcgctgttttttttaagctgt

SEQ ID NO: 43682 - DNA, 7468 bp, Homo sapiens
cacccgggaattgcttaacaaaagccacttaatgaaaccacagttcagacaaaaaaaaaaacttaactgcatagaaaatatttatgagtttactttcctaactcatacaattgcgtccttgtttccaaagccttgcaattcacatcagcgggaacaaaaaaatctaacacacagcagaaagctggctctctaaaagaaagcatttttttttaaaggcaatgaaggaccaaaaactctttcttttaaaaagatcttagaagttcctcctccagagaagacagaaaacactgacaaaccgcacattgtgcagatgttcagccccgaaatgcagcctcgcagcccttcactccgcagtccaccggttgcatctgcacctccgggcagcgctcctgcagggcgcaaacacccagagacccagggacccggcagccccgcgcaggcctcccgcgtgcaccgctcagcgagcgggtctttcgcagacggcgggatgccccaggagaccgcgaggccggcgcagcccggcgagctcccggagggaaggcggcgtgtcagaaaggatcggaccccagcaatggccccggatcggtcccgcgcggtcgcctccttttcccgctccgccgccgggacccccctagccagtgctgaatttcccaactgggaaggaccgagtcactccaccctccgggaagtcgcgcgctcatccgttttcggcagcgccggagcccgagccggggaccgggcggacacccacagagtccgcaccgcagcgcgctgcacgctctcgcccccgcccgccggcccgcgccccagcgaactaaccgcaaagttggcccgaagtggcgacggcgctctcgtggagctcacccgccgtctcagcgcgcccccgagcagggaccgggcctgccggggccctcgccgggctcgcgcgtccgcatggtacctgccgcacgagccgctcccgcgccctctccccgcgcccggccgcccagctcggcgccggcgcctcacgctccccgagcgcaggagatccctccgccccggccccgcccgccggcgccggcgctcatttctcgggcgcggaaactcgagcccactttccccggctgccggctctgggaccgcgggctcggccacgcagtcccgcccggacccaaagagccccagtccctgcgaacaccaggtccgtgctgggagacgagaaggcgcccagcggggtctagcgcggctccgaggggcagggcgaggcttgtgatgccgaggttagttacggccagccacaggcgctgtgcaaggaattggggaaagctccctgccaagaaagggaaacgttagcttagctaaaaaaaaaaaaaaaaaaaaaaggctggggcctaatgagaaagcttcccagaggcatccctttagcttttccatagccttctgggagcccctgaatctgcatttgaatggcgcggctctgggtccgcgaaggtttggtgggctgaagtcgtccttcaggtctccaaaggaatgcagctaggtcggaatctacttcctccttcaatccccagaaaatggaaacgcttcccccgcgacctttttctgccgagttagaccccaggccctccccgccgcgggcgcctggcctcccccgctgacaccccggacgcccaggcctgtgggacaaaaggcagtcgcggcgtcccgcgggcttcctagcccgggagtcggccccaggggccccaaagcgtgaccccaggccgacaactgcaagttcctaggcagaggggaagccccagcgccgagaagcccgctccgagaactccccgcgccgggcgcccagcctgagcgtcccgggcgcggagcccatccccggtgcgggcagggctccagccgcaggctcggcgcagggcggactcggccgaagcccggagggccggaggcgctgggacgcagcccggacaagagggcggacttgatctcggaaagtttgtgggactcaggcattttaacactgggaagacaaagagatccgatttccctgggactggtgaggggagcttggcggggaggggaacggcagggcagtcaagtgtgaaagagaatttcctgggttcaaagttaacgcagtcaccttataagccatcttagaggtgaccggaaaaaataataataataaaggtgtctagcaggttgtggctgggaaggaaaaataatgcctgcaagatgagtgtgccgattcgtagccctatattccctgcccaccagttggaatacacatagattcacacatccagcaaatgcaaactccatcatccaaagacgtgtttgtcccggccataattgctccaagtgcttacaggtcaatttcatacatggaacacctcgaaagtgggtgacctgatctccaagcccaaccggcttgtgccgcttgccgaattgtaaatctcagcaaaacccaaacacaccggaactccagccgtttcctgggagcgaggaagcgggagtaatgctaaaaggggaaaagaagaacagtaaaaaaagtacaaagataccattccctgacgtaaaatcacgggattttttttaaatggcacaagagaattcctggagaagattaccattaattaataagtaataacgcttcctagggcttactagatgttttacatctgtctgggaatcccgattttccaggctccctgagaaatctatctgcctggaagaagttgcacttcgtcgccacaggagccgccgagagccagggatggagatttcagacttaggactctgccacgattctactgatccttaagcgccaacagaacgaaatggacatgcctattagctaccacaaatcgaattattttatatgagagagagaaatgtggttcaagttccacatttgtcctttaaataatcgaccctccctaaccctgtccccaaaggctcgtggaaattagggagggggttggggagacggttccagaaacaaaacgctttcctccagcacggcctctacatccagtccacccaagctgatttttgtaactcatataaagaatgggcccgggtgggtggtcagtgaagactggggtgagcaagcgcccacgtcgccgagcgccggggaggtccaggttcgcctccgcacagaaccctgcaaggagcgcgcctcgccaggtgcccggactagagggcgctgcgcccctgcaaatctcgcggccccgatgcgccctccctaggcaccattgctataataagttacattcaaaataatgcacaaacagcatcgcctctcaagttctttttaacagtgctctatatgtattttatgaactcccaaagctatgcatacgaatctttcatcgccgatccgcacaaagccagagggatgcgcagctcctggagccgagaacccgtagggcgcacacgcttccccgcactcgcttagagccacacaccccacgtaatttcattaacgtttaaacttaaatgccaaaaggcatgcacgatttgaacaaagaactcaccagtctagccgagtcctcggccctgggctctaaagtcctcggcagctccgtgatcccctcgcggtgtagatatgtgttaagagccgggtttgaagtaccaactttgcctccccgggatcttcagcatgtccctaaccagagtgccaacgtccgtgccgccgggacccaggcggccgcatctccggaggcttccgaccagggcaaacttaagcaccaaacgcaggcgaaaagagagtgcgcggggccggaacgagggcccgggagcagccaagtttgtcaggacgtgcccaggcagccagccgccgagttgaggagttgcggccgccggctgcggcgactcgctgcctctttccccactccctcccccttggaggcggtgggggaggggaggtgacgtcagcgccccgcctcgccccccgccccgggcgcggacgggattctccggctgggcgcgccaccccgacagtggcagcagcggccgtggaggctgcgggggtcccggcctctgcggtctctctggccggccgcagctgtggcgcgggtgaaacgcccgccctcctccttcggctgcgtctcccgggcgccggcgagcgcgggcgttcctcgcactcagcgcctggagccgcctggagccccgctgcgcgcacttccccggctcgcggagcccctccggcggcgtttcccacgccgcggactgcaggtgatgctcttcctcttctgcagccgaaattcgtcgcgatgtgtcgcctgccagatttttgctgggcggaagcatgaacagtctctgcagactggcctggacgacttgtactttgtggccctccaacttctggatgtgaattttttttcacgacttattattatgctcttcgtggtctttgtgttgaaaatcacggagctgtatttttattttcaaattctttcccaatgctcctcttgtcttgaccgtactctgaagcttataaggttctgagaggagggggcgaagggataggggaggagccagttcctaatgtgtcttacaagtcatccctagtgataggggctaatacgcaaatcactgtctcctcctcgaaataatatccatttagataaatgcaaacactgttgaggtttaatttataaagaatgcgtcgtctttatgtaagtgtccagcctccaggaaaatatctgctgtggaatatatttttaatgccactaaagtaccaaaatacctccccgaacagcgtgaaattccgagggagccatttctgtgagttgacattgtccccagaagattgtcattaacattcaagatccttgcaaaagggggctgggggcggttctatcatatttgcatccgttggtataaatatgttgatcagtttagctggtcgttcttttacaaaggtcaagagcaaaattctgagcacagaggaaactgggcagggagctaaacagtaaggagagaacaagattaggtgattggaatgttgtgtgtgtttagccttgaagtcataacttgtctaaatgtcagtgtcctcatctgtgatatgggactaatatctgcttcatgtggtaaaaatgtattcatgtgtttatccattcaaaaaaaaaacatactgcactctacttgccagggagataacagttattcatgcaggcaaagcatttttactgagcatcatatgaagtgtctagcacgcacatagtaggtacttaaacaatattagttttcctgccctcccccgctcccttccctcacttcttggcagtgtctcagtttttaatccataaaatcagcatcatcaccactgattggagattctgccaggcaggtctccagactcaagtcaggtctcctgggctcaagagatcctcctgcccaagcctctccctcaaggtacattttgatttggaagggaggagaggatccagggagctaggacacggagggatataggaagggattttagagctcctgcagaccccgagggcagctagagggtgccagattcctaaggagggaggaggctggcttgagaggccagtctgtcagtgcccagcggacttctcctgcttccctgtttcaactacacaggctctctccttttgtgtcaatagttgaaattagaaattgaccacatattgcaagtcctcaaaatgattcacaataaattcaccccgagaggcttctcgctgaagtccatttggtttgctatactcactttaaagttgtaataaataaaccaaattacttaaaaaagataaaaatcacaaatgacaggaacttatgaataacaattgatgatattagtcaaaatagctggttttcaaagtgagatgggcagaaaacttttaacagaacctctagagctgtgctaatgtagtgggcagccacttgccccctgtggctacttccagttaaactaaattaaaaggcacttcctgagtctcaccagctgcattccgagtttcagtgaccatgtgtggctagtgacaattgtattgatcgcagcagatcaaagaacattttcgtcatgacagagttccactggacaccttggtctagacctttaaaaacactgctattttatggaaggctacatcaagcattaaaatttcagtgtgtccaatactgagtcacctctgaagtataagggaggacccagaatcatggaaggattcattcattcagcaaatatttatcaagtaccaacaatatgctgggtgaaaatatgtaagacccaagatttaatgaggtaggtgtgtttagtgattaagaaatattaacatggccttttagttgttttccgtctttgctgactcataaaaccaggggaaatcatagatttaaagcaggaaacaattctgagacattttttggaatagccctaggaccaaatacttctaagtaggcttgactgactcctggcatcccaccctctctgctgctttcactgctttctcatctgcctgtgtgcccattgcggcctccccttcctggaggtgagaggaaatatcagccctctccacttcccctgcaccttggaattattttaccctttgcattcaaatacagctcttctccggaatcagcttgtactctcagagggagccattagaacattagacacctggctgggcacggtggctcatgcctgtaatcccaacactttggtagtctgaggcgggtggatcacctgagggaaagggtttgataccagcctggctaatatggtgaaaccccgtctctactaaaaatacaaaaattagctgggcatggtggcgggtgcctgtaatcccagctactcgggaggctgaggcaggagaatcacttgaacccgggaggcagaggttgcagtgagctgagatggcgccattgcactccagcctggtgacagagcgagactccatctcaaaaaaaaagaacattagacacctagtcaatctgatgggaatcagtgctggttaactatgggtatgagtatgttataataatatccttccacccttcccagtgccttatagcaagggctttcttaaagctatagttaaaacatgaaatttctgatgccataaccagtcacttgggaaagtatttggaggtattacaaatcacctactaatggctaaccattaaaaaaaaaaggtacaaagtatactttcattttaaagacacacccatagtggagtagggtggccgtagacattctgtccctcaaatataagataaacatccccaggtggtttgggaacagatattgcaagataaatataatttttgtgatgctttaccagctcagtgattgaaagattctaaccttttgaacagtaggcaacaagtcatctggcaacttactattgaagctactttctcaatagaagtatgcagtagaaagagcattacacttgaggttagaagacctgttttgacctgttttgaatcttgtctttgacatatatagtttgaatttatt

SEQ ID NO: 43683 - DNA, 3437 bp, Homo sapiens
cctgtgtggttaggtgtatgaaagacccagaacaaataacaacctttccctgattttttccctctgctagacatttgttccagagtagagtgaagctggaaaggcaggctatgtgttcagtgctactgagacagctgtaaggcactgcagtggggtcttacggtggggagagagactgggctcaactccaaacacaagtaggagaactggggatttacagccagggagcaaagtggggagggtctgtggatggaaaacaactacaacgatacatcacgagtgagaggagttctggttaaagtgactcacaggactcttgctgcaagtggtcagtgcaggtgcaacaaggacagacaccaaggtcacagcctggggggcttgcaagagcccgactgaagtttggctcaggagaaaatctttgtcagtagcaggctctttctgtttttttcctactgtcttatgattattttgtcctgaaaaagcagtgaaaggagagggacatttgttattaatcaagcttctgagaccttttgaaccttagctgtaacatttgcaggttaacattattcatctgtgtcatcgatttcttagaagccaaattgtttaagggggttggggtggtatctagatgggtaaaggtggagtactgtagagaaacggagctaaaagtcaggattgaggtgagcgttctgcggctgacatttacgggctgtgtgtaaacttcgcaaattacttggcttcttaagtggcaatgggggattagctaaaatgtgattagcgaagacgctaagctgagcctcagggatcctaactcctgatcctcacactttggtgtcatctcccccatctcttatccaccagggtctgtgtaatagaataatacagaaaggacaggatgtcacttctgagattaggttattgtcttagtccattttgtgctgctgtaatagaatagcacagactgggtaatttacaatgaacagaaattgcttggctcacgcccttggaagctgagaagtccaagactgagggcccagcacctggcaagggccttctctttatcagcattccatggtggaaggtgagagggtgagagaaggcaagagaaagaacaagaggagattgaacttgtgtttttataaggaacccactccctccataatagccttaatctgttcatgagggtgatgccgccatgcccaaatacctctccctaggccccacctcccaacacggccaccttggggatcatgttttcaacacctgagctctgggggacacattcaaccctcagcaactataaaagacaccgaggtctctcctggctctctctcgctctcgctctcatagtctctcctgttattcactctggggaaagccagaagcccacgtgatgaggaatggaaggcttcttctaacagccacatgagtgagctagaaagtgggtccccagccctagctgtaccttcagatgactgcagccccagcagacatcttgacttgtgccctcatgagggcccctgagccacatcacccagccgaccacacccagacccctgaccatcagaaatgatgggagttaacaaatgtttgttgtttaaattgctatgttttgagggaatctgctactcagcaattgataaagaaatttggaataaattattattggctattaataaaatattattggctttctaccaataatgttatgaggatgagaaaacacttggtaaaccattaaggactaccacgaatgttagaaccctgtgcatagactggaagaaaatgtatagaatagttctatccaaagactctatgtgatgatgggaatgttctatctatgctgccctgggtggcactactgagtacctgacaggtggctagtgcaaagtgaggaactgaagttttaattttatttaattttaattcatttaaatttaaacagttatatgaggctaacgcctaccattttggacagagcaggtctagagactttctaagccaacaaatgacttgcaaaatctggtcagtgagaatacagcacatacagcttgtgggcctgttttcttcccccattgtgacttttctaaaggaagacttgtgttatttatgaggcccagaagtgatggattgagttccattgaacaattatttccttcctggtttaaaaaagaactatgcattttgtaaaactgggttttctgagacctcagatttctctttgtatgtacatgttcaatttatcagacatgaaattatggattcagtggactgtctcacccaactggctaatttgcatgattaattgaagaggcatgcaatgcaactgtgcccagtttccttaaccacaccgggcactgctgattcatccacctggtggatgagaacgacttcaaacctgagggcttgttggccacactctatttattcaatgatgtcatctggcaaatatgcaacacaaaatacagcttgaatggcactaagttactggtggttatagctaaacttgactagagatagacttcagtgtatgcaaaattgtattagagcttataggatagcacgtatttcatgctgttatcagagtagggaggttgatctagatttgcttattctttttagttggttttttttttttttttttttttttttttttttttttttgagacggagtgtcgctctgtcacccaggaggctggagtgcagtgttgtgatcttggctcactgcaaacttcacttcctgggttcaagcaattctcctgcctcagcctcctgagtagctggtattacaggcacccaccaccatgcccagctaatttttgtatttgtagtagagacggggtttcaccatgttggccaggttggacttgaactcctgacctcaggtgatccgccagcctcagcctctcaaagtgctgggaatacaatgatatatgttgagttgtgctttgtaataaagctaatggtcacttcagtgttgacggcatcccatccctcagtcatgtcaagtcatgcctttattctcaagcttgcagtcacattattacaaggtaaccacagctgctctagacattcatcagggcgggatgaggggcatcggttatctccactcacgtaaaaaagaaaaattgcatccttactgcacactataaacataaacattttcttgatgaattaaaatgtaaagctgtaaggccaattgtcaaatgatttggaagaaaatataagaaaataatgtatttgggactatggaaggatttactgtgtaaaacacaaagtgtttttaaaatgaaagaaaagattaacaaattcaattacataaaaattaagaacctctattaaaatgtgaaaatatacagactgggagaatattcatacaatactgtattattcaagcaatactatattattgtatgaatactgcggaccacctgagg

SEQ ID NO: 43684 - DNA, 757 bp, Homo sapiens
ggttgactcataaattatctcttgtacttggagtgtgggtacatctcgatttatgactacgcaggtgtttggtgagagacccttcaacctattgaccacaaagcttgacaccctgggagcctctgaagcatgaagcctagagctcattgcttgcagctcgtctcactttgtacatgctccttagttcaatccatctactctcatggtttttacttgtatgcagataaattctatccttgtatctctatccctcaacccctgtctgaacttaagctgcagatctactggccctgtgtatatatttaccttacacacaacatgcagagaactgaactcagctttggtctgcctccactgccatagggcaagcttcacttcctgtcttgtctaactgaattagataattattacctcatccttggtggtaatctgggtaactctttgtcctgcaactcctacatgcgcataatagtcacaaagtccagtgaacttaaccaccaatagtttggatttctttccctcttccttgctttctgttccctggactaattctaggctcctgactggtcttccatagtgtgttctgtctcaaatccaaacctcacatgcttccaccatcatctatcaaaacagcaacaccatattgaaatgcttctgttttccaaggggtaaaatctacattccttggcgcgcctttctaggtcctccacaacctggcctctgctcagtggaggagcctccacactggcatttcatg

SEQ ID NO: 43685 - DNA, 1588 bp, Homo sapiens
aatgaatagatattattgtgcaagtggcgtggactatcataagctatcctttggttattgttggcatgctacgacgtttttaagaaagggggaaaagtctcagtggataaagttgtacgtgtttgatgtcctgttgttgcctagggctttagcaaccctgagtgtgcccagttgccagcacatttggattcctgaggggttcttagcagtggctagtggtagtcattgcatctgccaactttctgaaagcggatgtggccggtgaatgtgggtgcggccagtgaatgtgggtgtggctgatctggccatggctctgcctcagatctccaatcatgcagacagatgtgcctgaggcatcgatcgaggagggggctgcaaaaaggagctgcaaatgttggtgtttttatgtagtttatgttccattccatctcaccccatgtaagccaggagagagggccgtttcctactctcgtaaatttaagttcttttccttttagaaaaagaacatattttgagctaccttttatgtagctggtgcagatattttaaaaaatgtaatataccagaagcagtatttttcctggtattaatgattagtatgaatcactacatgattgagggaacaccatagcctgtttattcatcttggagactgtcagggctgaactgggctaatcatgtttgctttttgcagccccgtggtgtggttagccttttgtcttccttgtaatgtgctagggtttgcttgcggcctgtgtcccgtcctccctgcagacagctgaatgacaggccttcaccagcgctctctgtatgccctgcactgtaacctgattggccaggagcctaatgggaaatggccttcaacctctgcacctacgttcatgaaaagccattgctcttacataatcaaagtgctcaggctctcgctgatgaatccagagactaaccacgtaatctagaagaaattcatctttgtccccaaggctcccagcatttggcaattattgaacaggtggtagatacttcctctgttgacaggaacaaaaggcaaagggcctgcctaggaggttgaggagctattaaggaatgctgccccaggacaactctctagcagcagcagtgaaagagcaggaagacccttgctaaatcagtgactgggaacactcgcatttaccatcccagagatcagatcctgttagggagcagctagcaggattccagcttatctggtcctttctcacccggctactgccttgattcttacccgctaccctgtggggaggggtggcggggtgggttggctgatgtgatcttagagttatttacctagatggggagaggctcttaaaacatatctacaatgcggcggagtgcggtggctcacgtctgtaatcccagcactttgggaggccgaggcggacagatcacctaaggttaggagttcgagaccagcctgaccaacatggtgaaaccctgtctcgactaaaaatacaaaaattagccatcgtggtggctcatgcctgtaatcccagctactcaggatgctgaggcaggagaattgcttgaacccgggaggtggaggttgcag

SEQ ID NO: 43686 - DNA, 1581 bp, Homo sapiens
tggatgtggcactgattcaatgaggtaggcaaagagaatgccctaaggcagcagttctcaatttgccatcccctggatccctagggaccccggggcagtttcagtgggtctgaattgtcagagccacttcaataattgtactaagtagttgttggcctttttcactgggttgacctttgtgctgatgttggcaatgctgattccttgagtcaaggtagtgacaccgagtagtccctgaattcttcactgctgtacacccacagaagaaaagtgccagttgcacttagaaatatccttgatgaagctgtaacaatgattgatattatgaaacccagaactttgagtacctggctttaagcagtatgtgtaaacatataaggagtatgcataaaaccgtcatgcatatgaagcataaggattgtttggaagagaagtgcttgtgcaactctttgagctgagaactgaaccattcttttttttttttttttttttgtaacaccattttacttgcaaaaacaactgatagacaaatcctggttattcagacttggggacttggcagacatttccttggaaatgagcgatggaagcctgttgcttcaaggaaaataactgatggtgtttgttgccagagatagaattcaagctctatcaaaaggaaatcagaactggaaaacctgtatctgctgttatgagcttgatagcttcccaatgctccatttaaagacttctctgatgcgattggtgttactattaatgaatttttaaaacattgtgtaatacattttctaaattccgaaggtatgtgcaattcatggggaagagacacattcaagttgcaacataaaccaattttcctgtgacagaatgtgagaagttcatgaatattgtttcagataatacattgcaaccaacctttaaaaacctacctcttgttaagttttggtgtggtattaaataccatgcatatctacattatctgataagtcttctaaaatgcttctccattttacagatatgtgactgtaggaagatagattttttttgtataattaaccacaataacacatcaggatggactgaatacagaagtaagtatgagaattcagctgtcttttattaatccagtcatggaagacatttgcaaaatataaaacaatgtcactcctcttactatagtctgtgctttggaaaatatagtttttttttcataaacatctgttttagtcatgttaacattaatggcttaattaatgtttgtggtaagctgagcaatgcccccccccccccaccaccaaggacatcctcttcctcatcactggaaactgtaaatatgttatttcatatggcaagagggattttgtaaatgtaataaagttaaggatcttgagggagaagatattctggtttatccaagtaggcacaatgtaatcagcatgatccttacaagaaggagacaggaatgtcagaagcaaaaagaaaaaaaaaagggggaagtaagaaagagcgggagactgagggataagaatgtgctttgaagattgaagaggtcataatccaagtaatacaggaagcttctgg

SEQ ID NO: 43687 - DNA, 547 bp, Homo sapiens
tacagtgtctcattgtaccttctggctccagctccaggactgaacacacacagccaatgttcagaattatgattctggaattccacaatgttctggcagttaaatcattgtgggtgtccttaattatttctttaggctgaattcctaaaagtggaatttctggggcaaaagctaatgtttaatttaaaggcttttgtttgtattggcaaaccagaatatttaatcatgatcataataaaaccaaacttaggaatgcttacagtgcactgagctctgtgtctcagtcttgatgacagcatttcagattgagtgttatcatcatacccattttaaagatggttagaaaataaggcttcgttgggcatggtggctcatgcctggaatcccaggacttttggaggccaaggcaggagggctgcttgagcccaggagtttgagagtaacctgggcagcgagacctggtctctacaaaaattaataaataatcataataataaagataaaggggcttaaaggacttaaaatattgacgaaggtcatataacca

SEQ ID NO: 43688 - DNA, 1949 bp, Homo sapiens
cttgttttgatataaagaagatgtggaggtaaaacattttgatcaggacttatattaaaatataatccacatcttctttaaaataaagactcacagaaattcaacaaaacacatgtttagtttaagctgcccaatgggtttttttccatgcttttggctacttttgtggatgcaaaatatgaagtgaagaaatgagacatttatcagaatcaggaattggcaaactttctgtaaaagtctagaaagtaaacatttgaagaggcaatttggtctgtcaaagctactcaactgtgctattgtatcaggacggcagccttagacaatatgcaaatgaatgagcaaggatgtgttccaataaaactttattaaaacagacagtgggccagttgcagcctgtgagtcacagtttgccgacccccaatccggttaatttaagacaaatcttatcgtctgttggagaaagtatttttttttctctaaataattgaggttggcagcccctattagttaagttcaactgaaggtagcttaattctccacttgatttggtatgtgtagacacaggttttgttatatttttaaagcaagacctttgagaaggccaaccacctgccttagtttattagaattaatgagggataagaatgtattgtcctatgtaaaacagaagaaatcttccagaagaggcttagtacttgcagggagcctcgtacattttcacttggttttataaaggagccacttcaaagttggagacaccagagaaaagagagtaagaagaaaagaatttgtcaaggctagaaatcaatcattaactgtgacattaaacatgaactttgtattcttgtcgcttcaaacaacaacaacagcaaaatctcacaatgcatttgaagttgacaactcactctgaagaagttgtataaatttttccattgtctgaaattaaaaataaatgtcaatatatcttacacttgtttacaatgaacttttcttataacactggttattcagttgtataaaataattatgtcttacaaagataattccacaatctcaaggatttaaaaatacattttaagatataacatttaggctggcctgatcccagcactttgggaggccgaggcggatggatcacctgaggtcaggagtttgagaccagcctagccaacatggtgaaaccctgtccctactaaaaatataaaaattagccaggtgtggtggcgtgtgcctgtaaatccagctactcaggaggctgagacaggagaatcgcttgaacctgggaggcagagattgcagtgagccaagatcccaccactgcactccagcctgggtgaaagagtaaaactctgtcttaaaaaaaacaaaaaaaaaatgtaaacccaaatgaatgtgttccaaaagggaaaaatactatttgtttcagcctcgtatttaaaaaattatgtatctaaaatttgtattaaatttttcaaggttagtttttgtcattccatgaatcaggcagaatctaaatcaaggccactttttattgcatttttaagtttgtagggaaatataatccaaactcagtagtggatgtactaggataatacattgtaagttgtgatcagttgtgactaattgaaactgagagatttatatggaactgcacttattagggcaaagctattgttttctttgccaggtagcaaaaatatgttttttaagcttacacttgtttccaaaggacattttctggaaagttgtccacattgtttttctaatgttgcaaagacagtttgcaaacattcaacaaattacctaactcttgcagtttgcattttccccatttctatgaagtatcaagtgttgaaaattcctctacagtccataggcattttgttctggctccaaagaaaattatacttttgaaacataaggaaagattttacaatgtgtatcttttc

SEQ ID NO: 43689 - DNA, 693 bp, Homo sapiens
ctgtaaccttgtcctcctggcctcaagctatcctcccacctgtcttctcttgaggagctagaaccccagttcatgccaccacgcccggtttgtcattttattttatacatgagatcctgagcccaggtggcatgtccagcttaatgaaacatgcccttcttgtcattattctctggaagcaccttctcaaattagttcaccacctattaatagttaatttacccatggttagtttacagcacggcatgctctttttttataggcttttctttccactagactgcctcttccttccttcacccataaaagaacagacattttagcttcagttgattgatctaaggccaatgggtaaaaatgtgaagcacatttcaacctaactataatgattaactttctataaattttgattgtcctaaaaaggaacaagtggttttgaaatagtacaaactctcactgggtgcagtggcttacgcctccagtcccagcactttaggaggttgactcaggaggatagcttgagccaaggagctcaagaccagcctggccaacatggtgagaccccatctctacaaaaaatacaaaaattagtctggcatggtgatgcacacctgtgctttgagctactagagaggctgaggtgggaggatcacttgacctcaggaggtggaggtttcagtgagctgagatcac

SEQ ID NO: 43690 - DNA, 607 bp, Homo sapiens
ctttgctgtcatccagcaaggaagcagggacctcagtcctacaaacacaaggaactgatcttccaacaacctgagagagtttgcaagtggattcttccctggagcttcacataagagctcagactgctcaacacctcgattttggccttgtggcatcctgagcagagggatcagccaagtcctctcaatccctacagagcttcagaaacctcgagatcatcaatttgtgtttcaagctgtcaagcttgtggtcatttgttatggtagctgtacagagcgaaaatagatctcgcttctgtttgtttactcaaggacattgaacccccgtaattctctcctctctcatgcgtcatcagcttttcttctctgttgactcattccttatcagctcatgaaatattatttcttgcatcttaaaatgtacaagcaaatctctctagactgtgttcccctccagctactgctttatttccctaccatccttgaacagttaaaactccttcaaggagttgccagtaatatctccccttccctttccagttttctcttcccactccaatcgggcatttagcacctcacacagcacccttacaatcttcttgaaaga

SEQ ID NO: 43691 - DNA, 1061 bp, Homo sapiens
ttcaggtcgtcaggccccatactcccattaataaggctgcctgaaagagaagacaatcctcaacccagtatgtcagagctttgagatctgtagctactgtctcactcttctgcagtttcacacactctaagggacgtgagtcatcagattttctgagatatcagggtctggcagacaatgcagaataataaaaacattaccctagaaatacagaaggaaactcctgtctcaagaagaaattgaacgtactcaatgtggaggcccagaatcatcactgggacggctgtttatcatcagagccaataatttttttacagtaaaggacttccaaaatgacaaatgtgaaattgtatgtcaaacaactttaataaatgttctgttaaaaaaatgtagaaaagataaaaagcatatcagaaacttttccaaaacatttatccctggcttcttggtttcctccctcctgaactctgaaattcttgtaagtttggtggcaggcatgagtgttacacatacagatacacatgcaaacaaaacaactttccggtgatcataatatcctctacctttgcctttctctttgagttcagaactattgattcagtgtagcttttgttttcaaggaaactatagctcaaaaagttcaagtttcactgacttgtcctgggtgatggggctagttaatggcaaagccagtcctggaacctccgcctctcctgctgttggcaaagcacttctgctacacgcactgctttcctggatgacttttagaaactgcctcttcagctttgaagaatccagagaaatcttttttctctttttttttttttttttgagacagagtcttgatctgttgccaggctggagtgcagtggtgtgatctcggctcactgcaacctccacctcctgggttcaagtgattctcctgcctcagcctccccagtagctgggactacaggcgcacgaccacgcccaggtaatttttgtatttttagtagagatggggtttcatcatgttggccaggaaggtctcaatctcttgaccttgtgatccgtctgcctca

SEQ ID NO: 43692 - DNA, 3812 bp, Homo sapiens
gaaacctttagcctgactcttcagatctagcagctctaaggaccatgacatcgttctgctggggatgttgtcctggcttctcctctctcactttacttccaaaaggcttccaggaccaagcagctattgcaagttccagagaattatttctccaaaccaggaccttatcctataggtgtgagagcaaggactagacaaggaaccagagtaatgatgattcttcattacaccttcacatctaagcaggccttaaaggaagggacaaagttatcctcaaaggaatacacagcttgcccaaatgcagttggagaaccaggtgagtggtcctccctgccaacaaagcaaagtctaggcctgcaaatcactgccaccaggcgatagagaatgtaaacaataattccgaggcctgacatagccaagcgaggttgctgcattgctctgaaaggcacagatactctagggggaaggggttgctttgcattttgagcacaatttggccatgcaagaatctccttaccaaaataagcatcttgagcttgcattttctttctggcaggaaaaaggcctagaacttcccaagtgaacaagctacacccacttttcaaatattgtcacaagtcattgtaaaaatactctctcataaacgctctggctataagaggaaaatagaaccacaccaaacacctcaccccaatatttcagagtcccacattgggagcagtaaataagattagggattatagcctgctctgcgttcatctctgtacagaaatgtactgcagaaaccacacccttgtaaaagggaaaagcaggaggaagtggacccgtaaaagctaagtagtcagaggacatccagctggggataaaaggcattttaggactggctcagtgaagtgctgcaaacacaagttcactgtagaataaatagcctgggctgtctgggctggaaggtggcagctgcattttatgtccagactcgggaggcagagttgaaacctcacgttcaacactggtccctgcccccaacacataggcaccaaggcacatacatgcaggataaaatgtcttctctttggattaaaaagttaataaagcaataggtgattgcctagaagggtgcattctagagtttgctctagcaagctaggaaaacaacagatggtggaaagtttgcttctcctgcttacaaaccacatgaaatgaggcagtggagttgtcatttagcttttaggaatttagcttttagctttagcatttagcttttagttttgagcaacttggattcaattcaaatggtgcttcaagttgtgtgatgtgtgttatatcggagagtatattactagattttgtcccattttttagcattaggataggcaactcaccggttcccgggaactggcatgtgtgagatgaggaagtagaggagaccctgaggccgttggtgggccttacctgctgccttctctccctgccagggtcaggccagtcctattgcctcttctcctggggactcccacccctcttctcctccatcgccattccagaataccactgcccacacttgctgcctgaaaagaagaatgatctgaagtccagctcttttctctctagttcaactttacatccatgtcatccaactttctacaggagcaaagctttcctgtgtgcaaaagctctccatcacttttctttatttgtataatacaatccaaattggatccgtcctgccttgccggccccttgcccactgcctcattgcccagggatctctcaacctcatctcaatacactcccttgcctgggccctggcttctgcttcatgaaacccactttcccccaacccatgttgtttatgggaagtcctgcccactcctgaagcctttcctcaggttcgtcttttccagagggacttcccttatgcttcaccatgcgccgagcccttcccgccctgctctccctagcgctgtgttggtagctttgcgaccgcactgcccatggttggcttcatgccgtgcacatctctgaacctcacttcatgccgtgagctccttgaacagagcagagagggaagactagcatgaaggggtgatggggagtcacggccttaggagcaggagtcgggaaggtaacaatcacacagagatctctcatgtcactacgctggtgttataattcatgtcagccatgcacacgtacaatccagtatctataaggcttatacatattctttaaaaccaaggttacatctgcaatcaccattccatagcatctagaaagatgtaacgcccggctataaatagggtatacccacaaaatatcataggacattattcaaaatcaggatattaaaaattaaatctgtttaaaacacctagaaaacccttgaaaaacttctatgtaatcatttacttttaatatttggggaaagagcagaagaacatatgtctgatcaaattcactacaacggattttttcacttccagatttacagaatgcctgtcacttgcctaagttccttgtttaaaaagaaagagacttttctccacaccacttctcaatatttatttatgcaaatgggacatgagtcacaagcatgcagagatgaaccctgatttatgacaacatcaagaaaatagctaaaaatatgtgtgtctcaggatgattcaaagtgcaataggggaatttccagtgatttggtaacaaatgtagcagcccaactcccatttatttttccagcaaatattcccaaggagcatgaaaaaatgacagctgcataatcgcaacagttaattttttcatgttagttgattcaacctttttgtcaaaaaatgagaggaagaataaaggaaaagcaagagtgtaaatggtagatcaaattcgcatattaacaactttggaagtaaaaacttcaatactctatctgtagccaaatattaatattttagtcattaagcctaattgcggagaagttatacaataaacaagatgaggctatattcttgctgaggtatctatgtgaagggtagcactctagaactctggagttaaaaagaacatgcaatatccctgaatttggcctcctactttgtttgggcaaggattgtctccaaaaactgacctccgagaagtagaatttagcctgttaaatacttacagtaatgggtcactcactgcctctgtcttgttttcggggctgctgtaacaaattgccacaaatttagtggcatgaaaatcgcgatttatcatctcacagttctgaaggccagaagctcaaaggtgtttggccgggctgcacccgctacagggcctgtagtggagaatccatttgtttctagtttttcgtggcgtctggcttccttagctagtgccacattgctccaatctctgctccgtcttcacattatcttatcctctgtgtgtctcttaaaaagagacttgttactaaatttagggatcacccaggtaatacagaatgagtttctcatctcaagatttttaacttaatgacatctacaaagaccccttttctttctttcctttcttttttcttttctttctttttttctgtctttatttttctttctttctttctctctcttttctttctctccttcctttctctcttttctttctttctccttccttccctcctttctttccttctttccttctttctttcttccttcctttctttcttccttccttccttccttccttccttccttcctttctttctttctttctttctttctttctttttttttttctttctttcttttttgatggagtttcactcttgttgctgagcttgg

SEQ ID NO: 43693 - DNA, 930 bp, Homo sapiens
ataatcttttattatataagtgagtggttactttagaatttgtatttcattttctaatgaaccagtgaccacacaacattgtgattatgatagaaagtatttgaattaagattcagttattcaatgttgtattagcaatgacagagtttttctacttctgtctttttcttctttttaataaagtgtgatatctccaaggaagcttaatccagatgtttatgaagctagcatggcacttcctacaaatgcaaggattgtgagtgactctggggcctctattgcaaattgttctagggagaaatttgcctgtcctggtatcaagccctggctggaagccagagagagggttacagaaagagattaaggtgtcagtgctggaggcagaagaggctattgggcaatttgtttgcctggttctaccgcacacctgatttacacccagcttgtgaaaaccttaccacaggtaaaatgccaatagttgttctactagagtggtcaacttttgactgatttatctcctacatttttcaaaccttatgtaatgtcttgtttttataataaacagttttggaatgttttcctgtaatagttattatgcaggcactaataaaatggtcaatataattttatacatattaaaacacattagtattctttgagatgaagtactaatagcaataccagataatattgccattgatttttaaaaattacttgaacatttaaaaaattatccaaatccataaacacagaacaatcaatacaatctaaataacacctatagtgcaattagtttattggaatgatagtttcagtggaaagaaataaagcttgtttaggctggtttttattctctacacattatgcattggttatgtaaaaaggcagagttttctagctaagagcattagttaactataaaatcatact

SEQ ID NO: 43694 - DNA, 1360 bp, Homo sapiens
gaagatgcttcctacaaaaagtcttacaattctgagtaactaagttaactggtttattttattgcctccttttccccagcctgtcagtcttttctgataaaaaggctaataaacagaaaccagttaaatagcaaccagaggaaaagaacaggaaaaaaaatcgagtctgaataacacataattagccccttgatatttgaggcaataggggaaataataatgtcatatacatgattaacttctaaagttggctaaaaaaaataaaggaaaaaacaaaaaaccctcagttctatctatgagcccagcatgtccagagtattgtcggagtggctgttgtctttgggtatcctgaattttcttcctagaaaggaagaagaaggcccccatttagttttgttgcaggtttcaaattcttctctgggagaaaagctaatgcagcaagttattttttccctggctatttatttttccatttccagtcgctctatgctagattgtaacattcagggattggggagtacaatcgcttcagaataatcagtcataaacattccaggtttagttaactattaaggaaagcagcgtctttactttttaaagaggaaaaagaaagaacgtatgccacggcctgtaaaagactttcccatgttttgtttacattggaatttcaaaagctgacaatatctttccttccttcctgctccttgatgtagtgaaaggtcttccctgtaagtctgatcattttagttgaaagtgtttagactatctcgtgtactcaagtactcatcacgatagaattccaccgtgtaagggcttggtggcttctaagctcatattttctttctttcttttctctcaacaaactcaactatcattgtcatttaactttaggctccatcccacattcctgcaggaaatcttcttttaaacagaattatatactgcaggaatggagctgctcaattttcactgggttgcattttttatggttgttcctttacttcctggtagcatatttctgatgacacatccgtagcaacagtagttttatttataagcaaagggaagaagaaacatggactttggctaacctgggtgtacaaagaacacccagaatgtaattgtaattatgtccacttgtggtgatatggtccaaggtttatcaggatttccaaaggaatctgtgggaggaaatctaccagtgatcacagccataatgaaacaaactgatgtggaaatttctattctttaaaacctattttaaatttagtgtttacaaataggtataagttagcaagagtgctgaactcaggggacgatctaaatccactcaataattagttcaacaaacttaggctag

SEQ ID NO: 43695 - DNA, 1649 bp, Homo sapiens
agggaaagagccacagcttgagtggggtggttttggtgtcacatacgcgattaataacacccaccgctgcagaggaatcaccgtggactactcctcctttcatcccatgctcttgcgatggatccctctcacctgtttactgatttcattcaaattcttcagcgaccacaggaccccgacttgccttctctatcctggttccctcactctgctttacaggcctggcctgctcgctgctcctcacaccagcgctgcacggctccctccacgcctccgccctgtttcctccatcagacaggactagcttcctccatctctgtcgggcaaatgcctgcccagccttcaagaccctcctcagatgccgcctccacgattaggcttctttcagacccctgagcctgtaacacgggctaccataactctccacctcagcccacattcccacagcactcgcgacgtccgcgaccctcaacatggcgcttcattctcttttagggtatttcctgcttgtttcctgcacacacagtcgcgcgaggcgcagtcctgagtgacccacgcacgagtggcccgcgcttccagccgcgccgccgcaggccagcgagggcagcctgagccgcttcccgccccggcgaggaccgtcgccagcccgctgctctagcaggaggcggttccacagcgcacccggcagcccagccaccgtcagcaccgcgcctcgggcgggcttttctcccttccgggaggcgcgaatcctcaggggctccttgagagggcgccagggagcagctgcgcgcggatgccttttggccctctgcggccgccgtagctccccggcagaaacccggaagtggaactctgagccattcagcgtttgggtgaagacggaggcgggttctacagagacgtaggctgtcagggagtgtttatttcgcgtccgcttctgtttctccgcgcccctgtgctgccccgactcacatactcgtccagaaccggcctcagcctctccgcgcagaagtttcccggagccatggccgagtactcctacgtgaagtctaccaagctcgtgctcaagggaaccaagacgaagaggtgggtcctgcagcttgggcgggagcctcctccgttcttttcggacgcactccacccccgcaactccggtggaagccgtggcgcggagagccggctttgtggcctcccaggcttcgccctggcccctgtccgggctggacggaggccgggccgcggttcccggcgtctgtgcagagaggggcagcctcccgcgcggacgaccctggaaacaggatagacgggcaggtgacccgtgaccccgtacccacgagtttgggtcccctgaggcatctctccaggcctctgcctggggggtctgcattagtctgatctcgtagttcatgataatttcctttattagggattattattttctccattgtctcttttctttctagaaaacttattaattttttctaatctaatatgtacagtgaaaccaggatgaatcacacagtggttgaggtgtatatgggctttagggatatgggctcgaacctgcactcttgtcatttactagttttgtaatttgtggcaaattggttaatatgtctgaacttccatttactcattaagagatcaaa

SEQ ID NO: 43696 - DNA, 1821 bp, Homo sapiens
gaaggaagactgtgaggaaggcagggaggggtgatgtggggaaggtgcaaacagtgctagaagcttctgaggcctcctcgtggtggtgatgaatgcagagattacagagttctctgcttcgggctcagcatgcaccctccatagctaggctgggggctaacgttagtaagaatttactgatttactgagtacctacacgaagtttcacattttcacaaagtagagtcactttaagtttgtttacatgtgacctccacaaacacacacaattacaaaatagtttagttaatcaagggatgtataataaacaagaggtcggaggccccgggccgctcccgcccacctccgcggacgagcgcccccctccgaccccattccctgcggtctgggcgttcaggcccttcggtctgggcgatcccggagaaccacccacggggctttaaaaatgttggtgcccaccacctccccggaacagggcccgctctacctcggtcggggagcgcgggacctcagcgttcccttaacgccaccgtccgcgggtccgctttgcgcaggcgcggcgcccccactcagtacccgctccgggcgtggcatggtgcgcaggcgcgatgtcccccactgcagccccgctcgactccggcgtggtgcgcaggcgcggtatcccccctcccccgccagctcgaccccggtgtggtgcgcaggcgcagtctgcgcagggactggcgggactgcgcggcggcaacagcagacatgtcgggggtccggggcctgtcgcggctgctgagcgctcggcgcctggcgctggccaaggcggtgagtccgtgccgcggaccggggcggggcaggcgggggccgaggcggcggtaggagcgggacggtccccagcgggtccgagcggagcgggcgccgggtccctgcgccctctgtcccgggatcgggaaggggctgagagagccctgggccggtgcgaggggaagccgcggggcggactcggggacccggggagctcggtccttagtagatagtccgcgtccgggtgaaggtcacaaccccgcgggcttgctgggcgtcccctccgccgccttggtccgggcctggggtcctgggaccccgcgggctgaggtagcccctcgcctcagtgcctggcaggtggactcggggaggagtcgtgtctgcccaaggtcacccgggcggatagcggccggtggccgccctggctgggctgggcctctgccgccctctgtgcgggttgtcctgaggagcagcccgcagcccgtgggtggggccggcggggcgggtgagaccgcccgggtgggtgcgaggagtggccgggctcggcccggtgggcgtccggtgggaagcgtggcgcgcccgagcttaggcttgcagttcgcctttccagaaagcgcaaatctgtccatgtccacttcgagaccttgtaagttaagggcttctactttgggtcgtgtttggtggtccttatgccaccaaaaatgtgccagtgtttaaaagcagctgtgccagtttttaaaactcaggcggagagctcagcgcactgaccgggcgaggacgccgggacctgtgcttgcctgtgcgctgagtgcctctagggccgggctcggcttagtccaggatggtggtcagggttatacttccctgagcccttgctctctgagtgtctgaatgtgccctctacgattgcatcttaagaatcggccttctagggttttatttaatcaagctaaattggataggtttagttgtttggttcttttaaatgaacttacccacccacctccttaattacaaagtaattttaaa

SEQ ID NO: 43697 - DNA, 743 bp, Homo sapiens
attggtgcacgcagcagcttgaataaatctgaaagtcactatgctgtgtaagagaagccaaattttaaaagtgcatactgtgtacagagggtgtcgagaatgcctcctacgtgacggaaagcagatccgtggttccctgcagactggcaggagcagattccaaaggcacaggaagaagcttgtgggtagagtgtgttcattatcttctgtgcattacaccataaaaaagctggtcataaaaatgcgaaccaaaaacaaaggtgaaactaggataaaatttctcacctgtgtgattggtaaatgtgcaggtttgacatcatgctttgtttatgaagctgtgggatacaaggactctcatacgtcactgtggaatgcagaacattgcaacctcatggaagaggatttggcagcatctaacaaaagtatgtggcatttgccctttgactcagcaattctagactgcctcaaaaaaaactctggcaaaaaaatgaaaggactttactcacagagttcttttcacgcctaaatatgtttgcaaccaagttcttcactgtggcatttgtaaaactggaaacaatcaaaatgtccatcagtaggggattaggaacattaattcgtacagtggggaactcagtaccagaaggagggatgaggaagacctattgataaggggcagagtacatatcatataatgcaaatatatatttgctttttcttaaaacagtacaaagataaaaaactaa

SEQ ID NO: 43698 - DNA, 1501 bp, Homo sapiens
gtagatacggggtgtctcccaattggccaaggctggtctcgaactcccgacttcaggtaatccactggccttggcctcccaaagtgctgggattacaggcgtgagccaccgcgcccggcctgcttttgctttcttttttttttttttttttttggcagagtctcgctgtccacccctgtagtgcagtgagctcggctccctgcggccttgacctcccgggctcaggcaatcctcccgcctcagcccacggagtagatgggaccacaggagcccaccacgcccgactactttttgtaatttttgtagggatggggtctatccatgctgcccaggctggtccgaactgctgggctcaagagctccgcccgcctccgcctcccaaagggcagggatcacaggtgtgagctaccgcgccccgcccagagtttccgactgttagcaaatcacattcacctcaaaactatttatacaagaactgaaaggcaaactaagtccgtgctccatcacttcctgtcccaggtcgcggggccggacattttctccaagcgctttcctggcacagcgcgcaggcggcctgcgccaaagctctggcttcctccaggcgcccagaccccgccctccccgcaggcgccagggcgttgcctggcaacttagctgcgaggggattggctgcgcgggaccccgtgaccatcccggagaccacgcatttcctgcgcccccggaagtggtgataatgccaggccctgcccccggcagaggcggaagcggagtcggcctgagaggtctctcgtcgctgcaggcgcctcagcccagccgcgtgccttggcccatggccgcctactcttaccgccccggccctggggccggccctgggcctgctgcaggcgcggcgctgccggaccagagcttcctgtggaacgttttccagaggtgcggcctggcaccgcccgggcacctcccgcctccgccgcggcggccccgacccctgtcccgactcccccgaccaaccccgttccctgccggttctactgcggcctcctccgtcccctgtcgggtcccccgcggccccctcccgtcccctgccgccgcccccgacccctgccccagccgacgcggccgcccccgtcccctggcgggtcccccgcggtctcccccgtccgctgcccggtctcctggggccgcccctgcctcctgcccggtccctgtcctgtgcgtcgggcccttcccaagatgcagagtgcgccactgcagacccgaggtcgcggccaccggctcctgggctaggccctttttctcgcctcaagagccgccaggtggagggtctccagggtgcttgtttggggaaagcggaaacagactgcctgggcgctgttaaaatgtcagcagccaaggaagaagcagcgacctggcgtctgctcgggccaggtgacctttatggcggcgccttctgtccctggtcgcttttccaccgaatgtccgaaactgtagtgactgatggcca

SEQ ID NO: 43699 - DNA, 2185 bp, Homo sapiens
ctgaaataatagagccggggtcagtgtcaacatcagcagggcacggggcagggctccctgtcggagtggcagtgggggctcccgcaagctccatctccttcctgtgtgcccctgccccatgctgctgccacttccctggtctctgctggcttccctgccaccttccagacccttcctttcgtgtggctaattttcaggaggggcaggggcacaacctagcagctccaacctatgaaagactttgtcagttggtgtgtcaaagccagcatcttttatcaaacagacaaaccctgaacgctcgtggtttagcacgtgcttcttcctccaggcgaagccaagtgctggccatgggcctctcctccaggaagcgactcaggaccggccctctgcagcgcggcccagtgacccacattcattctccaagacctgcgctgctgggcctctgaggggccccggaaacatccggtggccacccatcccactggcattgttcccacgagggtgccaatgactgcgctcctggaggggctgagttcgtctttgggtccaggaggtacccaaagccgcttgtctgctggtggcaggtatgacagacgtttgattcccaaccttctccgctttggtttcttcgtttactgaatgcccggcgcccacctcagtccgcgggaaacgagggacgcccctgccacactgcagtgcggacgacgaggccaacataaagacagcaggcatcagcagaggatggagacagcggctctggggctgtcttctctccgcaggttgggaagggaaaggagagaaaatgcacgcagtcacgctcggcggaggcgtccaggactgcgcccgccctggggaagggcgcacgcggtggtcgccaggggcagcgagagggcctgagttgggggggctgggacggacaagaagccccccacctcggcggtttccctgtcctgctggggagcggccatggggcaggtccccgagctgaagtcgctcggccgggagacgagtacccgccccgcgggagggcccggacccgtgcttccggcgccgttgccggaagcggaagtgcccgcgcgctgtccacttccggccgggaccccggaggcggaggcagcgaaggcggagggggcggcgggggcggcggcggcggcggcggcggcggcggcggcggcggcggcggcggcgtagccgtagagggtgagtcggtggcaggtcctgacggccggcgggtccttgggaggtggtcgccgtctttcatccttgctctccctgtctctggcttccgcgggggcgcgtagggggaggccggaccgggacctggagggcggggaggccgttccggaccccgtggagtatcccgctcgtgcgagtgtcctcggcgcaggtgtcctccccggcacatgtgtcccccccaggcgtaggtgtccccttggcacatgtgtccccacaggcacaaggtccttcctggtgcaggtgtccccttaacagtgtcttcccccacgccccaggcgctggtgtccttcctggcacaggtgtcccccctcggagcaggtgtccctccttggggcagatgtccctccaggcacaagtgtccttcctggcgcaggtgtcccctcggcgcaggagttctccaaggtgcaagtgtcccctcaagcacaggtgtccctcccaggcacaagtgtacttcctggtgcaggtgtcctcttgacggtgtccccccccaggcgcagttgtccttcctggcacaggtgtcccccctcggaccaggtgtccctcgtcggagcaggtgtccttctgggcacaagcgtccttcctggcctttaggaagctttcaaggtgcaggtgtcctccaaggtgcaggtgtcctccagcggagtgtcccctccgtgaggtgcctcccagcacaggtgttcccctcggcgcaggcgtccccccggtaaagggtccctcctggcagaggtgtctgcccggcagaggtgtctccctggcgcaggtgtctccgtgggtgctgatgttccccgcagtagggtgtccccccgctcggcggagaggctcacagcggagccagcgccaggggaaggcagtcagaaaggccctggtaggggctggacctgggtctctgtttatggtctctgagttcctctttggcttctgtgacccaaaatctttagtcttcaggctg

SEQ ID NO: 43700 - DNA, 2239 bp, Homo sapiens
ctcctcctgactggtgactgtcaacacttgatctgaaacgtgaatagtttaattttcctgagcaaggagctgcgagtctagctttagaaaagcccctaggagtgtccacctccaccacttccaccgtgcaggcaggtttcaggtgggttggaccctgtgggacttgccgtctgagggatggatggactccgagcaccctccccggctcagcacccgcggcctccgcccactcaatggactgtgcctcccagagcttgggctggatggtctccctgcagaggaccaggagctctgtccaaggcctcgccctgggacgctggaaggggtgggaagggtcaggggtccggggtctaggacaggctcaggggtctcagcaggttctccttggagggcctgagcctggtaggggggcggtgccctgggcccctccatgccccctggtttgttaagggggacagagcagctgctgggccccaccatccacttaaggactggccgtgattcttggcaagctccgcccgccaggccacctctcacccagccagggcaccccgggcgacctccgcgccaggtgcgacagctcaggccggagacctcgtctgtggggacgggccgtgtccggggccgccaccctgagaccgggcgcgggcaggacggaacctgggggggaaacggggcaggtactggctttaggagtctaaatccccaaacgctgagcagacggaagacgttcctgccactttacctgcagttcaaagacctggcgagggcctggaaacggcgctcggcccaggccgcttgcgggcgctgggcctgcagccgctgcaggtcgggccctgagtcctggcgctcgggaggtccctgagtcggtccccgagtcagtccccgggcgcggggctcggttgggggggcccggaaccttgggctggtttcacgcaaatccgtttggggcgagcctcggtttcccggcagcggtgggaaagggcgcgagcggccagccatggcgcgcggacccttcccgccggcggcgtcacagcggcgtctcctcctgctccagcgcgtgcggcggtgcgtggcacgagggcggcagcgacgccagcttcagcagcgcggggcggcggcgcgcgcgaggccgctggaacgagcgccggctgtgcacgcggcgcgccgccgccgaacgcgcgtgcgcactcggcagccctcggcgctccggccccgcccccggcgcaggccccgcccccggctcgccctcgggcggctctgcgggcgcaggcgcggcactctcggagttctgcgcaggcgctggcgtgggcgaggcggggctcggggctcgcggtcgctgtagccgcgcggggatctggggtttctctgggacagcggcggcggcggtgggcggaccgtggcgcggggacgagcggccggttagcggcgtgtcggagccggtgtcacctgcgggagaggaaggcgtgagcggcgcgcggagcccgggcgctggggcgggaggggcgtccccgggggcctcagctgtccccgagcccggcggctctcgcctcccctcccgcggcgcaccccaggctcggcgtccgctggggcctcctcccaggacccgggttcgcggggcagaggcggaagcagcaacagcgaagccccagcccggccccgccacgtccccccgccgggggtcccgggacagcggcctcctcggcgcaggaaggtcccgccccaggccctgcagcgcgggaggtcaaggtccccaaggggacctgcttcctccatctcaaaccgccctggcgtcccccgggtgcctcccaggcccccagagggagctcagaaagcccagaccccacggcccgcccctctccctgctctgagctggaggcagagtccgggtctgcggggccggccctccctgtatccctgtgagagggtcggggacccggggcgtctgtctggcttcccccagccctgctctcagctccctgggagcgcaggatttggactcgcggactagctttcggagccacctaaaggaaatctcaggcggccctagtgccctcagctccgtgggagcagcagagacgccagagtatctctgtccgggctcctgagggaggtgcggccagcagggcgctagaggaggaagaggggctgctggagagagagagcgcgccaggttcaggtccagggaggagagagagcgagcgcgcgaggcggagacctggagggagaggagctgcgg

SEQ ID NO: 43701 - DNA, 1445 bp, Homo sapiens
atgtcttgagcaggattaaagtcttcccaataaacaggctgaactctgtcttccttgaaagctctgtagaaggacctcacaaggataaacacagcgagaccctccagggcgcggtcagccacgagccacagtgctgggcctgtgacatctctggaggttctggggtggagaaggaccggccgtggggagtgactggctggggagaagctcagctcccgcccacctctgggaggcccggggctggacgggaggtgcagcagacaaggctccgggcgggtgctggggtgtctggaggggtccccgcgggggggtcgggttgggtggggagtctaggtgagtcgggggtccccgggggcgctgggttcagggtgggagcggagtgtggatggggcagggtccccatgcccaccaccagccgcgattccaccgcgcctactcggggtttccccgggaggacaccgcgtgtgtcaagggccggggcctagaaggcggccgcgcccagggaagccttgacagggagctatctggggcgggggctggggtcgcgtggccagtacctgggagaaccgccattcaggagaaccccccgccaggctcttggttccgcccacgcagtcccgccccctcccccagccacgcccctcgccccgccgcgcaggccccgccccgtcccgccaggctctcggttctgccgacgcaggtcccgcccctctcgtagcctcgccccgcccgccgcgcaggcgccgtccgagggctccgtttgaaacatggcgcgggctggccctcggctggtgctgagcgaggaggcggttcgggcgaagagcggcttagggcctcaccgcgacctgggtgcgccggagggcgggcgggggtgcaagcgtgaggtggcgggggggtgggtgccgagcttcccggggcggcggcggaccgtgggcaggcgggacccgtctacgcaggcgccgcgggcgtccggaacggtcgcgggcgagcggggcgcgcgtgtccaggtgagcgacccaccccccgtgcccaggtgcggcccctgcccgcgttcgggtcccggcgtcccggcccctgcctgtctatcgggtcactggttccgtgactgggggttacatccgctgagaagagggagccggccttgctgtccaggagcgcagcccgccctcccgctggggatcacctccctggttctcctgggcccactctgtggtgattgttgcgctcggccttcttgaggatgttggtggccggtttccttctttttggcttatttttgtctggttttggcgtcaaggtgaagccgagctcataaactgctgagaagtgttgccttctcttatatttagaagaggttctgtagagtgtgtgctcattgtttgaatgtttcctggaattttccagtgaaaccatatggacatgtcaatttctgtttttgaagcttt

SEQ ID NO: 43702 - DNA, 1007 bp, Homo sapiens
ggtggggcgtgtgtagtcaccgccctgtggacatcactaggaagaggtggcccttggtgggacgtggacttggggcccagagggaccccgggcagatctgaggggcccgaccttctctagggggccccaggggctcggctgcctccatccaccccagtctcggcctgggcagggctttggtctgtgcacctgaagtcagtttctggctgtttgtttggagatcaccttctcaaatgacctgtgttgcctggtcaggctcatggggcaaagtggacagccaaggccacgcccaccactggccaagcgcaggagacgggtgcctgtcgccgcacagtgctctggggattgctggtgctgcccggcctgcagggtacaggagccacaggccttgactgtgaggccacaagctcctgaaccctcagccacagacgtccatggccaagggtccccccgcaggggctccactctgcggaagccacgttcatcctgccctgccaggcgtggccactagaggctccccaaagacagaactggccccagggctccagagccgccgagtgcaagcccgggacagggtggcacccacagcaatggagggacagggttgggtgtggggagtgcagcccacccttcccccgggctgggtaccacgggggagggggaggggagcaatgcagccctgaggctcctggccccttccagggaagctgacacctgcttttctgggatggacagacaggaggacgtcacacacagtgctctgaggacctcacttgccctgtggcggctgccctccaaacacactgtgacctggattctctccaaacctgggtcctgctcctgggaggtggttgggttggcttccgtactgggaacagtccgaagactttaggacaaagtgtcctaccggccctccacacttggggtgaccacagaccccagtgccggctggccgggggggtgtaccaggctcagcagccctccacgctcggggcaaccgcagaccc

SEQ ID NO: 43703 - DNA, 634 bp, Homo sapiens
gcggcgcaggtggctgctggggctgacgggcccagtctccgcccccgggtgccccccgcgccgcgcccgcgggaccgagccccgcgcccgcttaccttggagacgcagcgactgcagcggaggcgcctccgcgactcggccgcgcgcgacccggtgctcagcggagctctccagccgccgccccgcgcccgcccgtcccgcccagcaccgcccagccccgcccagcccggtcccgggcccgcccccggcccccagcgtccggcgcccgcccagcgtcccgccccgcgcgctcattggcagccccgcccccgccgccccacccggcccggggacgcgcgggcgcaccgagacctctgccttacaaggccgactctgctcaggccccgcggaccgccgggtatccgctcagcgcagggcgcggccgacccgcgggtcgtgggaaccgctgggcagggggcggcggggcccctcacctggctctggggccccccggggacgaccggaccccgatctctccgccccgcaggacgcgcgttgacggtgcggcgggggatggatgagcgcggccgcggcctcctggggtggggtgggttggcggcggggcctcgaggacggtgcggggcgagccccgacc

SEQ ID NO: 43704 - DNA, 1426 bp, Homo sapiens
tacctttcgcttccttctttcctcatcgtccagatgcttctccttctcggacttcttcttcttcttctttttcttttctttgtgcctctctcgctcatggtctgacctgtcatcatagtaactggagtcgtggccggatcctgagagttcagtcacttcacttcctccgaccttcaggactagctttagaggcttctccaggggcttgtcggcataatctgcacagacacagaccgagttctacccgcgtgctcaggtgcaaacgccacgcagccaggtgagacgtgaaggtgctaagagggaaaggcctccctaaggagtacagcggggctgccaaccagcagggaaagacggaagggaagaccacagtggcggcatgtcactgcctccttgttctcccttcccctccgcagggagcttcaggtccctttcgagccacggtgtcctcaccagaggccctgtgggatgttgttcacattactcgttcaagaagatggattaagagggacctggaaccccggagcccgatctccctcctagaaacccccagcacttcggttcaccctcgcctgacttcctgcaggcgcccgtgctgcccgctgacacccatggagctgctgcgggagcaagggagagggagggaaaggcgggagaaagggcagcccagcttctccctgagctccacacaaaagccagcacagatgcttccctagtctccaggaccggggtgagtgggcttgcagcctcgaacccagaaccctctaccaggaacgtaagcgcctacccaggacccctcacgtgtgcccggttccctgcccgaaatcccaggaccccctcccgcgtgcccagaacccctccctcgtggccaggacctcgcccggtgcccaggacccccgtccgcgtgcccggaactcctcccccgtgcccgggaccccgcccgccgcgcgtcacaaagcgccgccgcctcaccctcgtaggacgagcgccactcggccttgtgcttcttgtgcttcttgcccatggcggcgccggcggcgggcccgaggcgggggctgggaacagctggcacccggtcggaccttggccgccaccgccccctggccctggctggccgcccgcgctcgctgcgccgaggttgccgagctcgctgggccgcgccggaaacggggcgaggcggggccgcggcaggaagtggccctgccgggcccgagcgcttccgggtcaggaggtggtgcgcctcgcgcggcagattcgaagctagggcggggcccgcgggctgaggcagcggctgtggcggcgacgctgggcgtgaggtggcggcggccgcgccctggttgggtccccactgctctcgggggcgccatggacgaggccgtgggcgacctgaagcaggcgcttccctgtgtggccgagtcgccaacggtcc

SEQ ID NO: 43705 - DNA, 1657 bp, Homo sapiens
tgcaggagatgccggcactccccaaaggactcttcagggttgggggcggacgtgaagggaggaaacccactcaccctacttgaattctgaacacgcacatggatctcggttccacctccctttacagtctatttaggtcctgctccaccttggagttctgatgcccatgagtggggcagaaattcccagcatcatggcagggaaagtcggtggggctcaaagctccagccaagaatggctctgcatctgcctggttctctcttcaatcggggcttctgtggccaggacactggcatttcataaataattacacattccttaaactctcacaaagccaagaggaaacaaaaccgcaatgctgagattcctggaatgttttccagttatctgggccaagcagaggcccagtgggggctgtgcagcgcgcttagcctgggactgggccgtagtcccctttcttgtggcattttagctaaaagacctgaaaggaaaatgaaaggcgctttatgactgtggtgttcgtcagggtccccagacaatgggggaagcccatccaatcctcagagctggctcggggcagccccatggatctgtgccctgggactgacctcggggccaagagaaccctcaaaggctgaggtcaccccgccagggtcggtttaggtgtggcgcctcctctggacgcccctgggattgcctgcgcgcccggcccggagctcctgttccaagcagggagcatccctggaccgtgccctcgttcctttgaggttttctgtggcacgcaccacagtttaatgcgactcaccccagccatgctggggctggtttcctgttacaaacacaggcttagttttaagatcaaacaactgtttgggttgtggtctgacctcgcaggggatgtggctcagggcctggtgcagcctggccaaggggtgacgtccggtcatgctggcttcattccctgagcaccgcagccttctctgtgtcccctgtccctgcccacctggcctcctcaagcgtctgtccagcccagcccaggttgcgctcagcagtggctcactggcccctctgccatccttgccaccgatgcccagccttatttatttggggtatttctgggccattccacccactcctcttgagggcacccagcgtgtcccttgccctgtgtggtcggcgcccatctctgaagtgcgggaagcaggaagcaaggcctgctgatgggaaggacccacggctctggctagaatggctttggccctaagccaaagctgagggtgtggggaagcaggaaatccagtgtggaagccattttggacgtcaaatcagtgggtcagggactgctcacacagggtcgtcttcttgtgacttttcagggacttgcttttaccccccttctctggtgagctttctagacaaggctgcgacatgacattctcattctgtttggagcaggatgaagggttcgtgcgtaacactatgaggcgtggacggggctgagaactggcgcatggctgccacctgctgtggtggtgaccaccgggagtctccctcgcaggctgtctggctcaaaaggtgacaaagttccagccacggggcccctgctcagccctgaggacacccacactggcacaggggacactgcggcagtcaggga

SEQ ID NO: 43706 - DNA, 1061 bp, Homo sapiens
gtctcagcacaggggacactgcggcactcagggaagggcacctccccacgctggcacagggtctcagcgagagactacggcatttggggaagggccattttgtcattgactggaactttctcaagaaagcattttccacttgcgtttccatggaggtcggctttgctggaaaccacaggaccctgccctccaccagacacacagtgtgcagaggcgtgtacccgaaaagcaaagtgcggcctcacacggttctttaatctggagccggactcctgggaaacaaaccaaacagacgcaggtacgtgctcagctctgccgttgcggtttggttcaggactagggccgtgcagatgcctggcaacagccgtgcctgggggaggatgtggcgctgggagcccgcaggccgggagcaggcgccgggggagcttcggcggttctggagggactgggtgttcccgccaaggcgttgctggccaggggcacaaaaaacagcgcggatgggaaacggagcagccgcactctgtccgatgagtccacacgtgggcggctgcgttcagtgctccctggcacggggaccccaagccgtaagccggacaccacgttcccaaagccaggagggtcatgacatgtgcgtgcggtgtccaaaggccaaaccaaggttgcggtccctgccaagtaggcagtgattcacacctggggaagcgatgtgattggccttcttctattcaaataatgtaagcataagggacagagaacgccagtgcttgcgcttgacaaatctctgggcattttgccaagggccgagctcggctccccacccccagccctgccccccacgtgacaaggccccatcggcccccaagtccatctgagctcacactcacgcaacaggcaagcctccttccaaacgagtaccctttccaaagcccaagtggccactcccccaccatggggctgggacagagatgaccgtagacctcaagccgctatggggacttgggtcacaaggtgccgcaatgcccgggtgccccctgtgcctcagtttccccatgtgggaaatg

SEQ ID NO: 43707 - DNA, 1071 bp, Homo sapiens
cctatttcaactccagccacagcctggggccaagacagtgtcttcaaaagaggcccctgaccccggggtcagagttggctacaccatgccttccaggcacgccacaccgtgaggtcacaccgcggacgcccctcacacaggggacgcccctcacacagcggatgcccctcatgccacggaggcctccgcacacagggacgcccctcactccgcggacgcctctcacacagggacgcccctcacacagggacgcccctcacgccgcggacaccccctcacacagcggacatgcctcgacgccccttcacatggcggacgccccctcacacggcggaccccgacctcgccgctttctaaacgggaggggaggagccgtggccaccgtgacaaccacaaaacaggatgagccccgcctcccagaacgcggagtcgcggtggaagagggtgacgccgccgagagttcacgagcgtgtcccaagccgagtgaggagcgcgcgggggcgctcttgctcccaaggccgcacgagcgccaaggcctcgcggggagaatagccacggggggagacggggcccgcgctgcccccacgaacgctgttggtggggaccccacggctgcgcccgctgaggtggaggggccgggaggacagagccccgcgcccgccgccgcccgcttctgaccctgccggtcccgggctggggcagagaagggcgggcgcgggcggccgtgccgggagcggaggcggacgccggccgggtctccccgggtctccccgctgggcgtcctgcggccgcacctcctcctccatccggagaccaggcccctgccccgcccgcggctgaggagataaggagaggctgatttgaaaagctgcgaggacgcgcattttaacctccagggacggcttgagccccgccctgcctttcgaaagtgctgggaacggattttatcagcaggcgaaactgtcctcaaagctccgtggcccagcaaaaggcagggcggggacgcccatggcccccgggccggccccctacgggctcagcctccgagtccccggactggacggcgcgggc

SEQ ID NO: 43708 - DNA, 1575 bp, Homo sapiens
cccaggacaggacccctgaccatcccggaatgagggcttaggggaggggagcagaaccacatggttggcagagaaccaagatgcagctgctccgctgtgcctccccgacggagggaaacctgttacactggaaaagttatggaaaaaacaagagggagaacgagagggcccccggctccgttccctggatggctcagggcctgagatctgacaccctgggagagcctgagacttcaggaatggaagcagagccagcggagggatgagacggctgctgcccataaagctaaaaaaaaaaaaaaaaaaaatccacagctcagcgtcggccctgggcagaaactgacacatcttaaccgggcacggaggtcaccacgagataacagcaaaggttcagatatccacgtgggggccaccccgcctgccccagcacggagcaggcagcctgcttcagacacctgtgccagagagggggacacaccctgtgccctgagaaaacccacatgggcaagggtcagcagcacagccaggagcaggccagcgcctgccaggcagctccccagctccactcgggacgggccaggctggggtagaagtttcagctccatccccactgcctgctcagccccactcccgccatgagcagaggcacgtggctcagacctggaggacggctggtgccagcacaaggtgacgttttaacaggaaaacgtctcaaggtcaatacggaaaagggggaaggttttatttgaagacacttcctgtgaacagtggccacaatgtggatcagaacaggccccgtgcggggcttcgatcctggggttcacacagcccaggcctggggaggatgggaacaggggaccaggtgaggggcagctcccagggagagcacgctgaacaccacatcacaaaagcaaacagggtggcttctggggtcaccgtgccggaacgcctcccacagactggccaaggctggggccagggcagggctctagggctccaccaactttaggaccctgggaaaaataatgtaagagcagctcggagcgtgggaagccctggatctgagagcctgggggattcacttggttccctgagccctaggtgggaagcaacaggggagcgacttgcttctgacgggggccctggagaggagagggtgacggggctgggggccgctgctgggccctccaaatctgggtatgctttgttcttggtgcaaacgagagaagcggtggcggatggtggagaaccggctttgggacattctcattggataaaactgagagcccagggcagaggtgacagcaaggctccagggacaattgttgctgtgacttcccagcgaggcttcagctaacgcaggagccgacaggcagagctccaggcagagacgcggtccacacaggggcccctgccctccaggctcagcctcaaatcccgcagccccgtgacaggcgagtcagaagctggttctcggccaaaggcgggggatcctgactcctcacggaagggcatggccggccttggcctcttggttcgcgcctaaaggcaacttttaaggctcaacctgaccca

SEQ ID NO: 43709 - DNA, 1005 bp, Homo sapiens
ccccctctaaccctctgcacacccagcccccctctaaccctctgctcacccagccaccctctaaccctctgctcacccagccgcgtcccttgcgctccctggcctggacttggacatcggcagtcctggctgctgtgaagggcagtgagttttcctctggccgagccctgcctgtgttttggggatagagccactcgcctgggatagcacctcctcccttgtcattctgcacattcatgatgaccggaaggctgagaggacaaacggacacaggggaaagcctgggcgtgcggtgcaggaaggtgagatgggcagggtccttgccaggtggcccacagtgtctaaccctcagggcaggtcccggtggtgcccctgcccaggcgccatgcaccagtggcctctgccaagcagggtgaagcgggggcgagggatggcccaacaacccagatcaggtctccccagccaaaccccaccccatgggccaaagagcagcacccagataccacgtgccctgaggcaggagcagggtacagacatcaacctaacccggacccggtccacctcctccggtggacggcagaacccaacccggtccacctcctctggggcacagacatcaacccagccccgacccagtccacctcctccgggggacagcagggcccgacccggtccacctcctctggggcacggacatcaacccagccccgacccagtccacctcctccgggggacggcagggcccgacccagtccacctcctccgggggacggcaggcatcctcagcgggtcagaggattgatcccagttccggccaggacacagaatgagccatggtaccgacctccacaaaactcgcctcccctccctcctcccgaagacgaacccgtttctgacttatctccacatttaagggctgaaatgctgaactcacctcacagaagccctgtaaaggccggctcctttcacattgtacatcacagccgtggcctgcccaccacagct

SEQ ID NO: 43710 - DNA, 3284 bp, Homo sapiens
ggagaaccagcaacaccaggctgaccaatgctgccctcctcctcagccatgaaggcggcgaggtcaagccctggcctgaagaactggccacaagtcagttttttctcgtcttattttttctacctcttcattttattataaaaacgaccccaggtaagcaagtgggcagacaccctgtgcagccctatgggtgctagctgtccacgcacagatccgccccacacagccctggtctgatgcatgtcatggcacacagtggccaccactgccccgacccccctccaccccccgacactaagcagccttgtggccctccggagccgctttgctgagttttctctggctgcagccgcctgggcaagagaacgtctatctgctgagcattaacaaaggcctgcccctgctcaccggacctaccaagagcctcccaccacttccccagctccctccctgccaagccccccagccacagaggcaacctccggtctgtttttcactctaggttagttttccagacaccttatcaacaaagtgaatgcagaccctgtggtcagtaagcagatcctgatgggctgggcccttggggaacagcctcctgggcttgtccaaccaggctgtgtccccaccccgagagggaaggaggcggctgcaggtggaagggcaaagaccagacacacgagtgtcccggccagaggaggggcagcccctccagccagagaggcagtgagagtgtgtgtgtcagatccctgacccatcccgatccaggcctgggaagtgcgttcatgggtagtttctgcagggagaagctggctcacctccctaatcggccctaatcccctctgagatcacaatgcctccatcagcctccctatctccaggcacaacctcctccctttctcagtggctcatccctccccctcttcctcccgcgttttgggattttacagccattctccgcaaagggctctaggaacgtcctcttagactcagcctcagccggaagcagctgacaggcaggaggggctgtgaagctgaagccaggtccgacagcctccgccccttcctgccctccagcgtgggtggtccgtccagctacccagccctgcagagcagtggcgggtggcaccggacctgtgcacacagagaggcgccgggcctggggcaggggacaagcaagtccaggcttcccggctccctgcactcgaggaggttctcaggcctggctctgtgtgtcccctgggtccagcaggccaccctcccctggagccacaggggactcacagcagaatgagtcccacctggtgacccagtggcatcagctcacgtggcctctggggacagcccgagactgaatggacccaggagcaccccccacccaaccccactgcctggaggctgagttccctgtgaaggcgcgaggacccaggaacactcccaaccccactgcctggaggctgggctccctgtgaaggtgccgggcactgaaataaagtgtgtttaggttccaggatccgaacgccagctgacgacccctggcccttgccctccctctgcccctcacagtttgtgctgtgtgggcccctaaaatctagaaactgaggctctcaaggggcacaggatgagaacggcccagtgttcaggctgggacacggggggcttcaggcaagctctcaggcttccagcacaagtttctggctaaagcagcgctgccttctgagggaaaaacaggcccttcatcacccattcccgaagtgacctcatcccaacagtctgtgcagacaccaccgccagtatcctgtaaaccaggagagcgccgggagatcccagctcaccgtcagaggcactggaagcaaggaagcctggctggaaggtcctggcaagctatggccagacacacatgaacacacgccacagaaaatatacactcacatgcacagagacatgcatgtgtacacatgcacagacaggcacttccacgtgcacacgcaaacttgctcacacggaagacactctccatacccatactcacacgcttcccccctcattcatacacacaacactcacctcgcaaacctgcacacgcacctgtcctcacatgtgcatacccatacccgcagtcacatacacacaccaacacccgcacatacacgtgtacacacacacatacctgcagcacacacatctgcacaaagtcccaggggctacagcccccagactgcacgacccacggggcggggtgcccaggacacaggcatgcactgggactacagcccttccatctaaaggacacgcctgctcgcgggaaggtggcctcgggtgaactcacttcccgaaccctctgtcacgtggctgtttgctggtcctggtccagcctcctccctcagcagccagagtgacgtctgagccatggaggggccgtggggtcccctagttccagagactcggggcccaggcagcctgcaggagcagagatgaaggaaggcgggagaggcagggcccccagcgcacctgccaggccctcccagggcggctcctgttacaggctgcctctgggctgcggtcggggacccttggcggcatggaggggacccaggaggggcctggcctggcgcacttccctcctccgatttccactccactcaatccctccccagtgactgcccagggcgtctctgagcctccctgaaagcccaggcccgacccgctggcgccagaggtctgcagacagagccaaggagatgagaggtcacagccaccgccaccctcgtgacaggctggctcctgccaagggaaactgaggcacagagcaaatgttcaaggatcactttaacaacctcctcccggctgcacgtctgcaaggtggacatcccctgtgcacgggacttaaatggacaggaacgctgggagggccagcggggctaccccaccatgaggacagctccaggccatggcagacacacaaaccaggcatgccaaccaagcacacgggcatgctgcgtgcggctatccatggccagccttgggctcaggtcccagcccccaaacttcccagagccactgtaaccactacagtggatggcaatctgactccaggggtcaacacaggcctgggcggggcccactctcatcccggaccccaggaccactccccacagagccgaggcccaccggggggtgcgtgtggggtgcgtgtggggtgctgcccaagaaaaccccagaacgcaggaaacaaaccaccccaggtccacacgtgattcagaagcagcactctcctccccacaact

SEQ ID NO: 43711 - DNA, 6917 bp, Homo sapiens
gcccaccagccaaaaggaccctccccacagggatgaggtcctgcagtcacccaccagccaaaggggaccctgccgtgggcctgccccccggcactcccggccagaggctccaggacccttggggagtcagcggccacaaacaggggaagaggcagggcctggacagcatggccagccaggcagctcatcgttcaggagctcatcgttcaggctgctgcgctgaagccagaggtttatctgcacagaacaggcctctgcccccaaaagggagtttcccctttcttcataaaggaaaggtattaaccctttgtgctctgcccttgtccctgggcagcacttccccagcatctgagaaggaaggccaaaggagaccagccccccatgtcagttaccaggagggcccccagccagctgctcaccaggccccagacacccccagcccagcccactgccctgaagaccagctggtccactcctgaatgccgtccacgcccagccccactgggctccacggggttcccatgccccacagtgggagggggaggtctacccctcaaggccctggcgggcctcacactccccagcacccagggactcctgccccacccaccacacggccgtcacaaaatgactctgggatccaccctcagaaacactcagctgatggagccggttgaaatcaaaagcacccagccaggaactgtggttaatacttaacgtcaaacatcaaactttgccctccagacctcggtctaaggcacagcttagaaaattcatattctggccagatatggtggctcactcctgtaatcccagcactccgggaggccgaagtgggcagaccactagaggccaggagttcaaaaccagcttggccaacatggcaaaaccccatctgcactataaatataaaacttagccaggcgcggtggtgcgtgcctgtggtccccgctactcgggaggctgaggcacgagaatcgcttgaacctgggaggcagaggttgcagtgagctgagtctgtgccactgcactccagcctgggtgacagagtgaactctgtctcaaaaaaaaaaaaaaaaaaaaaaagaaaattcatattccaacagggatggtaacaggagagccctccgggcagccagctggcctcacagacgccatccatccctggggtgtcggctccactcgtgcccttcacagctggggggtcaccctgggctgacctccactcccagtgctgtgcccagcggtgccacgtcgggatgtgtctgcagtgcccaaggacagcagccctgggaaggctccctggtccaaggtatgaaaggaaaacaggatctcgggacccaaacacactaagccacaggcaagagtcaggctgggaaccgggtcacgcaagctgccttccattttcttcctgtgtagaaagctgcaggcctccctcatattttaggacccacaggatccttacactaaagcagttgtgatgaaactcacactgacggtggaaatgacagctcatcctcacgggtgtgggaccaaggacagaaccaggagttgctgctctgctcgccggaggcaaacgcacacctcactgcttcgcccaccctgtactgactgtgtcgaaggtaaatgtgcagagtcactaagcgtgagccgtgaggggttcttcctttacccccatgtgtaacacacgggttcagtgaacgctgatcaaacgctgcctgcctcttatctgccctccctcttctttctctttctttcttcccctaatactcacgctttactctctgaatattcaagttctcagccttctttgagaagaaaagccggaccacaggagttccccgtggttctgtgttaggcgtagccttaacctcggcaaataaacctctcaagtgattgaggcccacctgggtcgctttctgtgctttacaaaggccacccatcccccatgcaggagcctgggccatctgggaatccctgggtcaggtccagggagctgtgtaggacgtggccccacgtccaaagggcagaggccctgacagaggtggcctcactccacggcccactcactgccgggcatgaggggaggacagcccccaactcaccctcagggtccctcaggtgcctctgcttgactccagccaccacctggcaaggtctccgacattcaccgatccccagcaaacctgtgtgacttcggccccgaccagccgccctgcacccaggcctgagcacctggccctccccttggcaccaccttcccgacagccatccagaccacgggagaggcactgagaaagccacgcactctaagaaggggatctggtgtccaacgctagacagaaaaccaccgtggaatccgtttggcctcgcccactcagagaagcctggggagctttgcagaagaggaaaccatgaacctgagtccacgaggcaaaggtctcctcatatgatcagaggcccaggagcaggttcagacctgaacacgaggccacaccaggagagggagcccctcaccactcactgatgggcctagaccagggggagggaacggatacccaacacccaacaccgcgtgaccctctgctgtggaggaagccccagcccctctctacctgccacagcatacaaacacacacatacacacacacacgtgagcatgcccacagcacacagctgtgcaagagcacagtacacatgtatgcacacgtgtgtacatatatgtgcacatatacacagtgcaagcacatggctcacacgtggatacacctgcacgctcacaaggcacataggtgcccgcacacatggacccggccagctgacctaaagcaccatgctttaccgcatgcctgctaaggagagcctcttgccgggagacagcctgggagtatgtcaggcgcaggaggaagcacaggccccggcctggatgcccagcagccacggcgttcctgtgtatcttgtttcctttggttttaaaaagggaactcgatacacaaaatgcatgtcttgtagcctccctgcctgctcaccacatacccatgaccttccgttcccgcaacgcagtgcccagctgctgcaggggctcccgggcacagccgcggggtcaacagcctgcctgtccctcctgctccgactgcctcccatgtccgtgtcgggaacgccctcctgaaatctgggcacaacgagagctctctgtccctactcggcaggacagaacctggacgctctgtgtgtggtccccctatctaatgcgtgatcccccaagtccctgcatccccaaaggggaccccagatcagcacgaccggcgtgcaccgtctcgccattcccaagggcagtgcagagcatggcacccagcacccgacaggcgaggacggcccaggacaaagcggcagctctagctgtcctcagattttgggagggggctcccaacacggacacggtaggtagttggagcaggagggacgggcaggccactgaccacgcaaccgggcctctgtcagcggccaggggcagagggaggcaggaccgcccctggacaaccgacacgagctcagccacagtggaaaatctcagaaacggaacccaaagagggaagtggcgcccaagccaggaagaagctcccggcaaacctgggagagccccagctgagggtgggagacctgggggtacaaggcaggacccaccctctcccagcccagggagccccagacgagtggaagtccctcctagacagtgggtggccagggcctgtgggaccttgacagaggctctgcacgctgcaccttccagacaggccggggcactggccagccctcctttcccacccctcccagggtctccgaggcctctggacgcacccctacaacctgggaaggagtgagtctaccctgatgtggtcacggaggaagggtgggctcccccaagtcagttacaaaacccactctaccctgaagtcggacgagacgcagccggcccccagcagtgtcctcccacctcctactctcaaaaaaccaccccactgagaaactgagggttaacacgtccttctcatttcaagacgaggtatttcacataagaataaaagctccgtcccaagaagtgctgagggcacagtgcccatccccgggacaggacgcctcccgcagaggctccaccagaagcagcagggaagctgcaggggtcggggacagaaggcccctggagccaggctgggcagacgcggccttgctgggctctgggtcgagccaggcagcccgggcagcagcatctacccctctttccccagaaccccccaacccaggctggggacaccaaggcccctgctcctcaagttggggtggctcaggacgccctctccacgcccacctggcagtgcctaggatcagcccaccaggccccccaaacttgcttcgccgtcacccaggcgccagcccagaagctccagtacctccacagaccgttcaggggaacggcaatggagtcaggaagagcttgggtgctggtaactctgtggccggacagttttggacctggcctgtgaccttgtggtgtggaccccacacagaaggcctttgggaggggctccggcttctgcaggacccccgcccccaaccaccaccaaaaagcaaagcctgtgcctccttccccaggctccgtgcccatcacgggactcctcgccgcacctctgtgggctgaagatcaggatgtgatcaagtggattccgaagggcagctgcgtgcccgttacagcctggcagtggctgggcaccgggccctttctgtggaagtaggaagcgggtccagcacaaaagcgccaggtgcaagttctctgccagttcggagaaatctcccaagttcagctcacaccacagggccaccctcaaaagtgtccagaagcccacacctggcccatgccctcccgttctcaatttcatgaaggccagggagcctcctgacacgcccgtagcaggacctgagtgcgcgggcagcgacatgggcagcgctcagccagggccacttcctgctgggcagacacaggcccagggcactgctcaacagccttgagagtagaagagacaagaaaacgaacaagcacaaaattctctctggcttaaaagcaaatgacacttacagtctaaagacaaaagtgaacctgatcagccttgagaaggggccggccagacaagaagaggctccttctgagtgcgttccgggggcgttgctacaaagctcacacagaaagaccacgccagggcccacactccttggtgcttcctgcctccacggtggtgactggagagaaggggcttggactcacggaccctgcttagttagcacttcacctggtgttgagcctggcgccccgcctgaccacttccaagatctgggctggcctctgtgcagaggaagctgagaccactcttcgcccgccacggggaccctgatgacgcaccccaggccaccaggccactgccttcacggtgggtccccacccgtgtctccgggttcctaaactgcctggaggggatgtctggcctttcctgcccgggatggtgggttaggaaggatctggggtctggcaccggacttgtccctggacagacctcaccttccttccactgccagggagcagggaggctgccacccactgcatgagacccgggcacatgcgggcactgccagcacgcggggtgggggctggactgagtccggacaccttctcagagactccggatggaagggcctaagagcctccggtttctagagggggctgagatccggggagtaactgggatttggagccaggatggagggaacagggctgggggattctctccccagccccgtccccaccccctagagaaagtgaaagtgctagaaacctccagattcccggaacgggggacgggaacacggaggacgcggcctgagcaaggccccggtggctgccccctccccagccagggcgcagtccttcctgttccgcctctggggggtgggcggctcctccagggtcaggcgggggcaggacgggccggcccgggctagtgttaccggacggccgcggcgcaggggaagggagagcgcgggggacgcaggacgccccggctcccgaaccgcccgggtctccaccgccacccctgtcccactagggaccacccaggggcccgggctccctccggaggcgcgctccagcccctccccgtttccatggctaccagcagcggcgtccacacctctgcccccggtcccacccgagctgaccgtaccgggagccctggcagggcccctcgccccctagcgctgccactaacgtggggtgggggccctcgtgggggaccgagaacaggcggtgggggcgcgggaaggggcgcctcctgtacccccggccccgccgcccgcctccgctcccggatgccgggcccagacccgcgctcggggcgctcggcctttgtccggccaggtgcggccgcgctcacccgggctggggcgctcgggctcggggccctcgggggtgcccggagcctccgtccgctcggcagtctcgtccccgccgccgtcggcgtgagcctccacgggcaccacggtgaagttggtgggcatggccgcctgcagccgacagtccccgtcccggcccggcccgcgctgcgccgctcccgccgacgccacgggacttggaggcaggggcggggtccgaccgagccgccccgccccgcccgggccacgtgacttcacctgcttgccccgcggccccacgaaaagttggcccgcggcgacttcctgcagggaccccaacccaggctgcgtctgtctgaccgccgcgacccgggacgcggggctttcgctgcctgcgctcccgaccatcgcagagcccgcgaatccccgctcagtctcctgcaccccctcctgctccagcc

SEQ ID NO: 43712 - DNA, 740 bp, Homo sapiens
gcccggcctcagttaccgccactttttcccagagcccttttggggtgagttttctggacttgctcatcagggccagcactcgttaaaggtgaggaccccgtgatcccaccccgcacagcagtacccagacacccgctagggccccagctcccaggggacgccgcaggcacgcacacatccctgcccgggtgacgccgaggttacacaagccctttggaaagctctggtgctgccttggctgcaccatgaccccctccagctgtgtgcggccggctcgccgcccatggtgctgtggtcctggttgggcggtgaggttcagccctgaccgtcgggcagcgaccgtttcaggaagcacgggaacaacggactttgagccaccttcctctccccagcaccctttcagccaccccgtgccaggctccccacccacacagccccatcccaggcacgcggtggctctggagggctgcatgtcagggtgcagaccagaacacgcccgattccttccaggcaatggacaaatggggtccaccggcgctgtcctgtgatgggcaggctggggggcggtgcccagctttgggccctgtagcctcaggcctcccctcaggccacctgccccctgtggctgcttctgcctccccgcaaaaatccagtctgagctggctgaaggcgcacaggtgtcaccatggcccaggcagctgggacccccccataggtcaacagcctgtcattggggtcac

SEQ ID NO: 43713 - DNA, 1187 bp, Homo sapiens
tttcagctttccctgatggccaagcataccccgctgcccctgcaaggcttgggagcactcctgggatcccctgcaaggcttgggagcacccctgggatcccaagtctgatggcctctagaagtccctctcctcaaacctcggtcacagctgctgcctagggcctgccaggccagggggacagccacgtctctcctagacacacgaggacacccctccaagaggcctccctcagccagccgccactgctgccggcccctctgtgcatccccaagggctgagctgttgcagggtacaacgcctcctggctccaagtgaaagtcggaggtgggcaggacgttcaggtaacacccccacctccgaagtccagtctcacagagccttagcagccacccaaggcaaggaggtggccatgggccaccaggagtgtcccgagcatcccaggcccacaagggccagagaaagttccgggcttcccctagcgtaagggacagaaccaggcgccctcccctcctggccccctcagctttcctgtgacgcccaggaccaggaccaggaccagggaaaccacagcgtcccaggcgacagggtggagggcggctccaggagcccagctggggcatcggccaacccccgagagacacacttgctcaggcatccctggcaaggtttccaaagccctcacgcggatgaacacgggaacacctggggcacccactgtttcacggaaaaagtcacaggggtcaccctgatgggatgtaatttctggatatgattaaacaggaagaaaagatcccggctgagattaccgttcagaagcaccttggagccgggctctcgacactgctgacccgaaacctggtgattcaagaggaaaagaacgccctgctgccgtcagagctggaaactgcacagcccattgtgtcctgggcgtgaagccatcacctgactcccaggtgaggagccagagggtcaggggtcagagctcaagggacgccctggccagctggggcagtcaaagctacctctgcttcttcccctgaaagaggaagtttagatacccaagaagttttgatatctcctccacgactttacttctggatgtggttcagaaaaatctgcggaaaatcacccagaattgcacccgtttggtttacaggagtattagctgtgggggccccttttccac

SEQ ID NO: 43714 - DNA, 815 bp, Homo sapiens
tgcatgcagggagcagggccccatgggaacccaggcagatccccctcctgagaaaggtggccctgccccagccagcacatcccaggcgatgaggcatgtgatccccatggcccctcgggtgaatcctgaccgccaatctgcacacacagccacacctgcgtctccatctccctcggttctgttcccccccaccgggtctggaagacactggtaagcaggggaggaggaaacaggtgcagctccagcgaggcggtgctccctgctggtgagtgggtgccccctgctggtgagggggggtgctccctgctggcttcccctccccacagctgtccctggagggaggcgtcattctgtaaacagggagatggggttcaggacggtgccagcatgcccagcaatcccggagttccccgtgctcaggaactcgcaccgctggctccacgctctctactccagtgggacaagaaagctctgctcaccaggcaacgagaggcgcaagggcggagcccagggccccggggagggctcaggtggctggcggagggggtgcagggaagggagattcacccaggagggccattgacaagcactggctggggagggatgtggtcactgcaccggcatgacagctcggagtagcttctaggtgaccacgccatgggagaatgttctgaggggaaccccttgggaggctcagcatgaggcagagccgttgggggctgcagccaaggtgggcaagctgggcctgggccagttcagagcagccaggctgagggggagggtggacacgggacgtttataccaatacgctcggg

SEQ ID NO: 43715 - DNA, 473 bp, Homo sapiens
cacgaagcacccgtccctagaaggtggccccaggttcgtggtcccatcttcaaccccagggtttactgtctctatattctctgccgtgaagtctaagggcagctcaaatttcataaacggagaaacagtcctatttgtcgattctcaactgcctttatctccagagatcccgtgagagcagggatttgtggaatgactcactgtgtagcggcgtcttctggcggtggacgaggccgggcgcacgattttccccgtgggtgagagtgccctctgctggtccatccagacaccgctgtcaacaaagtttcctgaggaatggtcacctggctcagctgggggaaccggactccccattctatcccattccgtgccccacccagagtcttaagctagaccaaagctgatttttctcccacactaagaatatgcccggggctggtatagggcaccaggtgtcgggaatgcaggctctg

SEQ ID NO: 43716 - DNA, 855 bp, Homo sapiens
gaccttctggaaaagaggtagcccttgtcttttcagtgcttcagaggccgtgctagttctttgccaacacacgggcaggaagagttgagtggcgtccaagggccggaaaagccgagcccctccccagtcctggccttgaaggctgctctgttcctgagctgggcacagaagctgcagtgactcagggtccaccgtggggtcgggcctcaccctgggcccaggtgagccagaagggacagcgctttgagggctgacctcacgcaggtccccgggccagggagaggccgcacctgcgcctgggtggtggaggggaagggaggaggggctgctcccactctgagcaggctctggaggaggatcaggacaggccctaaggcgctgtttctcccccaccccatggccttgggagagggtctgccccactccctcttctctcccatgacctctgaccctcagcccctccttcctttgggccatgctggctagtaggctcctcccatgtccacagcggtggctccgcgctgccccttggacttccccgaagtgaccctgacccctggaccttggccacccctcccaggccacaccccgacctggtccctccaagtgtccaccaaaccctggaagggaaacactgcacgcctgtgccctgggggccggggtctgcccagaatgccttctcttccttgctcctttcactaaatgttcttttcttttctttttatttatttatttatttatttttgagacagagtctcgctgtgtcgccaggctggagtgcagtggcgcaatctcagctcactgcaacctccgcctcctgggtccaagtgattctcctgcctcagcctccctaag

SEQ ID NO: 43717 - DNA, 1074 bp, Homo sapiens
gtttcccacccaggagcccccaccctgcgtgtcctctgacagctgtggggacctcacttcaaacgggcttcaagggaggccccagcactgtgtcttacctcaggctgaggtcttacctcagcctcaggtcttacctcagcctccctcccggcccgtccatctcaggtcccctcagcgcccccggcagatgtgcctgagaaccttgctgaaggggtgccagggtcggggactccgggactcacagccagaagaactctccctgcaccccgctgccccgaggaagggcgtccaagccctgcctctcccaaggcccacctctcaggggcagcggatcggaatggggcacccacccggggaggccctgtgctcccgattagattatcaacaccacacagttcacctttgctcggctgcgctgctgttggttgaggaaaagcaaagaggagttacattttaacatttgtgatagcgcagctagcagctcgcagctcctgcagacagctgctggggggagggtgcccagggagtccacgctggctccaataaacccggctcccagagacgtgtgtcctgtcgccaggcctgctcgccccagagaggctgtggggcacagtgagaaacgtctccggcgtgattgctattggtgaactgtgagtttcgttcacctgctaaaaatgttcccccaaacaatgtttccttggaagcacttccatttcaaaatacagctgcaaagtgccttgcttggcccgtgaaggtcaatgagcccgcagaaggggcagagacaaaagggtttttaataacgctccttgctgtcagcagcagcacaggctctgtagacaagtcaggctttgttcccggcagtccgctgtcattacatggggcagctccataaagataccaaggccagctctgaggccagggtgcagactccagatgcacagatgctgggccggggatgcccctcacctggacaggaggacaaaatccccaggagccctggacgggggtggggcaggaatggggtaaaccacatgcagcatccagcacccggcacccggcacccagaacccagca

SEQ ID NO: 43718 - DNA, 698 bp, Homo sapiens
aggggtgtcccttcacttttcccagctgtgcaccatagagcagaagggttccatggatgggaccagggcttccgtgcaggactctggcccccaggcctccaggccacaagcttcaagctggctgcttccaggcccagggcttctggccgggcagcctccctggatgtcgtccactcagggcagccagggccccatctgacacactctgtggagaggaggtcacagcccctctctgtgcttccgctgccacccgctgatctcagctgttatcttgacacagaggaaagtcaaactgcagcctgtcccagcttatctctgggttatttccgcaaagatccacgtttgggtaagcactggctctcctgataacctagcagtaaacacagccaggaatgtgatgcccataggagaggcacagtgccagtgcaaggccagcgtcccctggctggcaggtgcccagagcgccacacgcacaggtgtcctgggaattcccacccagggaccagagcatctggggcacggcccctcctgggaatgcagtggccccagcatggagcacccatgagtgccgtgggtgccagggacaggaccatggggactggccccctctctccccttctgtcctttctcttctcctcttccctccttctctgtctctatctctctctgcctctctgtctctgtttctctctgcctct

SEQ ID NO: 43719 - DNA, 1146 bp, Homo sapiens
aagtcgcccaggtggagcctctgttggtcagtgaagcttcagggttcccatgagatggatctgcatgaggctcagtcctctcttgaaacactgcccatttgcaggagcgccggcccacagggcagaagtcagactgtcagagcaagtgccggtcctgaagctggaaggactttcaaggctcattccccaaactcatttttttttaaacctctgctcatcttaaagaaaggagaggcaggcgccccagaaacctctcaggagtaactgacacacgtgacttgcggtgtcttcaaaggaacactctgcaacttgctactgtttaaacagagcaagactaacagtcaccagcagctggttcacgcattaaggccctttgcaggtgaaagaaaacggcactggagggccgactgcagaagcagacgcagtgcacggtggacatctgccccttttgggggcctgccacggtgcttcctgaaaactcaggttaagctgactctgctgtcaggctgatgaggcgcctgcacccacctttgctcagcacgccagcccaaatggaagagcaggtgctatgacaaaaatcagttcttgtagcaactatttttgatactgaaactgaaaagcgagagcagcaaagctatccacggagctcctgacagttaggcccggctttggctgctgatgcaggggccgaatgacgctatttctgcagcagccggccgcaggcgctgacccaccgcgggatgtgccccaggaggcagaagaaacgctgggaaccgcacctaaccttgccagcatcccccaggcaaagccaggcactttgagttcatcggtggagttgggcgatactcctttcccgtttgtgtgcttagctgctgccaacaggatgtgctgggtgaagccttacagaacacagccagttgtgttttataaagcaaggctcccctcccccaaagacaaataaaaccacaggtgtggaagggacaccctccaccgcaccccgccctagtaatctgacaccgcaggcaaaggcacggcctgtgtgggtaagatccattgtaaacgtttaaaacttcctgttccctgatgcctcaacttccccgcagaccgacgcacctgtgatgggcagggccgtgtgacctcgtgacc

SEQ ID NO: 43720 - DNA, 613 bp, Homo sapiens
caacaaaaaaggggaaagggcccgcctcagaggtcagaggtgccgagagccttaagtggaagtggccggctcctagtgggtgatccggagtgacagtgatggcttgcagggaggcagggcagggcagcgatcctgcagggccccagctgagcgttcacctctgaaccccaaataacctcatccgtgaaacaacgccacagctcccagcaccacaattacggaaagattcacaaagtgcttagcacagtgcctcatgtgcagtaagagacattaaatattaactgcttctgtgagtctcaatactggccaaaggttggccacatttcatctcctctcaaagcaactatgggagagcaggcgctgtcactgcccgtaatcacagggcgccagagcccagagagcagccacttctattcgcaaaggccttccgccttgccaggggccaccccgggggctccagctccgaggaagggctgtcacccgctcctctggccgcctgtgcaggaccagccctggtggggaaagcaggagtttgctcaggatactgtgaattaatctacatggcacaccaggagctcacacgcagacgctgtttcacacggtgctcatgtgc

SEQ ID NO: 43721 - DNA, 1983 bp, Homo sapiens
gcctccccgtccaggacatcccactgccatcacactctgctgagaactacttcttaaacgacattcatcacctgtcaccttccaggctgaatgtttacaggccacgcataggcctccagttaggatattctaccacttcaagacattcggtaagactagttctctaaaataaacatgttatgtacagaaagctaacttttaaacaatctgaacatgagtaatgttttccctttcactggcattttgtcctacgcccatacctttcaaatttggactccacatcaaagtcttccacattcaagaccaggtcgatgttgttctcagcacccaggtgggacctcgtcgtggtgtacacgctcagctggaaaggagggggcgtcgagagtcagctcggccaggccctggcaggacgcactcaaatcccacggccagctggagggcggaagacctggccgctggggaaccaggaaaggttccatctcgactcgcgcggccacagctccgaactgggacgggaaggcgacgtctggggcctggaggagaggcccccaccccaacccgcccggcccccggccccgcggacgctcacctgcagcttgggccgccgcgccaggtagggctggatgcagttggcgtcgccggagcacgggcgggtgtagacgatgccgtacatgacccagcaggtgtgcaccacgtagaccacgaacacgcccaccaccaagctggtgaaggagctgcggccgctccacatggcggccccgcgcccggcgcccccggcccgcccgcctctcagccgcgagccccgcccgcccggcgcccagcccgccgctccgggctccgccgctcactggagagccgccgcgcgccaccgccaccgccgcgggggaacgaatgcgccgcgcgccgcagaccgccggccgccccgcatgctccggccccgctcccacctggcgccgcgggattcgccggccccgcgcgccgcttccgggccccgccgcctgccggaagtggacgcgccgcgcggctccctgggaaacggagtctcggccgctgccgcgcacgcgcatccaggatgcggcgcgtgtgtgacgttacccgcccgcgccgccctcctggggtgcctctcagggacccaggcgctcagctgctggggccgcggagggcgttcgcggggcgccggggaaggctagggccgcggggtccccggggcgccgtccccaaccgccgacgcctgccagaccaccaagtgggggccatgtcgacgtgtgaggagcctggtggaaggtgatactggaattccggcactgggcctgcaacccttttagtccacagttgtcagaatctaaagggaagaaaaacgaagtgctcagaaccctcacagaagccgggcacctcatcccgtgtgtgggttttttccccagtacaaacccattgtggggacaggcgcttttgaagaaaaaattcagattcccgggctgaagtggctcctcacagccttgaacctgacccccagcttcccgctaaagccgagcgtgcccagcacggcgaggtcagcagaggcccctcggagggcggccgggggaggtcagtgggaggccctcgggcagccggtggatgggccggcgacctccccgactccatcagaagcgctcagtctgtgcccttcagttactggagcagctcccgtcctttggccagttctctggaaggtcgtttccgtttctgtgtctgccacacgtgcagcacaatcgaaaaaccttgttcgacatttctagaaagagtagatgctactgaagacccaatagattgctgagggttttcagagcagggacaattgcatcagggtgctgggctccgggaagaactcagaggacttggctgacgggcggatgggacagtgattggtgccgagaatgggccagagaagcaggtctgcctggagcaggcacccgaggccgcgtgcaggggcggtcctgggccacc

SEQ ID NO: 43722 - DNA, 1091 bp, Homo sapiens
ctcttctagtggcatgagggacacgctttattcatgtgagcgttgtgaggtgggaagggaggccagccaggggaagggtagaagaatgcctgttgcttgggtcggaggctcgatggactttcactgctggacatagtgtgaacatgggagacgcaggttcagcgatcacgtttcactttcccattccccggacctcaaactcaggcctgtgtaactaaaggttctgtgctgccaggctgggcgtttcccccagggaaggcacgagagagcgaatgcagggccggccgcggggcctggggactgtgccgctcagcaccacccacagggcgttccttggggcgtggcctgggccggggcggtaggatcccttggacagggccgtgtctggctcacaggaagctgccctcatggaacggggtgcagtggggtgttcgtggtcctgctgccgttggctgggcgcagccatccctgccggctcccccgcgcctgtgccccgggccctactgcacctgcacgggcggggctctggggccggcgcggggagtgaggccgccggtctcctctgctgtggtcggtgtgggggccggcggggcgcagagctgctcacccggctgactcccccttctgccctgctggcctctgagccggttctctggggcctctgtgagcgccttgtgccccccacacccgccgtgagtaccgtgtctctctgctcagccaggtgggcgcctctgctgctgctgttgccaccgagtgactgactgacgcagcgacgcagccaccgacacccaaacactggagcgttttacccaaatgtaaaagtctaaacttccggcttctcgaacaaaagaaaacaaaggaaaacgtcagacgccccgttgacgccgggcgcgcgtggccgcggccgagccgctcttcaaagccggcagcgtctggtctggcctggctccgccagctgcccgcaggtcctgtcctcgtggctttctgccctgtcctccctggccggctgcactggcttctgtgacgctcgctccttgctgcgcaagtgcaggtgcagcaccttaaaggctgagtgcgtcccacacagcggg

SEQ ID NO: 43723 - DNA, 2959 bp, Homo sapiens
caggggatcctgctacaagaaagagtccccagcctgccggcccttcctactccgaactggccgcagatacagggagccccccagcacatcctgcatcaggggatcctgctacaagagtccccagcctgcccggcccttcctactccgaactggctgcagatacagggagccccccagcacatcctggcccaaaccctcaaaagctgcaggagcccacagcctgccctgtacaccctgcgccacactacccgcaaatacaaggtcccccacctcccccgccagcccagaacatcctggcccaagtcccacccccagcctgccctgtacaccctgccccacactacccgcagatacaggggccccccagaacatcttggcccaaccccctggcctgccctgtataccctgccctgcactatctacagatactgggaccctcccccacctcccactgccgcccacacacaacatcctggcctaagtcccacccacttagctgcaggagcccctggcctgccctgtacaccctgctccacactacgggcaaatacagggggccccccggaacatcctggctcacccccactcccccgagctgcaggagtgcctctgtccccacaattctgggtctgcgccaccatctccagggagcccaccaagcacatcctggccctgtccctggctatgggagaccctccacccaggacatcctgcttcccccagctgcagggagcccctggaccaccagtaacgtctgtgaggcaaggctgacccctgctcagccagtgggtagaatgggagtgggcaggggctgtgggccctggcaagtatgtccactcctctgagtgcagggaggtacagaggtgaccagcctgacgtgcagctgtggacacagagggagggctgctgggggctggaggccactgcccagtggcagttgtgggggaggcagaaatgacctgatcgctctaaggtgagggagaggagagcccactctttacagagacttccccaatggcacaggcgccacgtggtcctggggccactgactgggcagacagcctggcacagggacaggacaggtctagcctgggatgtgctgagcttgatggatgcatgggacccaggaggatgtcacaatgatgattcacatggcacacaggtgaccatgactcttccctgatggagacaatgactcactgctgcagaaaggtggatctaacccctccagggtagcctaggagaacaaacagactccactctaaggagcccaggcattccatgctgatccacgcctgcccagcccggcggcatccccactgtctgtgcatggacaccagccctccctggctccagggcccttgccctccagtaccttggcccagctttggttctaccccaagggttttaaaacatttagaactgggagagaaactgttttctttctttccttttttttttttaagcttgtatgtggcaaatatctttaagaggaaataactcactcctctggctctaagagggaagtgtgaaattcaagagtaaaatcaaggtttggaaaaggctgctgtccccaggtaccagcccccaccccagcagtgtctccccacacaggggacgagggcacaggggatgaggttagagggccaccagtcacagcagaggaaagaccacactgagggaagctgggagctgactgtgctggaagttcaagaacagcacctcacctttaacacacctaagctcatgctgctggcacatggctgagaagccagggatgcattggttttaatacagcaaaaagtatcccccagggttgcaaaatgacgtgggtttcacagggacaaacagtgatcacattagaaaataatgttatttccaaacacaagcctagcatcatgcttttttcctgggctcattttcagaatgattcacagctagattaaaggtttacactggaaatgctggaaacagtaaccgggaatggtaagcatgccccagcacccacaggaggcccacaggacttggaggggacggtcgcggctcctggccatcctgagaaccatagcacttttgtcatgggccgcgtggggatgagggccctggaaacaggaagaggaaggtcaggagggctcctcctgcagtctctgtgtcagaggcagggacatggcttagcaagacaggtgacctcgtggaagcctagcttggacactcccaaccagtcatgtccaagcagtacagcacagggcgccttctcagacaagagcggtgagacggagtgggacagggagccacgttctccgctgcctgggccctcccagcactcaagggcgctctgcccctgcaggcacaggaggcaccgggcatgggccagacacccagcaagtgtggtagtcgagtcccgtgcccggctcctgaagcagggctcctgagtggccactttttcaggcacaaaatcctaacatgtttatacgagaaatagataattcaactgcaaaaaaaaaagccaatgttaggaagaaacgatttaaataaaatggaagcaagtagtgaccatagcttgacattttctaaagactacagttcgtctaggaacagaggcgacgtgtcaaattcaagagtaaaatcaaggtttggaaaaggccgctgttcccagacaggagcccccacccctggcagtgcctccccacacgggggacgaggggacaaggggacgaggtcggagggctcaggagagccgcatccggaatgcattctgaacgcagctgtgggccgcctgcctcctcttactaaagaaagtggacatcagagaggaagcatttgcaaagtctgatgacggctcacatggactaatgcagaagtgaacccgcagggctgacggacgcctcagggttctcgccccactctgagcacggccctgcggcctctctcgagcccacccactcctgaccctgggtcc

SEQ ID NO: 43724 - DNA, 2871 bp, Homo sapiens
gcagccatagctggggcaggagcagggctggggaagccctggaaaccacagcaggggttcgaatttcatccgggggcgtccccgctgagggcttccgagcagcagagtgcaggaggaagaaagcctgctgggagtgactcagggagagtgaccagggagagagcctggtggctgggtgggggtgaggattgaagaggaggaatggttgaggggcacagaatgagcgaccgtgtcccaagtcctcctttgaggggcacagcacacggcagctgacagcgtgtggcagacagagggccaggcagagcggcggcagaggggccggcaccgccccagccccagagtccagctcccgacacacagggagacgggggccagggcctgggagccaggctggggacgacctcaccctgtgtgtcaccaggaggggcggcaccatcgggctctcctgctccccgtccccttccataccctgaggaccagccgcatcaaggggctttgagcaaaagcaggcgtcctgggaaaatgacaagctcaaactggcctcaagaacttttcacttcagggttctttcagataaagtactttatgcattaacaaatctccatcttcccggaaatctattctcacaattggaagcgtgctccctacaaaccggacagccccataggccccgaaacagtgcttgcttctaggaattattctagagtcaaaagtaaggtcctcttgagagtggatctcaggtaactgtaagcccagctggcagccaggtagccggaaaagccaggctgagccagcacatccccggtgcagcttcctgcagcgagcggccccctccccacgacgcccccgggtctcccctcaccactgtcccatcgcaggatctcagcaaaccgttccctcccacgtggcagcccaggttgcataaagttgattcgggtcagaccagccccgagaaagcatcccttacaacaggagcgaagcatgcaccccagaaggcaacgtgcggccgcagagcagggagacccgtgcgcctacaggggaccctacaggggacccgcaccgcccgcgcgccctgtcccgggcaccaccaggccccgcacacgaggctcacccagagccgcggtgccctcccgcccgcgggccgcgtccaggcaaagccgctccggagtccccgggctgcgcgcagggcctgccaaggcgggcggggcccggaccagggacgagcgcggggaccggcgatgcgggtccagcctcccgcgggagccgaggtcggggctctgggaggcagagaaagggttgtgggcccggttcagggtgcaggggtctggggggaggagcagaacgcggggcggggatgggaagcggggaccccgaggaaggcgctgagggaccaggatgcgcgtgcgggcggcgggaagccggcgccgagaccgaggcatcgggtgcgggcggcggggacgcgaactgaggggcggccgcggggagggaaggcgccgcggctcgcagggccgcgccgcgccccaggccccctccccggcccctcctcggccgcgcctccctggccccagcatccctggcgtccgcgccggctcccggggccgcgcgccctgggcacccacctgggccttctgcagggcgctgaggcgcagctcgtgcacgaaggggttccgccccgggggcgccagcagccgagcgtcgctggcccctgcgctggaggcaggggcggcccggggtccgcatccccgcagcctcatggccgcgccgtcccgcggcgagcgcagccgagctgcctggggcgccgagcggggccggggctagctgggcgcgggtctcggggcgcgggccgaggatgcgcggcggctggagcgggccgggcgcgcaggcgcgggaggtgacgtgggcggagcgggagcgccggccggggcggggcgtccctggaagcctcgcctcccgccggccggcaggggcggcaccagccggagttccgctacctggtggtttctctggggtctgtggggggccggggccgctggggaccgggggcgcctcctgcagccactggagcacagggatccccggcagggtctgcgccaggagaaagggaggtcccccgggcccgcgaggctgccacgtcgtccccttccgccgctcggcccgcctgctcgcggggagggaggaaggggcgggcacgcgtccagcttacgcgcaaggcgggccaggccctgggtgccgagccccgggctgttccggcgaaggccccacgccattcttcttattcgttgggctcctagctcgcaccggcgaccctggaagctgccccgggctgagggagcttcttccagccgcgcctcagcccaggcgactcccgcctgaggtccactcgaccttaggaccccccagacctcgggatcccctcagatctcaggacccctcaagcctcaggaccccctcagacctcaggacccctccgatctcaggacctctcaggcctcaggccccgcagggatggcccaggcaggaggcgcacataggggccctgactgtccgtgctggttgtgcaggggctgcgatgagatcccagcgctttctcacccgtagctgctttggctcgggcattgcccttgtggtgctcaggagccgtgtgaggagccccagggtggggcccataattagccggagcgagagtaggatgggctcctgcctccgggtgaacacgcttggatttcagaactcacgcaggccttcggtcacagtgctcacggcttcctcaccccggctggccctgttggttccttcatggccaacggacctcacccagacagagccggtttgggccacctggccaaccccccagggtcctggctcctgggg

SEQ ID NO: 43725 - DNA, 1788 bp, Homo sapiens
ttgctgccctgtcttctggcatctaaaaatgctggtgagaaatcagcagtgatttaagtcttcgtcttgtgtgtgtcatgtgtcatttttacctggctgtgctctctttttatcttgatctttggtctttggcagcttgatgttaatcttcctaattgtggttttcttagagtgtatcctgcttgtaggttttctgagatccttgaatctgaaaatgtacatctttcactacacttggggacttacctgctactatatcttcggattttttttctgctacttttttttctcatttcttcttctggagctcctattacagatatataagccttttgatattgtcccataggttcctgagattctgttcatttttttaaaaatttccctctttcttctttatattgagcaatttcaaatgatctgtcttccattttaattcatttgtcattgccgttctgctgttaagccaacccggtacatttgtattttcagatactgtatttttcaatgttagtttctcactgggttctttttagtagtttctttttctctgctaatatgtcccatctttttatttattgtgagtgtgttttctttgctctaagcatagctggaatggccgccttacagcccacatctgctgtctccgcactggcgcctcagggcttaggttggttggttgtcctgttctttgagattgggtcacgtttctctgttcttcatgtaggacgtaggagcctctggggtgcacgttctcgcagtgaatgctggtggtttccctttggtgctgtctggttgggtctgactcacatgtgaactctgtctcctgggtggcagcctctgttttggttcagttcagtccttggctaagctgctttgggtcactccacacctggtgatcctggtgttaaccagtgacgtgacatggatagagcttatgtacagaatttggggttcctcttcatgtctcttctctttttagggctcccccttacccttcagtggattttctgtcatagtgtttgccactctgtgctgttctaacctctggctcaaagctacaaaatgggacagttccctgtgtatatctcttcttacaaggtttacctcccatccccaatttgccagcttttgttcattctccaagataggtcatcaaaacattaaaaaaaaaaaaaattctcagggatcttgtctagtagcagcttacacagacacagccaaagtgcaaaactccaaacttatgtttttaaaaatgcctgttctctctccagatatcttaatgcacttcacaaatgtttaaaaaacggaatcaactgtaactctttcactttcacttttagttctcatctaagataaactaccatataaattgagttgaaaatccacactgatgaactatttaataggaaacaatatgggtacttgcctacaatttaggctttttctgatttccagaaaggctacaaatgaaaatgtttgctcagacgtttactttgtacctgaaataagaaggatgtggtccatctggtcactgtggccctgtttgtggtagggctggtgtcagtattctagcatcagcggtgacctgggtactttaacatgaattatcttcttgtttattaactccataaggaagtgttaatcccagttttcagaggaggacgttgaatctctgcaggttgcacaacacacccccaggtgtcggaggaggccaggaacagcactgaggttggaaaccaggtttatgcctcgaaatcctgtgcccgtcccaccacaggcactacc

SEQ ID NO: 43726 - DNA, 598 bp, Homo sapiens
gtactgcctgtaagcattttcttaacaaggcacgtcctgcacagccctagatccctgaaaccttgattccatacaacacaggtttctgtgagctcaaggctggggctaaagttacagattaacagcatctcagggcaaaacaatcgctcggggtacagatcaaaatggagtttcttacgtcctccttttctacacagacacagtaccagcctgatctctcttttccccacatttacaaacgccacagtgaagaactttgttgcaaacacatgcaggctgtgaaaagaactctgtgcctaaagtcctttcatttctttgctggagtttttttgaggcagattctagaattgctgagtcaaagggcaaatgccatgtagttttgttagacgctgccaaatcctcttccatgaggctgcaatattctgcattccacagtgacgtatgagagtccttgtatcccacagcttcataaacaaagcatgacggcacatctgcacgtttaccaatcacacaggtgagaaatcttatcctagtttcacctttgtttttggtttgcatttttgtgaccagcttttttatggtataatgcacagaaggt

SEQ ID NO: 43727 - DNA, 941 bp, Homo sapiens
gagctctggtgaccttgggcagacacgactcctccccaagtccacccgccaggcactgaggcgaggggctacctcagcccgggaggtctctggaccccaggcccggaccaaggcggcggaggggacgcccagcaagcccgcggggtcgtgaccttcaccggactacctgctaaggaccgagctccccggacccccgagtccgccccacggctcccccttgcactggcgcagggctctcccagccccttccagatcccgggacagggggcgcaaggacctggcgcccgctctgctcgggcccgctggggaccgtcccgctcctaccgccgcctcggcccccgcctgccccgccccggtccgcggcacggactcaccgccttggccagcgccaggcgcggagcgctcagcaggcgcgacaggacccagaccgccatgcctgtagtcgcctccgcgcagtcccgccagtccccgcgcagactacgcctgcgcaccacaccggggtcgagctttggggggcaggaaccgcggcgggtgggatgccgcgcctgcgcacggggtcaagcggggccatagtggaggcgcctcgcctgcacaaagcgcacctgcggacggtggcgctgtggggatagggaggtcccgcgctccctgaccgatgtagggcgggccctattccggggaggtgttgggcaccaacatttttaaagccccgtgggtggttccctgggatcgcccagaccgaaaggccccgaacgtccagatcgcagggaatggggtcggaggggcggcgctcgtccgcggaggcgggcgggagcggccacgggcctctggcctctagtgagcgggtgtgaccctcggtctccggcctgtgaggtgagggagcgatcctcagccgtgtccctagcctctggcttccggctaatttttaaattttttgtagaggc

SEQ ID NO: 43728 - DNA, 1308 bp, Homo sapiens
aacagcggcccagacagtctgtttccgctttccccaaacaagcaccctggagaccctccacctggcggctcttgaggcgagaaaaagggcctagcccaggagccggtggccgcgacctcgggtctgcagtggcgcactctgcatcttgggaagggccgacgcacaggacagggaccgggcaggaggcaggggcggccccaggagaccgggcagcggacgggggagaccgcgggggacccgccaggggacgggggcggccgcgtcggctggggcaggggtcgggggaggcggcggcggtcggggcaggggacgggggaggccgctggggacacggcaggtgacgggggaggccgcggggcaaccggcagggaacggggttggccgcgggggtcgggacaggggtccggggcggctgcgcgggaggcgggagatgccggggcggtgccagcccgcacctctggaagacgttccacaggaagctctggtcgggcagcgccgcgcccgcagcaggcccagggccgcccggggctggggcggtaggagtaggcagccaagggccaaggcccgccgctgggctgaagcgcctgcggcgactggcgacccctcagagcgacaccgcttccgcctctgctgggggcagggccgggcgttaccgccacttccgggggcgcaggaaatgcgcgttgtccgggatgcacaggccgcctgcgcgcgggccgggaaggcgcttggagacaatgtcccgtgctgcgacccgggacaggcagtgatggagcagggacttagtttgccttttagttcttgtatgaaaagaagttttgaggtgaatgtgattcacgctaacagtcggaaactctgggcggggcgcggtagctcacacttgtgatccctgcgctttgggaagcggaggcggccggagctcttgagcccagcagtgcggaccagcctgggcagcgtggaccagcctgggcagcgtggaccagcttgggcagcgtggctagaccccatccctacaaaaattacaaaaagtagtccggcgtggtgggctcctgtgggcccatctactccgtgggctgaggcgggaggatggcctgagcccgggaggtcgaggccgcagggagtcgagatcactgccctccagcccggtggatagcgagacaatgaaaaaaaaaaaaaaaaaaaaaaaaaaagcaggccgggtgcggtggctgacgcgtgtaatcccagcactttgggaggccgaggccggtggatcacctgaagtcgggagttcaagaccaacctggccaatatggagaaacccagtat

SEQ ID NO: 43729 - DNA, 3350 bp, Homo sapiens
atagagcagagggttcaccattttccttataaaaagatttgccatgttgtggtgaatctatgggagagagaaaaaaaggagttatagcttctcctgcacttccacctgctctttaaggcttccttttctctgtttcactgaggcttgggaaggcagggacctcggggactgagggtgttcccataccagctgcagcctcgacctgagcttgaacactgccttaatcagccaagtgtgccaggagaataaggggcagtggacggtggcttccttccctttcccgcctgctgcaagtgtaggtgagtgtgcaaagccctgcgatgttgaggagccgctcacttggctgggagggagcttaaacttaggccgcatccctttccaaacagacaccaggtcaaggacggttcaactgatgagctcctccctccaactcttcccagacccaggggccctccctcgggccagtttcgggacaggcccccgctccggaagagcacggaactctggcaccccggtcgcccgcccctgcttccccacgcgccccggcccttagggttcagcggccccggctgggaagagctgggcctgcagggcccggaggacactgcggcaccggagccggccctgcgcgcgggctgtgaggtcgcgttcgggagccgccagttctcccgccccggggtcgctggacaccccctcctgtcgccaggtcgggcgcccacggtcggacccgcaccccccaaccctggccctctgagaccgccaggccccggcccacgctcctctgaccgcagcccactcggggagacacgcccgagggtcccaaggtggccggccccaccctctcgcagcccccactctcaagacacccgggacccctgacctgagaagacggctcccttacccggccgcacgctctcacccggcgccgacccctgcgtctgcgcactggcacgcggacgctgctgccaggaaggaagatggcggcgggggggggggtcacgtggcgtgcccacgtccagtgcggggcgcagagacgcagcagcgagtgcgcaggcgctggagtgcgacgtatcactccccgactgcgcgcactctgcgggccaccgggatcgtcgtgctgtttggagcgctctcgggaaaaaaaatgcaaaaaccaggaacgaaaatggatatccgcaacgaaaaagaaattacaaccacttaggccttagaaaaaactggcaaataccaatgtcaaaacaaactgagaaagaggacatgtttttaagtggacaggagaaatgtaaacaggctccgggaaacgagtggagacgggcagtagtttcaactggttacggctgttttccccaacattatgaaaaacttcggacatagagaaaaagggaaagaactgtacggtgaacacccatatacttgccacctagattctacccttagctcgcttatccctgccttttcaggtatctacccgtaactccattcgccttcctttttgtgtgtgtccgggtgagttgcagacgtggctgcgtccactccgcgctccctgcaggccccaacgcttcatcgcagcgcccactttttccacctgacccggcgaacaccgggcgggccgctggagtttatcagctccaggacaaatctgcctctgaccaccacgtttgctgggacatctttgggaccggaggttttcatgtgcattcttgtttctcatgcctttcctcctctttatcatcttccccgccactcatccatctctagtgttttgttcttggagtcacgtggtcctcaggctctgaccacagcaaaagaaaagctggatgctggagcttaagctgggatttatacccaagtcaactctaagcaaaacgggcctttttagaggctgtatttgcatgctgtaaaatcagtcggtgtactaggctttgttgcagaaatccccaatatacgtttcctctgcggctccccgtaaccacacacaggaacgcttgccttgaacgaggagaatgcacttccagtctcgtctgctaagcagttgactccttcacccaataattttgatatttaaatgtctcatgattatcggttaccataagaatataaacaatgtattttcagtttacatcctcccctgcctgtccgctaaataagaaccactgggtactcctaatcgctgaaggtttcgcacaccattgcctgcctcatcagggccctagctctagcctgcggctgcaactgcatgaggctgcacctgccggcgcaacggggccgcttaacttttaggccattgatgaaaagtcaaacaagcgcacagtactcggtgtaatcaggggcatttttagcgagatacctgggatgaaaacgggtgaccacctgaatcagagagcagctccggcgcaccctctgccccgacccgcgctccccgcccccagggcgaaataaataccgggtgtttggcgccgccagaagccgtgcgcatgcgttagcgctaagcgggacgttgcgccgggtcaaaggccagcggcgcaaaatggcggcggcgatgaccttctgccggctgctgaaccggtgtggcgaggcggcgcggagcctgcccctgggcgccaggtgtttcggggtgcgggtctcgccgaccggggagaaggtcacgcacactggccaggtaacggccgctgggtacaggatgcaccttcctccagccgcacctcgggcgactggtggcagtgggctcgccgggcatccgcggccctggttctgcgccggcagcgcaggtcgtggtaaggttgtgctgtcgctcacgcgccggggaggacgcccgcgagtcgggacggtggtggcagcctgtagcggtgggtctcgtccttccagggcctgcgggctctggaacgggaagtctccccagcgggcagcacttgctgtggactggctgcccataggcgatttgtggcagccgattatttgggtcagaacgtttagaatttgtgtaatattcaataataaattttagtaacctgagaagtcggttgtagtccaaggcacaaaaaagccctaagccaaaatgaagaacaaaggtacctgtgtatactggaatgtgccctagtagatttaatggggggatagtaaagctctcaggccatatgccaaagaaggttgggggcggttctcctcggtcaggatttgtctctcctccttagctccaccttcccgggctatgtctctgtgctgctctctgatccaggtgaccacccgttttcatcccaggtatctcgctaaaaatgcccctgattacaccgagtactgtgcacttgtttgacttttcatcaatggcctaaaagttaagaaaaacactttcc

SEQ ID NO: 43730 - DNA, 764 bp, Homo sapiens
atcaaagctgagaagaacatgtctcaatcataccacattctgaaaagagatgcagaactgtgcatacagtacatgtggtggcccaaacctggttctgagactattcactcacgtccagagtataatagagaatgttaatgatttacagtgagaaaaagattgaggatttatcaggcaaagttattggaatgctctacattcctttctcacatcaaaacaaacaagtgtcttggagagaaaaaatcagagagcaaaggtgatctgctggaatgaagactcacatctatctccctaccctcacccctgctgggggctttctgagctgcagaagctccctgcgaagccctaggggagttctctggggagagcattcactgtgcacctcccagagcgtgtaggagaccaacattgacactagactctcatctgggcaggtaggagcagcccctgctggccagttgaggggagttcttgtgccagtggttggggcatgacactgacctgtcccatggcccaagaagatccttccagaaatagataggattgcataatgtggaaggccctgccaagaaccctgcctgccaggggatgcaattctatcagaaaggaactttggggtatcctggaacagaaggcacagggtgccacaatcaagcgtaggagcagagctcagactttgccagggaaccacaggctgagtggacagcaggtctgtgaggtttctacaggtaccatgagagaaagagagacagagccagcatgcc

SEQ ID NO: 43731 - DNA, 1180 bp, Homo sapiens
gaatatgaactacaaaaattttgcacacaatcattgtaattttttccactaaagacaagtgttgatgcacaatacaatgctaccttctttgaaacctgactagtttcagctgtgtgtgagatgaggaaggaacaaaattacagactaaacagaatctttgtagggcacaaacacatccaattcttctctgtttcggttgtatggatggtggttttacatacaaggtaatgtgcccacttgcactgctttagtttaaagtttatgcaatttagaaaagggttatgacaaagtttggtccttttaatctaaaatgccatttgtttccacatgagaaagggccctggctcctttcattgtgaaagggcactgggcatgggagagcatgcagccgttagaagaaactctctctcagatcctttgctaagcactttgtttttatttttaatttaatttttattctctattgaaacgtctacttgatattcaaaatgacctaagtaatcagaacctctgtctgaaaggaaacaagtgctaactgtgaatggtctaaataatttacagcaacatttttctgtgaagggccagatggtaaatagtttaggctttgcagggcacacagtctctgttgcagtgacttaactctgccattgtgaaagcattcacagacgatctgcaaacaaataaaactttatttacaaaatgagtcagctggccagatttgatcttaggcagtagagagttttctgaccctggatgtaaacaaatgatgacaaaactgctttcctaaactttgacctcaaagttaagagtgctaagttcttgaagggctgcaaagtgaagtagtttgaggctggcggtttgttttgactcttccaatatttgttctcagggttactttgctgggacacctttaaactgaagggactccatatacatatttagatttccattttacctttaaaaattaggcaggtctggtccccaatactgtatggcaccaacccatgcgctggccactcagtgccaggagtcccttttaaggcagacacgtgtgctccagtttgcccctccctctccatccctccctgagacggacaggcagctgcgagttactgccaccatgttagatggccagtcttaaactcggtccactcgtgtgttttgcatctcagctcccact

SEQ ID NO: 43732 - DNA, 407 bp, Homo sapiens
actgaaatcagtctctgattttcagggttcacatgtttcatatgcaaaataagttcatacatttaataggtgttttgttattggagaaaactaactcaatgccactcttctgcctcattaagatagttcccatttttggctaaagttagagtcagttcccacccccccacccccaactgcaaacaaaacctgaccctttatgcctgaggaagacattattgagtcatacctcccagatagtcacatctgaggtcagttctctcctatactctcattacattttgtcctggggggtttcctgtttgctaaggtggcggggggtgagtggcgggagcactctatttgagagctgagaccaggattttcatcacagttctgcttcccacctctgtttgacactaggaggg

SEQ ID NO: 43733 - DNA, 2507 bp, Homo sapiens
gtactttggaaaaacacacatttaagtaactgtacataaaagggaagtaatggtgaagataaatttgtctgggatcagacgctagcaccgggacgatcatgatccctacaggtctttctctaatacctgctgcccctttccctaatgggtcacatggtctgtcttccactgtatagctgcgtcccgctatggatctgctcacttcccttttcttttttaactttacccttgttttctgcccacctgtctctgagaaaagctgagacttctatcaccggcaggtcctcagttaggtacacgcctgtcttgcttgggtgtcaacgacaggaaacttagctatcgctggatgtctgcttccgccactccacagcaggtggtatccagagtgtgtaagcaaggtcaggggtgcgaaatttggagaagaaaactcagagaaaaatgcagactgctttttttggaaggggtgttttcagttgcaatttccatactgaggagctagaaattggctggtaaggtctagacattaacttaactaaacgtgcattcctcctcttgaatttggactttataaggaatttggattgtataaccacacgatggaagctgcgagaggcttctgaacaaggtactgacggcgaccagctgtgatgactaaaaagacgattctggtggtggtggatacggtggctggagataagaaaaacctcggttcaaacgagatctgaatttacccactaactacgaccacgaggagtttattcctttatctttccgttttctctctctcccgagaagtgtcaaaaacaggatttggaggtggcaggataatggccaaaatgggtagacaaggtggcgaacgattcaaccaggctctgggcttggcgcatggtgggcggtggcgcccacacctgggcctgggaacccgccgctcgggcatcactggctgccgcggcgaccggcgaggacacatgaccgaggagcgaaaggtcagaagacaaggggactgttacaggagcaggggagccgccactggctgctaaggccgtgcaactggcgccgaagcgcacgatctccgcccgccccgcagcgcgtcgggaactgtagtccctccctctcctgctccctggcccaggacgggctccgggacagcgcctatccctctagctgtaaatcacgcactttcctgtcctggacgccgggtccttccacttctcaggcgtctggagcttacgtcacgggcgggtcaccgcccacatagcggaggcctttaggtgtctatggaaagcctgtcgtacagcaaggtggcaataaaggatcgacccttaacagtggtaggaatgcaccttcgatccttctactcctattggctgctcctctgtgggcgtctcccccgccgcatagcacagctcctctcccggtgttgctcaggcagcgccttaggcagccccgcgcccaggggaggggcggggcgagccagggcggggcggggcgagccagggcggggcggggccctgactggactgcgtcgcgctcgggggccgcgccgggtagcgtttctttttagtgcctgaggcagctctggctcggagagccttttgctagccccacggggacctctgtgcacggatggacccgcccggacctggcgggaagcggcctggcaggcggcggccccggcggcatcagcagagacaggacggggccgacgccgcgggcccctgaggcgtgcgtgcccaccgggcccggcggcggcaccatgatgccgggcgagacccattcggcggcgcccgggacggcggcggacctgtcgcgatgtcagggctgcgcctctctgcagcaggtgcagcacctcccggggccccgggcgcggggggggactcggctcggccggccgggagcgcagggatgtggggtccggccgcgcgggctgtgcctcagtgcgctgctctcccttcccaaccgtagctcttgctcgctcgtctctctgctctctttttcctacatgagttttggggacggctttctttgctttatttaagcttgaaacccagagttcattgactggaatgcgctggtgtaacggtgggggtggagtaagcgaggtttggagggccccccaccttccctacccggcctcggagctccctagggcagactccgtaggtcagtgagggacaggtgaaacgccgagggcagttatctccctgaggataacgctttggtcttctggcccatcctgagtatttgttgtttggaggcagaatcttacgtgacatgtgggttgtctgagtcttagactcgaagagtctagggaggcgtttcagcttatagcagatgtgccatcccgaggctaattttttaaaaagcaagccaagtaattggtcaagtagcttgtcagttgtttgataaaagtagtttatgaaaggcatgcagagactggaggtttctaacagcggcgtgggctcttctttagagtgacataagggagaattgctagagtatggctc

SEQ ID NO: 43734 - DNA, 519 bp, Homo sapiens
gggaggagaaacaagacccccaggacttgtcaatggcacacatgaaagacagaaaacaccagaagccagtcttcagcctgctggcccagccatggccactgtaacgtacggctaaacccctgccccgatcagctctcaaggctctgagccaactgcctagaccgtctatttgagatccctgagagtttcaacacagggcatggctgacctctccaccgtgtcatttccagtaatgcggcctcactgatagcagaagttcggagagctcttgtcagagaggccagctggcaccatgtgagtcttacccagagggaaacctgacaatcttccagcatgctcaccagactggggcactgacttttgtcacttgattctcaactcacagtctcaagatgctggtgctaatgtacattgcagctgacactggagtttatttttataactgctcttgcctcagaaaaagctccatcccagtacgacttccaggacagggatggtctggatgctgcagttaggaca

SEQ ID NO: 43735 - DNA, 2760 bp, Homo sapiens
tggatgtagaattaccacagaacccagcaaatcaatccttgagtatatgcctaagagaaatgaaacgtgttcatgcaaaagcttgtacatacatgttcataacaacattattcaaaatagccaaacagtgcaaataacataaacgtccatcaattaatgaaatggataaacaaaatgcggtgtgtccatacaatggaatattacagtaagttctgacttaaatgagttattggaaactgtgactttaagccaaaggacttgcagcaggtccttgaataacgtaatttcgttcaacatcatttcattatattgatggaagaaaagaaattggtttcattataagtcattgcacttaaagccacagtttccaagaacccgttgatgatattaagtgaggatttactgtatttggtaacaagaaggaaggaagctcaggtacaggctacaatatgaatgagccttggaaacatgctacgtgaaagaagtcagtcaaaaagcattatgtattgtgtgatctcacgattctatttacatgaaatgtccagaataggtaaagtcatagaaaaagaaagtaaattagtagttgtcagggtctggggaagaggcgatgaagtgacaaaattgttgtgaaattaaacagtggttatggttgcacaccttctgaatatactaaacaacactaaaatatatcctttcaagtggtgagttttatgatatgtgaatgaagtcttttttaaaaattggttagattatttttcccagacaaaacttggtaagggctcacagcattcctaagatgctgagcagagggaagaggtcatcgtgccttctgctcttgcactagtgaagagaagtcagccaccctccccagacaccgcaccagcctagaccttgcaatgtttctgttaaaacaaacaaaataatctcaactgaaagaagcatttggccagctaggatgttgcttctatcatctgattgcacaaggcttagtgattaatctattgatcattcccatctcctctgttaagcaagcatgaccatgcctgataactgctgggaagatgaatcactgagcggggctggtgatattagtcatgagtatgtatgaaattagagaagagaaggacgcagatttctatgaggattaaggagaaaagcattctgtggctgtatttactctctgctcatcctcagcaaaggttccgtaagtgacgtttcatcttccattaccttgttcccaaacaggaaatactaaaataagagaagtgccttcagaaagtgacaggcactgagagccagaatgaatcgttcgctactaacaacctgtttgaagcagaaaattttgctgcattacacgaactgaatttacagcttccattctccaaagattaaagagattattcctaatgtaatcagtagccatcgcctttaaaatagagaactatttgtgacttcaaaaggttttgaagaagagtctgtggctccatctttccccagtatcattacgatcattgctttgttttgccataggctgctattacgtaattactttggaagtgtgtgcctgtggggtttgactggtagaaacaaggaggcagaattgaactggagcttgtccaagaagtggagaaggcaggagataggcatactggtgaaaacctcagctgcgctgcaggattcatctgtgatcgtgtaaacagagagggggacccctgcaagcagtttcagccctgtggagtccccattgtcttcagtctgtgacaactgtttctgaggcagtgcacactcagagcccagcaagcttgacctccaggccatgtctgccctcctctccccacagtctgtcctcagagagccccatggaggcagtgccctctcttatcagggagcttcttaaggcagattcaggctgagacctctctccaggtctcacagatttcacgactgggctgttcatcccccaaccctgtccctgcaccctccactccacaccccttccctcctgctgttccttgacttcacttccttttgttctagtgtcactagaaagaagggacagctggttaccctcctcagcctagcagccccttttattcttgaaaatggctcttccatcactagaataattcatcctattctgtctcttcctcaaattcagctttcaagccctgaagcacagtcactgttttctacagacacctcctccttaaatggcccttttcactccatttgtgggctctccagtgggacacctctatttattgcccactcattatgggaatgagcataaagatctagcgacagcctttctgtctgcattataataccaattcctcactaattccccttgcccttccatttaaagagatgctacctcctttgcttcctggcagacccagcagacccccatccctccctactaatgagctggctcttcctgctaatttaacctccacctgctcatccctcccatctgactctgggcctggggaggctgtcaggtcccaaagaataagccatggttgttgacgactcaggggaatcagccgaaatcctgagacagaacaatagttagtggtgatgacaaacttcaagcctcaaatcttttaaaacagaaggaaagtggaaaatatcagcaaagactaggcattcacatatcaaaagtagttttgtttcatttgaaacaggtttacaaaaatcataaggaggtaatgaaaagtctcatttcttttcactattgttggaaatctgtctcctggt

SEQ ID NO: 43736 - DNA, 1178 bp, Homo sapiens
tggagagcaaaggaaagttgaaggcagctagcttcctcctttatctcaaaagcagaggtcccattggcctttagagtggagaaaaaatcccaaagatgtttccataggcagctccatacacaaaatagaaaacacacaattatgcatacacaggcccctttatcctccccagtggtaattctgaatctctgcatcttccagctgtacttgattaacatggcagacacagttccctcatcaactgcctgttaacacaggagacacaagcagtgctgggaggttttcaaataaaaccgggactattggggacaaaggttaacagctggccaaggtaatctggacacttcttggagaggattaggctaggtctgttgggtgtccatagttcaacattcattttcacagcttagggacagagtggagtcagaattgacattaaagataaggagtgtgtgtgtctgtgtgtgtgtgcatgtcagcagttgtggtcaaagtcttctatgtattaagcaatgtactgagctatttatggcaagagaaaagaaaatctagtactaaaaatctgggctttttaatattaaagaaaataacccacctatatgtatatgaatgtgaataaacaggttatgttcagtatcccctgcctcagctcccttctttctggtcccccatgtggacaacttggggtcactgaggaattcagttgagttgtcttgggcaacacaggaagcagaaaagaagggtgccgtggtactttcattatctctgtgaacatgcgggaaggagaagacaccttgttagttaggcacaatttcttcttcaatatggatttaattctgacattgaaagattatatgtgcaattgttcttagaggctgaaggttacaaatacatgaggaagccaactccagcctgttcacactttcacttcagtcctcagcatctcctcgagccagatgttctcatctggctcctttctctggcaaatctttctgcccagtccactggagctcgtgggtcttgctccagcctccggacagccagtcacacccagcagggcggggctcatgggctctaagggcaccttagtgcacaaggcgttctttgaatgcgccaaaacgatggggtgggggtcacaggagccctgggggtccatccagaattatccaagaccaccc

SEQ ID NO: 43737 - DNA, 824 bp, Homo sapiens
agaaggcagccggctttgtccattgctgtccaaaagaaaggcccagaatgtaaaggacacacatttttttgccactgtagaagagaacaattgatggtccatcaggactctttggaactgtgtgggcagaattctaaaatgaccagcaatgatccaaatgcccccttgtggaaactccccacccccacaacctccttagtgtgggcagaacctgcaaacatgccgggacatcactcaagtgttgaggtcatgttttgtggcacagttggctttaagtgagggggatggtccttgcaggttttacctcattaggggagcccctaaaagggtgtggctctccctggagaaagatgttcagagttgaagggaatttgatgcaagggaaattccccactgctgcctttgaagacagagaggtcatggagcaagaaaaggggtggcttctagccactgagaatggcccccacatgacagcctgagacagaatggagacctccatcctacaccacaaagaattgaattctgccatcaacttcaatgagctcagaaacagactgttacccagaacttccagataacacagcagccaagccaacagcttggtttcactctcatgagatcccaaggtgaaagatcaattaagccatgcttggacttctgacctacagaactatgtgataataggtgggtgctgtttcaaactgccaagtctttgatgatttgctgtgcagcaatagaaaactaaaataaacgtcttgatgaatgttccttaagacaattgaactccttttgctggaattatttttattataataacttcttat

SEQ ID NO: 43738 - DNA, 903 bp, Homo sapiens
tgcctgcagatgctgagtgctactgcccctgccatgctgcactccgaggctctgaaaggaaaatgttttttgtgtgatgttggagagttcgtcgctcctctcatttgatatcggcagttctcccaggccacaagctaactgatgcaagcactctgggtcttgcttctaggtcagtggacacttttctttaagttgctcctggtatatgcttcttcatattgatttctcaaaattccaaaatagagtccaaatagcagcacagcactaggtccaggatttcaaagcccgctcttgatttctggcgtttaatgtttcattcatgcggctcttacataactctgcaccttcaccctgccatcgattttcctacattcaccttcaatatttgatcacagggagagcagccaaaatgatagctggagcttttggagatagactcaaatgtaattctttttcctgttcatgcaaaaaaaaaaaaaaaaaaaaaaaaaggcagagaaaggaacagcattcatatctcagaagagaagcttttcgaaaatggtggttttattgaattccttgtcaccacaaagcagtgaacagagagctatgagcaacctttgcagtgtttgcttgcatctcctcctctgactcaggaacagcctgcagtgtcaacaacacccaagccatcgcttcaggttctccatcaagaaggtgggatgagaaaagcctgacatctacctgcccccaaaatatctacagtgagctgctatgattggtccttttcccactctcctgagctccccactgtaaaagcacagatgtgatcacagcaatgcttctattttagctgcagctgtcctctcgaccttcccatcatcactgaagtatctatccatttttcagatatgtccagagcac

SEQ ID NO: 43739 - DNA, 1415 bp, Homo sapiens
tcaactagaaattgccagtaagggggatggagagggaacctgatgaaaaatatgaaccttctctcaaaaacaattacctgactgtgcatatgactgtgtgtgcggtttcagcgaacacatgaggcagcggactatactcaaagtctgagggaaagaaagccatactgtctggtttagcttcctctcctctctggagccttcctacagcatcaggctggtctggctattcccacagcactaggtatggaacctcgagtgcaacattttctatgtccgtgccacatataaagcccttctcgaaagtgctgtacttgcatttgccttttctccaacccagggcctagcaacatgggcagcacaaggctgttgccaagaaataataataataaacgttctgcaacctttctcagcaccacctccccgctatttcctccactgtcaggcctatgcggcaggtggcttcggagcctcaccttctgaggcctagtttagggcgtgcactcactgtggagcctgcctcccctctggagacagggactgaattcccagaagggctccaggaggaaaaggctgggagggggttacacatgagaggggagacgctagaagagaaagcatgattcccttgatagggaaacgtaaagtatatcatctggccatgacgacgtctccaaaggggcctcaaagaggttggctcttggcaacaggctggagcgcgggccccgccctctgaacacagccaggaaaggcgccccgggctccgggaccagaccagagggctggcggggcacgagtagcggtcaggctcggctcgggctccctagatccccgctcccctagcacacgcttcccggccaggccctggggagaccccggcagcctcgggccgccactcacagcttttggttgagcccggcctggctgctgggctggaagtcactgacgatgatgccgagctgccgaatgttctccacgaacttctccaggtgctcctctaggtggtcaaacttctccgccatcgcctcggcccgtccccgacccacacagcctcaaccagcagcgccgcaggcgtggccctacgctcccgcttcctgcttccgtccggacagatacgacttccgtttcctctgggggagcgcgggcgagctcttgggggcggagcctcgttatcgggacgggcgtgttggggcggggcctaagtgcggggcagggcgggctttcggggatgcggtctggattctggaggaggcctcggcgcgcagctgggcgagtactaactgtttgcactctcatcagacctgcctcggtcatgggagaagttgaagactttctgcaatgcagcatcttcaagcaatacacacatggatgaaaatcctaaagtttgcatgaaggaccaataacggtagtttccctgc

SEQ ID NO: 43740 - DNA, 482 bp, Homo sapiens
tggacatattcctggtcaactaagtcttcaaaaggctgctgagcccccaagggtgcaggctgatgtggacgtctgagccagccctgtcgggtgacagttaggaggcctccagttcttccctccctaaacaacccacggggactgtcctgtgtatcatgtttgctccttgtaccctaattaccatagggaaactcccagaagtggggtactggatcaaagggtgggaacaccctccatattgattggatacagtgctgccaaattgcccttcagaaaggttaccccaggttacagtcccatcagcagcaggaggctggaaacctcccaggcctctccaaccctgatgatttcactacttcccgatctcactggcatagcatatctcatcttttttggcttacatattttctattttattcaggtgtagcatctttcatacagttgggtttttgtattttggtagggatggatttagggaatgg

SEQ ID NO: 43741 - DNA, 684 bp, Homo sapiens
agaccatttcctcaccgtcccatcacgaggcatcctcctgagcctcctcccactggctttagagcttttcctttcacattttggatttcatccatcttgagcccttctccatgtgagctgccaggtagacacccagcttcctttctctgcagtaaacacttttcttggccccattgtctgaaccacctggtcttttcccacggctttctgctgccattgttatcccatgacagtcccatgtaaatacaattctctcttctgctcagttccccaattttcctgctcctgtacaaatattacactgcctttaggaatgcggcctcctagtccaacagccaacagactacaaccccctctgctcttccttttcaaaatcatcttagctttttgtggaccttgtaatttttcaattatttgtcaagaaatttactctgatcagtgaactctcatttccacacaagagcgtaccctgaaatctcagcagtttaatacaggaaacatatattctggcacagagtctaatacaggccagtgtctgctctctatctggagcacacagcctccaaattcacagcagcagtgggtgacagcagggtgaggggagcatgtcagcatcagcgcccgactgtctccacccggaacacacacgcctccttctgctcaccacccactggccagaactgg

SEQ ID NO: 43742 - DNA, 1670 bp, Homo sapiens
cactgaatctggaagaccacttagcctaattttacaccctctgcagtgaaggaggcgagcccagagactttgaggggcttgtccacagtaggacaggagccacaaggccactgccttactgtggctttctgatcctttatgttgcttcatgagactattaggcaattcatgtggccctcaccaaacacacactcttcaccccatcattgaatcagtacagttgcaagtcttccaagccagctgagaaacacccacaggatccattctgtgcccaaagcaaattggagcaaagggcagaaattccctccaactgttttgggaagcttctgtaaggggcttggagctcagcctatgggactgtagtcagaactttgtaatttttttctccaaagacagtgaaatcatgtacagctctgttcttagttttctgctaggttctacttatccttctaatttttgcagcctctagttcccatagtattaaatatcatttttaagcccagggcctgtctgatccacagaatgtggtcaataatctggaaaggcaaacaaactctgttgacattcgggaaagcaataagtaatgttagtttggttccagaagaaacacgggagcaaagtgtgctggccaaacagcaacaatcaaagcagaggggagcaagattttctttcaaggtcatgataaggctagacaaatagagtgcaatgagggggtcaggtgcgaggccgtcctcccaggtcagtaaggccgcatggagggataaagagatccctgcactgcccccaaccgccaattcaccctgtgtctctcgcagaattaaagccaggaggtggctttctctttccttctactggtggtaaattaagtgactgtcctactttgtagacatgcaatcgttttgtacctctagaccttgggcagtcactggtgatgacactaattgaactaacacagaaactgctgtcacctgatgtgcttggtttcattcctgcctgccttctctacaacgtgacttcatttcatgaatgtggttgccattatgacagtgctaggatgctgatctgtacaccatgagtgactgcgaactttcagactctcaccgcaattcatggggagactttggtgtatcctgtttccagagttgtcctcttctgtgatcctcaaaagaagagaaaaaaacgcatgtggcataaatcaacaggaaagaaatgtttaccactggaagatggtgagtgcatgagtcaaataatctagaggcactgccctaatgagaaaaaaaaaacaatgattctagaaaataaaactttaaaaccaataaacgtctttacacggaatgcttgctgtgtcctcgcatggtctgtgttcagtaattctcaggatttatctgggtctccacatgtgttctccccacgggccatggtgagtgactttctgtcacttggcaccctctgatcttgtgtcccttgactcattcgtggtttgccaaatgaaaaccttgaagtatatcatgcgtattctccacaaaaatcaatgaaatgtaactgaaccaaatctaattaatctaatcagtgtgatttagatttctccttcagctgccatttgcattataaagatgcttaaacattattgacaaagatttccattaaagtttctcaatataagtgaaata

SEQ ID NO: 43743 - DNA, 650 bp, Homo sapiens
ggcagcacctggtgacagcgtgctcctcgggggtggtgagcggcatgaggagtccaggctgattgctggggcttcactctgagacatgtacatggcaacactcccaaatcatgttcagccacgtctcccatcacagcatctggtccttgtgtccgcccccagcacctcaggctcaacggtccccaagggactcgccatccacctgaacatgtgtgcgctcattttgccttcctctgtgaaggtcaccacaacccactctccacccatgctggagtcctcgtcgctcccatacacacagccgacacccactcagtctcggcctttgatcctggaccaggacccaaggctgggcaccgccttctccaccacctccctggttggattgctgcctggacctggctggccttcgtggccctgctctgccctggaatgcctgttctccctgtgagaaccagaaaggcctgtgaagagccactttggtctggtctagaaatcactgaccatccctaacacccacagaatactctcagctctggagacaaagtggcccgttccaacccagggcggtcatgccaggcctctctagaacacccttgagtgtcccccttcactaactgcaaagccacagcctccgggtgacccccaagtac

SEQ ID NO: 43744 - DNA, 778 bp, Homo sapiens
gcctgtggctggtccctgtcctgcacacctgtatggcctggactaggcctgagcgcctcaagggccgagctgggtcctccccacccgccggattccccagcgcccaggctgtctccaaagaatccccccgagagcaggtccccgcttctcgggcgtcggggctcgccgcagtcacgctgcacaccctcccggcctagggcggcgccggcccgggactcgcgtgtctccccgcggcgccgcgcaggacccgggcctcggagcccggcagcatcccctgctggccgctgggctgaggagccgcgggaggcggggaacgcggggccgcgggggctgggcgggccggagtgcgcggtagagggggcggcgcggccggggtgcgcggtagagggggcggagcggccggggtgcgcggtaaagatggggcggcgcggccggggctcgccagcaccagccctggaaccccatgggggacctcgacaacagcgcctttgcggcgtgggcccctttctgcagctcctccacccgcgcgctgtcggctccgggacactggggctttgaagggcgccagttcccagccgcacctgcacgcctaggagggcgcaggccgcgtgtccctgtgggaggaaggccccggcaacctgcaaagacctcacgtcacagaaacttgcggcgtttgcccccgatgcgcgcgtcaggtgctccgtcccttccaggtggcagaggagagggaagggtcgcgcctggtgggggcctgagagccaccgggctgcggtgcgcg

SEQ ID NO: 43745 - DNA, 1231 bp, Homo sapiens
tgttgtaaggtgcttaagttctttttgaattattttgtgtttgtggtgattgttgtatggtgcttgtttaagttctttttgaattatttgctgtttgtggtgattgttggaaggtgcttaagttctttttgaattattttgtgtttgtggtgattgtcacaaggtgcttatttaagttctttttgaattattttgtgtttgtggtgattgttgcaaggtgcttatttctttttgaattattttgtgtttgtggtgattgttgtatggtgcttgtttaagttctttctgaattattttgtatttgtggtggtggttgtaaggtgcttaagttctttttgaattattttgtgtttgtggtgattgttgtaaggtgctttaagattaagtgctgtcatgtgttcttgacaggttattccttttataaatatcaaatgtagaaagtttccctgttcccctattttctgtgtcttgccatgaactgtgtttttttgatatattgacatacctaatacctatcataatttaaaacacacatactccttgaccaataaatacgactcctaggaatttattctaacgcacacacgtgtgcaatatttgaaatgaaaggtacagcgttatcattgcaggctttgtaggtaataacaaaggattggaagtaatccacatatgtattcacaggggtctggataaacaagggaccctctgccactctggaaagaatgacctccttatgtactgataggaaatgatctgtcagacctgtgattaaacaaaaacaaatcctaggaacaaaacattctgaatagatgtcaatatttgtgtaacacggctgggcaaggtggctcatgcctatatcagcactttgggaggccaatgcaggcagatcatttgaggtcaggagtttgagagcagactggccaacatggtgaaaccccatgtctatgaaaaatacaaaaattagctgggtgtggtggtgcatacctgtaatcccagttactggggaggctgaggcaggataatcacttgaacttgggaggtggaggttgcagtgagccaagatcatgccactgcactccagcctgggtgacagagtgacaacctgtctcaaaaaaaaaaaatgtttaacaggggaaaatcatatctacctatctgcacagaatatctcgagggatggacaggaaactgttactgctggctgcccacagaggatggggctgggcaagggggt

SEQ ID NO: 43746 - DNA, 2979 bp, Homo sapiens
ggactacaggcacccgccaccacgcccagctaatgttttttgtatttttagtagagacggggtttcactgtgttagccaggatggtctcatctcgatctcctgacctcgtgatccgcctgccttggcctcccaaagtgctgggattacaggcgttagccaccgcacccagccttctatccttttttcttcctttcttctctttccttagactgatgcaattttgtgacttttcttttctagtgatttggaggttatacttcctattgctgtctttctaatcattactcaaccatgtgaacagacgtattgaagtggtggagcagataaggaggtcttcaggtctggagctgtccaggagctgagacagtctcagctggtagctgggacactcttggggagttcccccagctgaagaaagtctccctgccgaagtcatgatctttcccagggcagcccacaccccacatctaacggctggttgatgttggaggtgcggtgtcaactctcaccccaactctgccacgtcatgcagctccagagcaccccgtgggacccgctggggcctgtcatgcctgcgacacagccccatgtctccttcagccccatccacccaaccctgcttctttcactcagctgcagggaatgatccaaacttcctgcacgcaaatctctagcgcagagtgtttcccagggaaactggcttccaaagattgatttgtctaacaagttctaacacacaccataatatacaaatgggcagggccgatcgtgaaaggtgatcagttttatgaagaggcttatctgtgtgctggttctggtaatatcccattagtacattctctggaccctttatattgtagttgtttaaaatgggttgaaatttcagagatcttgatactggaaaatgtcatttgttgtaaccaaaatccacctggaaaagcataccacagatatttcaattttaattgtaaagtgaagttgttctcttgacaccaacaattatcttataaataacctaatgacctaatcagaacacaaatttgcatcaattgccgggtgcttggatacttggagtgcagggccaatgttttctagtttttattagtttttcataaggtagtttaaaataatctttgatgctgaagtttggcattgaggatgtgagaggtaggtagtagaaattcgtgtttgacattaaaaagcagtcagttatgcaattctgtgtttcccgctgcaaccagctccagggtgccctgacactgacagctcagcagaagggcacgaggtacctcctccccagaccaataaaaggaaattagaacaagaacacatgaactatgtgatgctccttggttctcagggctgtgattcagtgactatgttagtttctgctagtattgaagattttgcagcaggcaaatatgtgagcaaagatgacatttaagttctatatgcttcacccaccttatctttggatcccccagtcaaaaagttttattcactagcaaatagataaataaatgattatcagtaaatgtgctgtcttagcacctcgcaccccaaccagcccccaccttgaaacactagctgtcaggtgccgttctcagtgcactgcacatatgttggggtgatcagacccaacaccaggtcgtgggggtgacgaagtctggcagagtcaaaggattgagaaaaagtttgagaagtaaagtggggccaggggaccatcgcgatcatggaggctgcaaaggccccgagctctgggagcccacgctatttattggtaatccaacagagaaggaggtggccagaatgtgggggtcaaaagggcgtgttgcatcaagcacatgatttatagctgtgatggtttagcatttgctctacttgagataatggagagcaggttcttttaactcaagatacaatcgatcctgggagagcaaggagcaaggagccagcaagcctagacacattccggagccacaagccctggattctatccaagccacgagggattttatgccctgggcttagattaggtacgtcagggtagccttccactctttagcacagagcttggtgtgccaaagggcacaaggggttttagaccctggaccccggacatgttccaagactcttttactttatgtcagacatgcaagccctgcctcggcttcttcccaacactcagctttttcccaacacacgtattcactaactcaggcctcagcacaccttactgggtaggtgctaccatctgcccattttatagatgaggaaataaaggcccagagatgataagaaacttgcccagggtcacatagtcaagaagtaagtgactgtatcagtcatctatgggtttgtaacaaattaccccaggatgtagtggcttgaaacaatatttaatatctcacaacttctgtaggtcacaaatgctggcagggcttaactgggtcttctgcttccaagtctctgtaaactcagataaacttctaagccccctgctgactgaatggactccttgtgatcaagaggaccccagaaaaaccttaaaactaaactcccagccatagtgggatgtgaggtcagacacacctcattctaccccctcccttttgtggtttagacacaactgaccgacattaatgttaacacagagatcttaagactggcaaatagactctctgtagcagtaagataccagattgtaaacaggacccaaggccatgccaggcaagggttacatcacacatccctaacctttcttctaacggccaagggtatttttctctagcaactaaacaagcactggcctcgagatacgttaaacaattccagctcatccagctcagagacgttaaccaaccgaccccattccaccagccataactgcagctttgacttgaacttactgaaatctctttgtatactacaaagagcctgtagtacaaagcgattgattccagtaactttctcctgac

SEQ ID NO: 43747 - DNA, 660 bp, Homo sapiens
gttgactcaagcctcaactagggcaggatctgtttccaagctcatgtatggggttgttggctggattagggtccaaggcagttgctggactaagggcctcagttccttgcttttccaatgctgcacttaattcattgcagtaaggcaggtgtgaggactttacccagcaggcccaaggccactctccctaaaaaggcctgaatgcaagactggcccttagttggcctctgggaacctggattttgggagtgttcccaacatcccaacgggtaagagtggttcaatgtgcctaaactgtttatgcaaacaatacactgagtgcctgctttccctgcgggagtctggaatgttggaggtgccagacaggtgcccacatgacccctgtaagctccctgagcactgagtctttaatgagcttccctgaaagacaacactttgcatgtgtaatcacaactcactgggtcaatcaagtctgtcctgtttgattcctctgggagaggactctcggaagcctgcacctgtttttttctagatgttaccccatgtgcctttccctttgctgcagtcacaagccttttgtgtaatacatcatagcagagtaggactaggtgctgagtcctgggagtcttcaccaaacccacgggtgggtcttgggaaccc

SEQ ID NO: 43748 - DNA, 3361 bp, Homo sapiens
gagagtaaacattctttagtcactacttttacactgtatgccttcaaaatttaagcaatccacactgtttgagccctaagagcaacactgcattccttctctcctaagcatatcctaccgttaagttttacttgcgactcatttagaaagatgtaactacaaagatggagggggggcgcggaggaggggagaaccaaggggttttatgcattctctataaattctcttacgttccaaaaggtaagaccctcagcttccctcctggaagattccccaggagccgaatcttcctcagatctcattttcatttcgtcttctaaccttgcgcctgcaatacctccgtgaccatttcattggaccctgtgctccccacctcaatgcttcctgaatccaaaccgctgaaacgccacggttctctggcactgtaacacttgtcgaagaaaacaccgtcgcctttaacctccagcatcctggccccaactcccaaaaaatcaggcactgcctccctaccttttgtaaccagtaattcttaaagtggccgggagcggctccctgagagcgtccatgaactggccccactcgccctcgggcacgatcttgagctcctggtagtagtgctcgaacagcttgttctccttgacgatctcggggtagcctccttcccagccctgaggaaggaaagagacgtctaccccgaggcccaaggagccgccccctcgccgccgcctcgcaggcctcggggtccgggaagcccaggaggagcccctggcccgcccgccgggtcccggctcctaccgcctcgccgcgctttccaccaccctcggcgccatcctccgcgtcctccggccgctgctgttgctggagccgccgaccccgcgaccgccgccccatagcccacgcggccgcgcacgcagcacgcagaaaccggcccgccacggccagaactctagccctacacctcccgggacttccggccggaaaccaaggccccacgtgtccgggcctggtcctttcggggacctttggggaccgtccaggaataagcccaaagcgcacaacccgtctttcagaaaagcggcgtgacagggaaaacagcgaacagctctaaggggaaaaaaatgctccaggaagcagccacaaaggcgtctccgcgcgaagcgcccaggtttcccacgcgggctcaaggagctccgcggacagcctgaagccgcgcgtgcgcagagcggcgcggggttactgcggccccggcgtgggtggggcgcttgcaggtccctccccgcgcaagtgctcgccccgcccccggggccgcacccacagccccggctaccccggagaagcctgacttgagaaccctttctgcagagtcccggcagtgcgggactccggtagccgcccctccggtagccgcccctcctgcccccgcgccgccgccctatatgttgcccgccgcggcctctggggcatggagcacgctgcccagccctggcgatggcaacggcgacgggggtggcggaggagcgcctgctggccgcgctcgcctacctgcagtgcgccgtgggctgcgcggtcttcgcgcgcaatcgtcagacgaactcagtgtacggccgccacgcgctgcccagccacaggctccgagtgccggcgcgggccgcctgggtggtgcaggagctgccctcgctggccctgccgctctaccagtacgccagcgagtccgccccgcgtctccgcagcgcgcccaactgcatcctcctggccatgttcctcgtccactacgggcatcggtaacgtccccggcccccggccccctaccctactcccggcccggcgtcctctccgaccctcccctcactgcccggtgccctctccccgaagcctcccccacccagatgccctctccctgccagatcccccggggcgtcccccatctgcacgggtgcccttccccgagtcccccggccccgggagtttggaaaccagaagggattcgtctggaaagggcgggaaacaaaggactggaagggagtgatggaaaaaaacatgatgaaactgatctggaaagagccactcagtggtcctaggtttggtttccttagccgggcgcggtggcgcctgtctgtgatcccagttactcgggagtctgagatggaagaatcgcttgaacccgagaggcggaggttacagtgagccgagatctcgccactgccctccagcctgggtgacagagcgagactctgtctcaaaattaaatatataaaaataaagagttaaaaagtaaaaatgtaaaataaaaatgaagactagattttgttcccttagatcacgactgtgggggcgggggggagggggttggcctagagtctaatgctgatggtcggtcttgagggccactggtttctactcctttctgccggttccccttttggtatctttggtgatggtggagctgttttctcccagccaagtgatcagctgcaactggaaacctgctgtcctaaaactgcctagcagtttctccttataggcttgatcactttcagagactttcatgtccaccttatgcaagggaccccaggattgtgggggtggaaagccagcaaccttaaaccttaaacaaacgaagtcttaaagatgacttctaaatctttcaaggtttttgtttttttgaatatttgaaaactggctgtgtctgaaatcttcaagccttctaataagttggggttctctccaggtcgtatcttttggcttttacacagccaaagcaaacgacaggtcgaaagttcaaaattaaattttaaacgttttcattcaggctctggaaagcttcacagttaaaaaggatgtctctacacccaaggaagttgaactcactggctgtgtgactatgggcagtttacccaacctttctgatttggggtcccaccttaaaacactcacttcccagagagacaggaagaactcagtgtgtgtttataagcctctcttctttctcctggtgtcatgcattccagcgaagagaaagtacacagctccactacttggaaccagtgttgtacccagcacagtttttggtacctgagttccctgaaaaccagcaccttaccctgtaactggtgcagtctgtgtcctcagtgtgctttgatgacttgcactttaaacaagggcaagtcaacattcatcagaggcttagtgagtactgtgtgcctgaaactctttaccattgctttattttttttttggaatgggatcaaccattgctacaatttgaatattagtcagactttgctgtttgtatatacttttccataaatataccagaagctgtatgtctgtttctttatggctaaaagcaatctcaggtcag

SEQ ID NO: 43749 - DNA, 877 bp, Homo sapiens
agttgtacatgttattgtgtacatagtctatgtggtttggggacatttacattttccaaatagaaaagataaacattttccattctacccaagcaactaatttattaaacagtcacttgatctaagtcatgagcacttggaagagaaccagagtggaaacagcatttagcactgaacacaaaccatcccagcagcccctggaagcgtcctggagccctttatttgcacagggccctgcagagaacggagaacaccacacccggtgagaggaggctgtgggtacaaggatgactcttatgaaaggcaggagaaaagtgagcctgaggaggcgctggccaggcagagccagtaccaccttacacaacctgacaggtgtgcacacaggccctgtgctgacctgtgaggtttcgctggagtgaggttgggccctgccttggggaactagagcctcttttgggagtggcaaggaccagagccaggtccagggactttccacagtccatgaggcctgaaggcagcagcagagctacagctcttcccagagcaactgactgttctgggaacaatgagtacaggacagtcaggtcaaggagggaggaaaggtgaaggaagggatagagggaatggtgcgctttcatgtatttattcagcaaacacttaaggaagacttacgtgccagtgaggatttctggacctggcgttgtgctggggatatagtgacaagacattccctttgagttgaggagtaaaagacaggttatggagaatctatggggtcttttggacacaaacaccagggagggaaggacaggctgcctggaaggggacagggctggggtggggggatagccatgacgcaggacgagctgtggtcctg

SEQ ID NO: 43750 - DNA, 1880 bp, Homo sapiens
cctgacctcgtgatccgcccaccttggcctcccaaagtgctgggattacaggcgtgagccaccgtgcccggccaaaaaagatcattcttattgtgaatgatgttttggtgatagctggagaaggtagggaaaatatatccatcctaggcacattgaagtccatgaagaagaaatccaaagcattggaacagaatatattttaaaaactaattcaagaaagcttttgtgaagtaaaacaagacacaagagcgtctgccgtttgcaggtacgcaccctataccggaggaagtggacaggaaacagtgacgatcatctgcacgtgccatgagtggcttgtaagggaaagttcgttagattcttcagggcagcgttccgtgccagggtcttagaggcagcaacacgagaggcccaaggaacgtggaagccaaaatattatcctagctttggagtccctcatgtaaaatctgtcaggttttgaagactcaggtgtagggagtctgagtgctgtgccccatgaagactccaccatggtcggctttgtgaccagctcccttcgctgcagactcttaattttgcagggcgttttcatgtgacacattgatggtttctaatacacaggtgtgccgtctacatccagtgactccgtgaggtctttcagaaacgcttcgcaggactctgttaatcatggtgccataactggttagggtcaaaggagcaagtgacaaaatgaacaaataaagagataaagagaggtgcacaggtgtgacgtccatagtcagtacatacaggctgaactagggcttaggacaagtgctgtgggctgtgtgtgacaaccagtttgtggttttgtaatgtggcatctgtaagcagcctgtgtctcaagaggacattttttagcagattggcatctgcaggttttccagtctaattccatgcttaccagtccacccatacggttccaccacaccgtgtgtcccacaccagacacttaagagagaaggttcactgagcaggcggcatgcaggaaggcatcgtggccccagccctgcccacaggctgtctgccctttgggtgactggcatctgcagggtatggtacaaaggtccttccacgtctgggattcacctgcccagggctctgatgaaatacagatcatgattaacgtaatcttgtagaaagttgaagcagttacagaaatgggtgaataagaaagtgaaagtgactaagctccatggcccagaaggaacagcgctgtgaatgctttgggtccattcttgcaggtgcttctgcaggtgcacatgcccacacatggcgaatgacattctatttattgggcattaagtttgatatttttatgttttatattgtcattaaaaagttcacttgtcaatgaatattgatatttgtattagtctgttttcactctgctataaagaactacctgagactgggtaatttatgaagagaaaatgtttaattgactcacagttccgcatggctggggaggactcaggaaacttacaatcatggcagaaggcaaaggggaagtaaagaccttcacatggtggcaggagagagagcgagtgaagggggatctgcctcactctttcaaaccattacatgtcatgagaattcactatcacaagaaaccgcctgcatgatccagtcacctcccactgggtcccttccttgtcctgtggggatcacacttcaagatgagattgggtggggacacagaatcaaaccatatcagtattattttacaattctgaattatttcaagcttacagaaaagtagtagagagttcattattgcaaacgtctacataccccaccttccttaagaaaaagaaaagcactgtgctgtctcgggctcagca

SEQ ID NO: 43751 - DNA, 2137 bp, Homo sapiens
ccttattactgagaacatgcggtgtttggttttctgttcctgtgttagtttgctgaggatagtggcttccacctccattcatgtccccacaaaggtcatgatctcattcctttttacggctgcatagtattctaagagtggcatgagatgatttttaaaatagtaacatcttttttgttttttaaaaaggatcacacgagcagctgtgcagaatgtgggaaaccagctagaaggcactgctttaaaatggacgggtggcggggaaagaggggtggagggaggaggaggggtagcagttgggttctggttgtttcgggcagtggagccaagaggatgtgttcattgtggacagagagaggagccaggcatgaccaaggattttggactgagccattggaagcaaacagctccagaataacggccgtttgacttgtgtgtgattttctgtagtttactgaatgcacgttctaatccttggtcatgatttccacgtgtacaatatgaaggtatttgaaaacgtctgaaacattcattttcattactaaccaccaccacttgccccaaagcctttgtatgcaacacacggacctttcctgttggggcgatgtttgaagggtcaagtgcttagtaatgtctactcatctgtgctggagacgagggggtagcatttacaacacgcctgtacgaaggccaggtcccgttctacttaaaaggcttggagcccgggcgccactgggctaaggcagcttcagggccctggcccgggagtgcatttgcggggactccgcctgaagacagggcggcagccgcggggcctcacgtcgcccaggctcgcggggcaccgcgatgatcaacgacactggcgtttgctttggacctcacaggatgtgtggttggcgctgtattccaaacagtgccactgtcaacccggcttccatcgcgctcgggacaccgggatggcaaacggcaggctgtggatggcgggcggtttcccactgactcctgcccgctcggtgcagctggaaaaaccgaagccgggggccggacgcgccgcccaccagccgttcctcggctagcactgcccattttgcccagggaattaacttggaagttttcacttcacttttcgcatagaaaatcattttaaaaagcaaaccaaacgcctgtaagcagacccgctagggagcaggactctgccgcgtgtccttcccggctccggagcggcggagccagccacccggcacggcacgctggccgctcaccccgcgaggtgcagggagcacgtgggccgacgcgcggaccccagagagcgcagcgtgacctgctgcacggaccctcggatgagagacctggggcgggatctgcgaccggggcccgcccttacgtcaggagggagggccggccggcgggggaagcgcctgcggtggcgtccgctgcccccgcccggctgctcggaaacttccaccggcggcggtgacggccacgctgccctgcgcacgcgcagcgcggctcaggcggcagcccggtgacaccggccctagcgcgcatgtctgcacgccggggtctgcgcgccgcggcgggccgagggcggcgtgcgggccttccagccgctgcctattccacccaacgccggcctagtcagtaatggctcaacgccaccgcctctccctccagcccctcccagtcgcgtagcttctgacgccgtcctcaccccgcccgcggccgacggggccccaacgcgcaggcgcggtaaccacggcggcagtgtctagtgaggatttgaaatcggtcgcgcgtgcgcaccggcgacacggcccggcgaccgaggccgcgcttcctcctgccgcccccgtccccgccccctcccccgcccctcattggagcggacgcggcggcggccccctccttcccccgcgctgtcgccgccgagagtgtcttttcaccgccgccgccgccgccgccgcaggagcgccgagccagcggcgcgagcgtgactgagggctagccgcacgggcggcggcgcctcccgcgggtccttcagccgctcggcgcctgggcccgccccctcggccccgccgcccgcccttctccgatggcctctccccgcggcccgagtggaacgccgccgccgccgcgg

SEQ ID NO: 43752 - DNA, 641 bp, Homo sapiens
gcggcgcttgcacaagtcgccgtcgctgtcgtcctcgtcgtcgtcctcctcgtccaacgcggagtcgggcaccgagagccccggctgctcgtcgtcgtcctccagcagcgcctcgctgggccggccgggcggcggccgcggcggcgccttcttcaacttcgccgacggcgcgcccagcgcccctggcacagccaacgggcaccccgggccgcgcggccccgcgcccgccggctccccgtcgcagcaccagttccacccgggtcgccggaaacgcgagaacaaggccagcacctacggcctcaactacctgctgtccggcagccgcgcggccgctctcagcggagggggcggccccggggcccaggcgccgcggcccggcaccccgtggaagagccgcgcgtacagcccgggcatccaggggtgagtgcgcggggaggccgcgggggcgggggcggggcccatggtcctggccggcgcccgcggtgcagacacccgtcccaggcgcccgggcttttggaggatggatgttgaaggctaaggccaaggcccgactctgcactgaaagttttttttttaaacatcagactcatttatcgtggagtgacttgcccagatcctacaagtaacagtccaagaaaagg

SEQ ID NO: 43753 - DNA, 2218 bp, Homo sapiens
gatggggtttcaccattttagtcaggatggtcttgatctcctgaacttgtgatccatccacctcagcctcccaaagtgctgggattacaggcgtgagccaccgcatctggccacatatttttttaaattaaatgtgatacataaaattaggctgcaggcatggcctgatttgcaggtgcttcatgagcaagcgtgcacagcatttatttgctgctcctggagtctctcgtgtgtgcttgtagcctagccttaagccctctgtggacggcttggaatgcgtactccaaatgactcttttggcggggtgggaagtggcaatactttaggtgactgacagttgaaattaaccttacacaagagccaaactgtaggctgatgcagggccactcacctttgtactcacccctggcaggtcctgtaagaggtgctacttgcttccactttgccagctgttcgttggccctgttttgtcttctgctgtttgccttatttatgaaacagaatggaaacaggcgagtttgatttgttataattcctaggagtcatagaatggaagcaggtgagtttgatttgttataattcctaggattggataatttgccttcccctctctccatctttaattaatcccttaaaggaaaagaggacgacagcacttttcctgcagtcatctgtgtaggcctcagccttaactcatgacataggctggtgccactggccacagggctgacctcagctcttggagcccatggggtgacaggagatcagcacctttgaggtggcggcgtgaggcgtcttccaggccttgctcatggtgcttgaaaacactgctttagagctttgttaagagagagaggccctacttactcctgtcccacaggcatttgggtgttgacctccttgttggcctcttaaggagagaatacttgagtattgaattcgatcagcttttctgcctccagggaccctgtttctctctgctgagactgtggcggatgaaaccaggatttagtggatggtcaccaggtagcttgggcagacctgggccgcggggcccctgaggactcatacgtctttttcctgttcacatgttccttccccacaccttggcccattctcagtccctcccatgctccttagcgtgaggcactcagggaggtgcccatggggccttggggcctgtgctggagctggttcccagcctcagaagtgtgcctaactgtgccacattcattggaaagctgctttcacacttcctggatggaattctctcattttttcaatataaagtcactgagatgatttttttggagaagtctttaaaggccagttatacatttattgatacttggtattgacaaagttcagttgtttagtgttgctaagtcatactgtgtaagtttgttgagcacagagttttcattttatactttcagaggagaaatgaaactgaatttcgtggccagaaatatgtttgagcgtcatcctgatgtaagaacagaacagaaaatgtggtgacatttcattgtaactctagtatgttttcttttttgtccattagactacatgaggaaataattgacttttataacttcatgtccccttgtcctgaagaagcagctatgagaagagaggtggtgaaacggatcgaaactgtggtgaaagacctttggccgacggctgatgtgagtatgttctttggagttctgtgtcgcacgtcacgtgcgagtaaatttaaataccctgtgatgatgatgtgtcggctagatccacacagaccttttctcgttggcccgaggcagcagttctccaagtgtgctttgagaaggcctccgttgcctggaatgcatggcccccggcgcacctgcacctgctgtcttagacacctgcggtggccgcacatcttcgtgatgctggcgcgcactcaagtgcgaagaccatcggctgagggatttgttgggttttttttttttttttttggaagggggagaatggtgtgattgtttctcttaagttcaccttaaaatttagaaatttcaccctgtcacccacccctgcttccccaccaccacacatagtagcatataatgtgctcatttttgtaaaacttggaagtgttccctcatcacacaccactcttgcagtgaaggaacaagtgttttttgacatgtggagtggggccttctggaatgcttggtgcaggtggcgtgaagcctgc

SEQ ID NO: 43754 - DNA, 1010 bp, Homo sapiens
aacagacacacatcccagacaccacgctgggggctacgcctgttgtttaagaatggccggaaaatatgttgcctgcattgtgtctccaggacccgtgtgggagggttaacttgggaggggcggggtcccactagccctagattgcaagggtaaactgcctggtgtccttcatggtgagtcttactccatgacttgatcctagagaaggaccagctaaggacttcagaggtcttggagtgagttccaggcaagggcaagaaaccaaggcttttcatggggttcttaggtaaaggacgggggtatggaccagtcacactgggaggttgagtcctgtctcctgggaagccacgtggctgtggggtgagcttgcccagggttccttcccgccagtgtggatatggcgccctctgcccaggcctctgagacggaacgcttggagctcggccaatgcttaggtcatcataggtgccgtggggtcagtcacacttggttgagaggtatgtgactcgaggcagattcctgtcattcctgcttgtatttcatcaagtcctgagtgaggtttgtgggaatgggtgcaggtggctatggccaaatccaggtctcaacagacagcaaacctccacacatcctgccatgtcactgttggaattttcaagctgggtggaatcttaaggaccagctagagcagctcagccccgaaaatgagaaagtgaagtcctgtgacgtgacgggcttctaaaggtcacgtggcacatccgccaggcccccgagagggcgctgggtctcgctcccacaccactgctctttgtaaagtcctgtggcccctttttgttgtctgacaacatctagagaaattgctgtgagtttaggtggaacactggtgcttacattatgattgagccccaccaggttctgaagatgtgtcttgtgcctgtggctcacgtcatggggagcctttcagggacacagtggcatcaccagccaggccctgtgtgttgaaatggttatgg

SEQ ID NO: 43755 - DNA, 540 bp, Homo sapiens
cagcacaggagcaaggcgacttggagccacaatgagacagatgattgccagtgttgtttcatttcagttcttaagttcctgcatggggtgcttactgatgagtctgtctctcctctcaggtaagccaggcctccatccactcctgcacagcagggaacgctgcacggtggcccagggttcgtggtgggcacgccgtacccctcaccccctccacgtggagtctggctgagggctccctcccgcatgccaggcctggcatgtcggtgcaggcccttgcatttctggctgtgctgcgcagtctcacccttgagaagaagggggcgctgttgcctcagccttgcagagtttctctgtggtcaaaccaccctgccagcctccctgctgcagccggcagcacgtcactccatgcgggaggggagccccacctaaggtaggctgtgaattaatattttttaaagccccaggtattcaggtttaaaaaaggcccagggacatgaggctgcaattttttgctctattgaagaaaagaaaaatctgtag

SEQ ID NO: 43756 - DNA, 692 bp, Homo sapiens
tggttggagaatgagacctactgcctggagcggtggggcctggatgcaggccttggcgcagggcgctttgcaaactgcctggtgctttgcagatgcctctcaccgcaaccttcccctccaagcctgcagcctttaggacttcctgctcctctgctgctccctccctccctctcccctcgctggcactctctgtctggctgcccagggcactgactcactggagtgcccctggctcaccgccagcagacatttccctgtcaccgccaagggctgaggaggtggctgaggctctggccccggagcctggaggccagggcagctgcagaggagcagctgggtgccatgcgggcctctgggaaatgtcccagacacctgccttggaagccccaggggcaaaacagccactgaactctacaggagccccaccctgaggccacttctccctcagggaaccagtgcgctgtgtggggtggagcgagtgaggtcgggaagctggggccatgtccggtgacaaggaggatccctcccggacatgggcgaggctgggagtgggcagccaactagccagccatgggtcctgggagctggcttattttggttgttaggtttatggccatattaagagaacagcagttttggcaaatgccctacaagtagacactcaaaacctacattggtagagaataaatatt

SEQ ID NO: 43757 - DNA, 628 bp, Homo sapiens
gattgagccttgaacggagcaggccttgtccacaggaagcttacagtctggagaagacacatgaaagacgcgaagaagccaaatgacttgccgaggctccagggcagcgctgtccaatagaaacatgatgagagccacgtgtgtcgtttcttatttgactcagtaagtccaaaacgttatcatttcaacaaatggcactagctgcctttcaagctctcggtggccacgtgtggctagcagttacagtattggccagtgcaggtgtaaggctgcatgaatttacagaatctggcagaactcagctgctgtggacagggctcttgcaatcctttgccagtgtgtttacgttggcccttgatctgaatgctgggtcaatacctgcgttccgtttgttgaaaatgtgttaagctgtatactcgtgattggtgggtgtacagccaagaaaagttaaaaacaaacaaacaaaaaaagccatgatgaccaaggcttgggaaatgctttagccagcgtgcctgggaaggccagccttgctgagaaggtggtgtttgagatgaagcatagcgataatgagaagccagttctgtgagtctggcaatcccttccaagccaacttggtcctctgaggcag

SEQ ID NO: 43758 - DNA, 1781 bp, Homo sapiens
aataacaatcgctattacttgctaaacactgttgtaggtattctattaacttacacagattcagtacttttactatcattttacacgaggaagaagttgaagcacaaagttactttgcccagtttatgcaggtggttaagtggcagagctagggttcaaactcaggcaatgtagctcttaagggtggcccttaaatgttggttgaaggaagaaattgcatttggatagaaatcaaagaacaggtaaagtgggcaaaattaggcgaggttagagcaaggcaagggtaaaaacgcgctggaaaggccctaagctgttggtttcccctcggtgtcgggagaaggttagtgttgaaggaaagggtctactttgtcaatggaaacaaggtaggaaaagaaaaagcaaaacatagatcaatgaagggagaaggtggggcggccagtccagatctaaagacggtgcggggggatttggcaacacgtgtgtgcaagacagacagacgggaggccccgcggcgcgttttcctaggaatgaaagggacccgcggggcgagcacccccaaactcggcgccccggggacctgcgctgagacacgggccgggcggcgcagcctgaggagaaagccggccaggtctttgacacccagccggaccaactgcgcggagaccccgcgttgacacctaccgcgctctgccgggcaatcactccgggtggtcgcggaagcgcctgggcgtcgtgggcctccgtagcaaacgcggggcgggagcacgactcagggcggcgcaatgtgattggcccaggtccccttcggagctttctattggtcctgggtaccgagcatgggcgctgcgtcagtgcgcgctggcgcaaggttggtggaagtcgcgttgtgcaggttcgtgcccggctggcgcggcgtgggtaagctgcctgtcggctacggttcccggattccggccgctcgccctgcactaatctcctgggagaggcggcccggggcgggggtgggcagccggcttgcgcccgtggttcccacgcccttcggcctccgggggtcgccgcgggcgcgggctggggctcggacttggcctttggcctttggctttggtgtccccgggagcgtgtccttgggctcggcgtcggcctctgccgcgggaggcccctgggcggcgtggggtctctcctcatgttctgcctttggttctaggcgctttccaggcctagggaaaccgcactcggggacgcggggaactggggaacatgccgggttggggcggcgcgctccggggaacccgggacgttccgagcgcccacccggcgggacgcggccgtgagttctgcccgcggccgtgagctctgcccaccgcctccgcgccgcttccggggctgctggggcccgggcctccgctgagagtcgtgggaaggtggtgccggattgtggggcagtagcagggatgaggggttgattgatcctgggaagccctcaggatgtgtgtttcatgggaagtgatagaaattttagctgtagtaaggttttcattatcgtttccaccgttttctgtgagctgtcaatgtgtagtgttttcatattgtttattcactcattcagataacttatcgagtaccagtttcatgccaggtgccgttctgggcggttcattcaccgaaagccaagcttttggtttgggtttcagtttaaatctgtctctgcaaattgacagcccaccaattttagccgttagatgagtatggaaaaaaatctgtgagtgtcgtttgttttacta

SEQ ID NO: 43759 - DNA, 1795 bp, Homo sapiens
tcctgcttgttaaaacttaatcatgaagtattttttgtattccgaatggtcttcatagtgtttctaacaagtgcatactttgccaaatggacagactgtcattatcctgttctgtgttcagatggagaacttaggcatttgttttgtttttcgtttgtttttactgtccagtttagaacttgtggttgagccgtggattgctggactctggccagccctcagaaagcattttaggtcaagcagaggacaagaggagataagtggcgcactcccggtggcatcacctgcatcctcgaggacagaccttgtgaagtcagagctgctacacattgaatctcaagtcgagcttctgagattcgatgattcaggaagaaaggattctgaggttttgaagcaaaatgcagtgaacagcaaccaatccaatgttgtaattgaagactttgagtcctcacttacccgttcggtacccccactctcacaagcctctctgaatattcctggtttacccccagaatatttacaggtacatctgcaggagtctcttggccaggtaaggaagtttttctttatgctatagatgctatttaatcatggatgtttgctttgggcttttaaattattattacattagaagagaggtcaacaaactatggcttactggcccaatgtggcccagagcctttcttttgtaaatagattttactggaacacagccatgcctattcatttaggtagtgtctatgacagcttttgagctgcaatagcagagttagtggttaccacaggggcctgcaatgcctaaggcatttggccccttccagtaaaagttttcccacccaggtattacaaaaggtcttgtattattacttctgtatttgaagaagtagataagaactcagtttcatcattattttggagaactaacaacttggtttctcattttagatgagtcaaacagagatgagttgtgtgggcagtgagttgagtatcacattgcataatagctaatttctccccacaggcagtgtatggtaccctgaagtttttctaacctgcttaaaataagtttccagagcaggcagtctttgaatgcagggctaagccctctttctgttgagtggctgtttggagttccacatggacttttcttacaaaaaccacacccttactgcagctattaccagttttaatttcttgttttttttaatgaagacagatttagacatttaagaaataatttggatgcagcatctttcttgtatattagcactgtttgtaaacacctggtatgatagcaattttttttagcatcttttataatgtctttctaaagctttcatgtaagtatgattttgtgtataaacaactatgggctattgtttttgcacttgtacttcattattttgtgaattgtttaagtgagataattgcagtaagtgtatctcagtctggtttgggaacagacacaacttatgcctggactggtgggagcagagtgcagtgttgcaccacagacaggatcagttcatggcagcggggatagagattaatcattaatctgactaggagttttaaattagccggaagatctgttaagagtttatgggttttttccgggaggcggaggttgcagtgagccaagattgcgccactgcactccagcctgagcgacagagtaagactccgtctcaaaaaaaaaaaaaaaaaaaaaaagtttctgggttttttcttaatagaaagtgtcattaaataggcttgagttgttaataatgtagttaaaagatttaacaaatct

SEQ ID NO: 43760 - DNA, 657 bp, Homo sapiens
atttgcatttaaatttttgttttctattgaaatgagggcttaaatagggctttttcttagtctaaatagggctttttctttgtcttacttttactagttattaactacgtagcacattccacagtgatggaggtgactgcagttgaccttgtgttacccagctacacattgctgctccttctttaattggtgacagaaagctaatgagagcgtaggattccccccaaccaccacttgccacttcctacagttgttaagatctactttgtgtaatactacataactatttattgctgtaacagaaagcttcaggaaaaatggaagggttttggtaggtaataatcaattattatgtgaacttggaggtagaataatccactagatgtcagtattgtaccaggaactgtttttttaaaactacttgtaactgatttcttctaaccagctcccggaagtggccattaatggatacaatttttcaaatgtgccttgccacacttgtattgtcagtgagcataaagagtgttgtaattaggccgccatctccccagtgtggttttcgtgtcgttttattaatgtgtttattgcatttctagtcttgggtgagtaaagtactttagagagaggctcagctctctaaataaatatatgtatatt

SEQ ID NO: 43761 - DNA, 2138 bp, Homo sapiens
ctcaccctgaactatggtggctgtagtgaaaagaaccatggacagacacaagtatgacttgtgaacatgattcataaagcacccagagccccagtgtggcaacaccagatgaatgaaaaaggttctaccatgttatcaaaatcatgtcattctcactttccctcaacagtacctaaattttaaaaagaatataagcataatgatgaaatactacaaaagtatcaattgagatcacactgcactcaatgaaaattatccatgtttatgaaaataaagatctgtatccaaaaaaatagcaaagtgtccacaataaattataaacaccaggacatcagggacattgatctctatatcccaaagcctagaaaagtgcccagcacctaataacaatactaacttttgaacatttcaccacgtgccaggcacagttctgatatgctccatgtttcaacttaaggcttacaggccaggcttacaggccaccagtgaatctataaagtttcagtttatatatgagaactgaagcacgggattagataatattccgagacaacacaaattagtagcagatgggttaaactcaggccgcgcatgtctagaatatgcacacttacatgcttgttgaaaaaactgtgttgattagtatcaaactagctttagaaaatagaagttaaaaaaggcaatagactttggcaaattatttgagtaaaacgtcaaatgtcagatatgtcgaggcatgggtagccttctaaggggtcacgtctatggaaggaaaaagtttggcttaacaaataggaaagtgagaaaaagaatgaaacagtaaaataacaggatctcgtgatggggaaaaggcggcctgcccagacctaaacgcctcgcggcctcgcaggcgacgcggggatgactcagcaggacagaagggagggaagctccagacgccacggccctcttcgagatgaaagtacctcccatcctaagggactggcgttccaggaacagctgcgctggctgagccggctcagtgaggcggagcggccaagccttcagtccactcccactccccgatgaaaaacccaagaccgggtagcgcagcccctccgcgcacgcgtaacacgaggagacaccgcccacacgccagacgcgctgtgattggccccagctaccctcggaccgagattcctattggtcccaggtgtcgagcatgcgcactttggtcgtgggcgcgtgtgtggaatgggaggaggtcgcgctgtccatgggcgtccttggcctgcgccacccaggtgagcgctccggaggctgcgatccccgggtcccgaccgcccgcctagcactggcctgatggggaagcgtcccgggactggaagggcagccggcttgcgcgcgtggttcccacgcccctcgggctcgggggatcgctccgggtgctggctgcgggctcggcggggaggaccccgggagcgcgtccctgggccccacgtcggcctctgcgcgggcaagcccctgggctctttggctctagacgctttccaggcctggggaaaccgcatgcgtggacgtgggaaacggggcgcgtgacggggaggggcgcgccccgggggcctgtggtcgttccgagcttccacctggcccgacgcaggcatgtgccctgcccgccgcgtcgtccctgggcctgcgggggctggggcctcagctgagagtcctgggaaggtggtgctggattgtggctctgtcgcggggatgaggggttgatctgggaagccctcaggatgtgtgtgtggctcctggaaggtgacgcacattgttagcttcagtaaggttttcaacaccatgtttccgcagaacttggtcataataactatatcgccttctaatagtgcttttggggagttactcattttaacagctactacgtgttgaatgtcctcttgtttgccaggtgcagttctcatccctaggggtggagagttgaagaagatatattcagttattttcttttttaatgcttgagctaacaatgattttatcctttgctttcttaaaggtttaatttgctcttaggtggacagaaaagcataaactgaattttaactacaagttggtcacagttgaaaagcctcatgtgtggtttgagtttt

SEQ ID NO: 43762 - DNA, 726 bp, Homo sapiens
gtaggaataagtttttaccatgttggccaggctggtctcaaactcctgaccacaagtgatctatccaactctacctcctaaagtgctgggattacaagtgtgagcctccatgcccggctgatttattttcatatttaattttaatgaggaaacatatttttaaataaaatacagtgtccatttgtaattgtccactatgaacccaacagggttaaagaagagtaaattcacaggggagagtatcctgagtgagacaggaatcggcctctaactggcttcctggtgactgtgcagctcagcattcacacccctagcacttccaaccctccctgctgggtcatgcccgatcatatgtttaggaatttcccaggcaggggaagcaccactcagccctgactcacccactgcctagtgcaaggtgacatgggccactctgaataactccacaacactctgcagaatcttggcttttaaaacgaaaatgaggacagggttatttcaacatattaaagttatgtatacatggtattggcttgaccaccaaatcaactaaaatgagagcaaccaacagatcatgttaatagagtgtctctgagatgagtggtgaccctttgtacttgtgcactaggacaacatccaagtgtctgcaggaatctgcacatcctacccatggcaacaaggatagggtctggagcccagggagacaagggtgggtggagggaccct

SEQ ID NO: 43763 - DNA, 932 bp, Homo sapiens
acctttcaaattctggaataaaaagacttccttctccaacggatggcgtctctcatcagcctcatgcagttcccttcctgacctgtttatctggtcactttgcccagcagcagggaaagctgtttgtgtgtgtgtgtgtgtgtgtgtgtgtgtgtgtgtgtgtgtgtgtgtgtgtgtgtgttttaacccagatatttgttttatttgtcatcctttaaaaaaatcaactcaaagtattttataaaaagtgactgtctgactcttcatattttcttttaatgtaaagtagattttaaattcaaagggtcaaagagaaaaatttgacatagcactgacatatgaaatcctgaagccataatttagaattcaggctctgagagaaagtcataaatgggagccctcagaaggtcagtgccctctgactaagtatggaaacagcaacattatttggttaagtaaatttgcattttgagctcagtccgggttctcaaaggggaagtggagataaaacaagaaagcttacatatattttctcttgctctgagacaataccacaagcatttctcatcaattttcttttcctgcatcaaaggaaaggtcaaactccaaaactgaaatacctaccttatatttctttgatttgataaatactgaataggaactaggctctattccaaggactttactaattcccattcatttaatcctcataaggtgaaggaaattcacaggtaaggaaaaccaggcacaacgaggacaagacccttccccaatgtcagccagctactaaatggggaagctggacttgaacctaaggctggctccaaatgcccggattttccccagtatggctccaaatgccaggatttccaatcctttgcaatatctgtgggtgaagtagacaggattctacttcaggagagcagacagta

SEQ ID NO: 43764 - DNA, 569 bp, Homo sapiens
agcatcttcttgatctcctcaatatctagtaaaaaccctgtacacaacaggcttctcttaaatgttcattgaaggttcactccgaattaaaaacatgcaaataaaaatacactgagatgccatttatgcactgagtttggtccaaatcccaaagcctgacggtgtactctgcaggaaaggcggcagagaaataggtattcatatccagggcaactagaatgcaaagtggtgcaacctctatgaaagagaattgggcaacatttacaaaacgacatatgcattcaccctttggcccagaaatcccaattcgaataatctctttcaacggtacacttgcaaaaatattacataatgtttacaggaggcattactcactgaaacactatccatggtcacaaatggcagaaaataacctaagcatctctcagtaaggtgtttttgattaggttagggctcatcacatagtggaagctatgtagctaccgaaaaaaaaaaaaaaaagaatgacatcaatctctacactcttctagagagtaggctccagcatatatcattaggttaaaataatg

SEQ ID NO: 43765 - DNA, 372 bp, Homo sapiens
catatttttctagtcatatcccaggtcgtgtgtgtgtatgaatgcatgcgtgagtgcgtgtatctcaatacagacctctcattctcccaataattgcatgacatagcccatttgttttaaacgagaaatgctcaagcttaagctgtactgtcgtcacactcactcctaaggaatgcagattaatagttgggattggccggatttcccttggtcacctgtcctaaccccttgcgcaaacacaggtctatatgtggaaaccctacaaatacctgcccatccctttttaacatttaaaatatttagttttaagaaggccacagccattgtcttttactaataaattgatgaatattatgctgcccaactttaaaa

SEQ ID NO: 43766 - DNA, 493 bp, Homo sapiens
aaagaaagaaagaaaaaaaagaagggagcaccattttctctttcgtccactgcaagatgtggagtctatgccaacacagaaaagcaatgctaccacagtgggaagaaaagacgatacccttctactgtcatcagtctggtcaacatcactgattacttcctgcttgtgaaatccaggaagcttatgtaactagatatctccatggcctttgtgaccactgacctttccttgaatatctcctgacatcctgtcttccctggattctgtaactccccaatctctctgtatttatttcacatctggcattctcctcgaatgaaagtacactccaacctcttctgaatgttcattgttttctccatctacacgttctcagaggcccttttcttcaaacccatgtgatttcacatggtctctaaaaactggtgactctcaaatctagatcctctccccaacctctgtatataatctagactcatacatcaaaataggg

SEQ ID NO: 43767 - DNA, 494 bp, Homo sapiens
aaattgtgtccttatttgctgtaaccacatgttcactacaattaactctatacatgtacacactacatgctggactcagatgtctaaaccatacttctttggcccatctatctctcttaatgtcaatctataaaggaggatccacagaacattcatgtaattactacaattaacaaggagatgcaagtcacggccagggactagtaagttctgctataaacacacaatcacagagcaataaaggattttggcagcttatctgctctttcatcacctctctggctcttgcaaaagtggagtgtctcaacctcaccaccaatttcacaagagatgctatgactttatctatgattcctccatgcaaatgtgactattctataggccctttgagctctttctggaatcacacagatgtgagtttgaaatatgccccactttccagctttgtgactttgaaagagttactaatcttcggtaattctcttttttcttct

SEQ ID NO: 43768 - DNA, 1723 bp, Homo sapiens
actgaattgctcacaaattacagaaattccctccatgatatgaaacaagctttccagtggattggcatctattgatttaactcctacatcgtgcttagtaggtgcaggcatggtactaagtattttatattatcagttgatttatcctcataacagcacaacacaacggttactattattatcctcatttttcatatgaagaaactgaggcaaagggacatcaagaaaggtgcacaagttcacagaactaaaatttgaatccaggcagcagtctcaccatgatctctgaaccactccaatgtgtagctactctacactgaaaacaatttcaaaacaaatttttagttattttttttttaaatgtcatagagtctaagagatagccagagatttttctaacaacagaatcctatttttaagagcctcaagcccagcctccctctcctctgagagcacgttgaagaaaatttgggcccattttaaacacagtttagacatcactgtttttacggcaaatatttgtttttcacagacatggaaactaagacctgagaaagggtagtcgtttacccaagtaacactgaattagttggcagcagagttgaaactaaaaccctggagtcccgatgccaactggatgattttcaattatcccttggccccctggctaatcattaaatagattttctacagaaaggtgcagtttcatatctaccaggtaagaaacatggttgatgacacatgaaaatgattcactagaaaagacaaaagataatcattcacccaaacacgcctcttgctaaatcttcagagtctaatatcgcacagtgcaatttgggattcaggctttacctctcatctaaggagtccaaagcccttctcaggcaaccctgggccactaagttactggccagttagcaacagagaaaccatgtaacaaaaattgtactcatctggtaggctgagttcatggccaagccagaaccaaaactccacctctctctgtacatccacctgtgatctggtgcatgcccccagccctgggctccccctcccgacccacacctgtgaggggacctttacctgcgtgtgctggaggctcctcagctgtttctccttctctgtaactgatttactggctgaccttcagaccatcttaagcctttccatgactaagtttctcctgtgcaaaattacacttctctctctgaggaggtgttgagaatgattaaatgaacctggccacagagcgagagctcgtcagacacgaggcattagatcggggggctgtgttgtccgcggggtgctttctggtgatcattcatgcagatacccaaatcaaagtctccaggtaaagaaaacgactttggaaaactctgtggttttaacaaacacataacaatgcccccacccccaccgttctctggtttcatattaagtaaatcttttactgagggttttttctatccaggcacaatggaaccctgataaaaaattttatgtatcttctatgaaaatacctataaaaataatttgatgggaaaaaatctcttttagcttctgttttaccatgagaatttctttttttagagacaattaaaagttaacacaaaagttttatttctcagtacctgtaatttgtttttattaaattaaagaaagagtatacataacagataagcattcacctatacctataataactgggaaaaaaatcatatga

SEQ ID NO: 43769 - DNA, 691 bp, Homo sapiens
ttagagatgtaagctcctggtctctctttgaagggtgtggtttcagtatctaaagtgattatcttacttaggttcatgaatcccataaaaatgcaggaattgtaaacatttaaagtgaaaatccttcctaggatgtctcatatcttagctataattgcaaccactccatattgtgtaaaattgtttacaaaaattcaaaaagccaaacaattaaacatattctaagtgtctctcaattgccatacaaatctataacgagggacaaagggaaggtgacatgactcagagtctcagcagtgagtcatcaatcatggcaaaataatcaccctcctgggtgaactctctttgtcaacagttggtctggaggaggaggcatacaggcatacaaaaatcagcaagttcttaaaagcatgcaaaaactgaattctctggacaaggtccagtgcaaataagttgggatgatcctcaggagcagaaaacaactctgtcaacaaggtgccacctccaggtcatcctctgtgctccgctcccttacagatggtgtacagggtcaattagtgtctgtcccctaaaagttcacgtccacttagaacctcagtgttatgttatcactatgttatagagcttttgcaaatagagttaaattaagatgaggtctaatatgctttaggttctgtgtccccacccaaat

SEQ ID NO: 43770 - DNA, 842 bp, Homo sapiens
ggggcgagcgggcgcggagagcgcggggcggagagcgctgggcggggagcgggggacagcctgggcccacccccgccccgccccgcccctgccccgcccccgccgccgcgccgcctcctcctcctcctcctccccgccggggtgaaactcgagcgccccacccgcgcctgacctccccgagcccctccccgggccccgccccttcccggtacaggacccccaccttcgctcctgggagccccgctgcaccccaggagttccattccagcctccccagtgcgagtgcggccgagcgctgacttttgggggctccctcccccgtctcactgggtccctctgcggctcccccgcccgctgtcccggttcagacgtggctgcaccccggaggggggcgccggccgagacctgagacgtggcgctccctctctgccggcctcggcttcaggtacgtgcggttccctcggctaaatctggcccgggggatggggggcaggggccgtctggtcctccggaactcgaactttgtgattttgttctttctgtgtgacatcctcatccgttctgagggagaaactccttaaagaagacgagagagtcagtcgttgcgggttcttggaggagcactttgggggtgagactcccggctagttcgggtcgatttcagcgggattaagtcaaggaaatgaacaaatctgacgaatcagggaggccagagaaggcgtccccaggtagccacgctgagcgttaagagagaagtcccgtatggtcaaagtcattcgtccaattctgtgtcaattattccttgttgcacttttgcaggatccttgggccttactaagtac

SEQ ID NO: 43771 - DNA, 2374 bp, Homo sapiens
ttgtctcaaaaaaaaaaaaaaaaaaaaagagtgtgggacccattgcatcaggctgtgtaactgtttcttactagctgtataccagtggcaagttactgaaccatttgtgcaaaatgttaatttatttaccaacactgtgttcagcttgccaggcaccgttctccttgaatctcacagcagccctgtgagtaggcactactgttaccaccgtcactttgcagacagggaacccgagggacaaagaagttaagggatttcctcaaagccacagctaggaagagcggcagaactgcgattccaatccatcagtgtgcctccactatccctattccttaagatcgtgccaaaggctgagtcacttgcactaagtagcctagaacagtctctggggaaacgcgcccgccgacaaggatcgccagaaccggcgcgggcaccgcgcggcgaccaggagctctggtcaccgaaggccaggctggaggccagagcagccgcccgcacccggtcaccgcctcgacagtggagacctcagctgaccgcgagcccccggcccgcccgcaccccttctcatgcccccaggaacccgccaagccgctccagcctcacctcctcctccctccatcgcgagatttccaacagcgtttttaaaaaaaaaaaaaaaaaaaaaaaaaaaaaaaaaaaaaccggaaatgggtcctaccatcttctcggagccggagtgcgaagaaataaagaaatagtgctttaagtcaatgaattcctccttgggacccactatcgagaaactatcagtggtaacgttttaaaaaatgacaaattcaatctgctcttgacttgtgtgtcctaagatttccactaagtgtcttcaaacctccccctccccggcttcctggataatagaagttcccgaaggccgccgattccagaagatactgtctggcgtgaaattagtctcagtagaaacataagtcccgcgcgtcttgtgctgcgcgtgcgcaagcttttgggccctcccgagaaagggaagtgcattctcgcttccgtagcggtctccgccggttggggggaagtaattccggttgttgcaccatggcgtccatggggaccctcgccttcgatgaatatgggcgccctttcctcatcatcaaggatcaggaccgcaagtcccgtcttatgggacttgaggccctcaaggtaatggcacagggacctgctcgcggtgggctaaggggaggtggccgaggccgtggctctgcgcctgcgcgagttgaggagcggctctgccatgtgctccccggaaaggtcgagaatctccgtctccctgcggtctccggccgctcagcccgcttactgagctcgggagacgccggcgcctaatcctgggctcggaatgtgggggccagccaggctgggccgccagcgcccttcggagctgggtggggccgctcagtccggtcgcccgcgggagcaaagcgggaccgcctccccgcccggctcctccagcctgacggccgcgtgggactgcgctccagtgggagggcgccggggagatgctctgtcacctgtcggttaaggcgctgctgcttaacctttcgctggtccacccgcaacggcccttccgttttctttgtcactcgtaaaggtgtggtcacttaacagggtatttcatttctgagtgcttttttgcccacccttgaggaaaaatagcgaagagtgaaaaacggacgcacataaccgtaatacaaggtggtgtgcagtgagaaggacagctacggagagggtgcacataagcgtggtgctggaggacagctttagatcggggtgagaggtagcattctagggagaggaaacggtagaagtaaaggcttgggcaagaatgcgcatggcacgttgtagaatggaagagccatccggttttaatggagcactgacttctttaacttacaatagttcccgaaggtggaagctattgaatgcccaacatggaaaatacgacgttatctttggggaagaaggggagccattgagggggttttgagcagaatttcagtagagctgcacttcaggcagcaaagcttgagatagaccgaagggaataaggaagaccagaggggttaaagaaaccagggcaggggtgcaggtaagaaacatctgagcaccagacgttgacagaaaatgcagaggaagggacactccgagagggccttcagggtttgttataaagtgaattcataatagaccattccactaggtctctcaggtgtccctgttcacttagtgtcttggaggtttacttacgcaaagttagaaacaatacagttcccctatggactctttgtttgacttagtgctagttacacaacctcgcggaacctcc

SEQ ID NO: 43772 - DNA, 1169 bp, Homo sapiens
aaaaataaagccataagagctgctgtattttgagacatctctcacatgtatgtataccctctgcctgtattctgtggtgacattataatattctgatagatacaaaaataaagacagcctgttcttacaattctttgtgagctgacttttcaaagtatgtgatacagttgtgttttcacggtgccgctgggttgttttgtttcgccaagtgcactcaccatacttctgtacctttccagtgccccaccttagaacagtatgccatgagagcgtttgccgacgcactggaggtcatccccatggccctctctgaaaacagtggcatgaatcccatccagactatgaccgaagtccgagccagacaggtgaaggagatgaaccctgctcttggcatcgactgtttgcacaaggggacaaatggtgaggagctgtcacgcctctgcgtggagggggggggatgtctgatttaaactgaataatcatccactgtatgtgctgtgagatgatggtgtctttttaaatatgtaagcccacttcaggtgttcaagtcctgaattttagaatgtttgattgccgtaggaattggttagactactagacctagcaacatgagactcattgtaataacagtaaagtgcatatggtactatcaccaaagatgacttaggttttaatctctggtttttgggaagtaatgccttattgctgtttttacacagatgtctgtcagtgggcagcatatatataacagctctgaagtgggctttagttcacagttcactgtgtggttaatcctgcacactgtggagtgttttctaaatgtaatatataacctctgtagccacttgtgtagctcggctcccaaaaagatatggtggctgtagcttgttgaaacagtggtctcaggcatttctgtactaaatcaggccatgtctgtaatccatccacagaatgacagcttttgcttaaaggtataggtacattctgctttccatgctcaaattccaagggtttcaatagtagcaactctttgtgaggcaaacatttaatgtttctaacttgaatgcctggttgtgctcaaatttagcatttctagggccgggcgcagtgactcatgtctgtaatcccagcactttaggaggccaagccgggtggatcacctgaggtca

SEQ ID NO: 43773 - DNA, 2743 bp, Homo sapiens
tctctagattttctaaaataatgtttcttagcattgtgatgataaagctcatgatgaactttatcactagttatgccaccttaactagtcagatttcctagaattaggaaatggtgactcttgtctaaatttggttaagtgatgaatttgggttaccgtctcatgtgaacctggagattcaccagtcttaacttttgggtcattgtgttttctctacattcatgcattggatgttttgctaaataactcctgtggatttaggaatgtgtgctaatagcaatcttcctaattttcatgtttatatggaactatgcagttgagtattgaaagctttaaactgagtttatttacaaggactgagtctagcctacagagaacatacagcagccttctttggaccacagtcttatccgaggggtctgtggttgtatcagaagagccactaaaccaatccccctttccaaaattgaacctcacagacgttcctgttttttgtgattgagaaactggtcaatgaacaggaagacttagagatgtttcacaagcctttgatttttgtttcatttatttgtaataaacctcttccacgtgatgtcttttatttttcacgttccagatcactcaagttttattttgctggtactttggccacaccctctccttccccatgtggagcaaaagcaacttagggtgcttgacccaaaggctagattcccatgtaagtccccatgtattactgctggttcccgatttctacacctgctagattcattggaggtttgttaaatgtcctgtttttaatttcagcctactcaatttctatgtgggggcagttccaggatgtcctgtaggtgccagatttcatggacgctcaagtccctgataaaaatcgtggtatttgcatataacatacatcctcctgtatactttaaatcatctctattattcataatatctaatataaatgatatgtaagtgtcatactgtatttagggagtaatgacaagaaaaaatctacatgttcagtacagatgcaatttttttctctgaatgttctcaacctgaggttggttgaattcagatgagggtcaactctgcaagcagccgctgtgaggcacaaatgtcacagggagggctaagaggcccatctctctgttacattggactgaatttcttgactctcattttctttctctaggtgaaacagctccaacagattgagggttggggggtgtggccagaggaaggtgacacggtagtaactgactaatcagtaatttgtaagcatggagaagtttctccaacctaggtgttccttgcaggcagtcttggcagaatggggtcatctaaaagcaccagaaaagtggggaccaaaggcaaatggccgagaaagtgttgaagggcaggaaaagtggggaaaacacgacaaggtagtaaaaatataaatgtgtgtgccctatcactgctctaaatggtttatgtacattaaaactggttttcaaagtctgctccatggatccctcggggtcctgggtctttccaaggggcctatgagtcaaatgtattttcctacactgaagttactgcccttttcactgtgttgacttttgcactgatggtgcaaaagcagtgaccattaaaaccacaccttagtgtgagtcaggtagtggcaccatacactttcaaaaagaaaatcatctttttggccaggtgcagtggctcgcacctgtaatcccagcactttgggaggctgaggcaagaggagtcgctctagcccaggagtcagagaccagcctgggcaacatacaccctgtctctaccaaaaataagttagttgggcctgatggcatgcttatatggtcccagctacttgggaggctgaagtgggaagatccttttgagcccaggaggttgagggtgcagtgagccatggtcacaccactgcaatccagcctggatgacagagcgagactctttctcaataataaagtatgaatctttgacattgcataatgaaatgtgtcaacaaccggaagatctgctcactagaccaatatttgccaaatatgcatatgatgttacagcatcatgcataggtaccagaccttttcaagatgcaagatggaccagtgtgacagaagaaagtgtattcagtctatcacttgttgggttttggtgcaatatcgaagaatatccagttttgtgaaaggcaattaaaatacttctcccttgtccaactacatatctgtgtgtggccagatcttcatattccagaacatgctgtggccagacacagtggttcatgcctgtaacccaagcactttgggaggctgaggcaggagtatcgcttgagcctaggagttcgagaccagcctgggcaacaaagtgagactctgtctctacacaaaaaaaattgtttaattagcagggcatggtgatgtgtgcctgcagtcttacctacttgggaagctgagaaaggaggatccctcgagcccagggggttaagctgcagtgagccatgaccatgctgttactggcgttgaatctgcacaggtctgcaacagcctcaattctcgcctcctcagaagaaagaattcggctgaggggcataacgcaggagagaccaaggcaagttttagagcaggagtgaaagtttgttagaaagctttaggccaggcgcggtggctcacgcctgtaatcctagcactttgggaggccaaggtgggcagatcacttgaggtca

SEQ ID NO: 43774 - DNA, 853 bp, Homo sapiens
tgtggaccccaccctgcatagaaaccactcgtgctgcaatcactgtgtccttctgctgcaaatccctggggtgctctctgagttggagtcctctttctcacacacacaaccttttcctgtcttttttttaaaaaaattctcttcctttgtgaagctcctctggtgactttcctggagctctgccctctagttgctcctacatccctggctgctccccacctctggccgtccccctctgcggttgccacttaatatgcattcagggagaactaccctgggtccaccagcatttactcaagggtgaggcatgctgatgacacttcacctactgttaccagtgtgaatctgaagggtctacatcaaatcaaatccttgcctcctcgaatgaaagaattcagctgcgggtcgtaaggcagagggacagactgaggcaagttttaaaggaggagtgagagtttatcaaaaagttttagagcaagaacgaaaggaagcaaagtacacttggaagagggccaagtgccctgtttggtctgtgacttggggttttatacgctggcatggttccgaggtttgcatttcttttcccttccaagggaaaactcccaccaagtctctcccatgacacgtggggattatgggaactacaattcaagatgagatttgagtgaggacacagccaaaccacatcagtcaggctcacatctctgcttcctgttactgtgctccttccctctccagaggggccgaactttaatctttctaaaatgcaaataccattgataagttctgctgctctcatctaaaggcctgaaaagcacatccccaccttgggactcagaggggccagccctac

SEQ ID NO: 43775 - DNA, 2278 bp, Homo sapiens
tctccagcctgggctccaacagagcaaaaacaaaaaaaaattttttctcctttgtgccaggggaaggattccattggccatggagaagtcctaccccaaggtaaggagtagtgtctgaaaggtgaagcccacccagctctcacctccctgggccacaacgtgcacatggccacgtctgcggataactcacctatcgatcttctgggcatttcttgttttcagccactcagggaagatagaccagtcgccagaggggtcccaaggctcttgccctacaaagaagtctggaacaatggttctgcaaaatatggacatgaattgatcttagtttcagagttgcttgactcagtattttgcttgcatttatttaaaaacttgctacgttggcgattctggctcagagaaaaggaaaagtagtgggtgtgaaggccaattttgatcgcagcaaagcagccacctggcaccgggccaagccctcttaggtttcacaaccgcaggtgcacagcgtctggcagcctgctggtaacccagccctggcaatgaggctatccacagggcacactcccatgggataggctggcatgggatgtggaggcacctgggggagtgggcctgacgtgggtggctttgagggcccctcctgcccctctcagccagcctggggagactcctggcctttcacatgagcctcaggccagagggcacacctggctaacttgtccagtcactatgaccaggcaatgttcccagcctccaccaagacggcgacgaagcacagtttcctatccagagggtatgttctaagacgggcagcagagcacaaacaagcctggccccagtccaggtcgctcttccatgcaagtcaacccagagggatagagccagccgctggggttgagtcctgtttcccaaaatagaattgccacctggttggaggaacagggctcctcctataggggtagaagaacactgaaactggagtgagaaaatccaagttcgaggctcggtacaccccatgctgctgtgtggccttggccttcacaagtcatgtcaccgcttctagcctcattttctcatctgacaaacttgcactgcctaaccccagaggatcctctcgagggcaaaaaaagttgtatacctgtgaaagggctttgtaaaacaggggtctttccttatcttttatgtcctgacccctgctaaaggaccctccgtgaaacaacagaaacagcaatgccatttgatcggctgcttgggccagtgatctggggcagccgcaaagcgctctctttatggcctggtttcctaatctgcaaaatgagagcaataacagctcctccctcaaggggctgccaggaggactaagggcaatgagcccagtcatgccctcagcactgcgtctggctgagcaactgaaactagctatttatttacttatttatttttactgggcttgcccctagaaagttaagtcccctcacatggggacgtgaaaaaggaaaacttcaaggaaggtcttttcattcagcaccgactctgcatcccaccagggtgggcatgattcctttaagccagtttctcttcctagaaaaacaaggtaggctcatcctcgggtttccagcttctccttctgtgaaaacaaaggaaatccagccgtgcaccatcctcagggctcactgggttgatgctttccgacgctggagaggaaggaaggttctggccctcctctgcgctttacaccggggcaaataagaagcaatcgggtatcagccttggccaaaggtggccatggccacttggccagacaaagaggtaaacttggggaggggagcaaggtctcactgtgccacttctgaaccccagtctaattcagagggggccacgaccgtacgtgtatggaccaggaggagccttggacaccctgccgtccaaatgggccgtgaaatctgacacgaggctgagctgttgaaggaccgagtcacgggtccatttgacagcaggtgaggctggcctcagatgtccagtgcctgcgtctggctgaggccccacacgggaaaagaattctcaatgtccagcaagtctaaaggccaggtactcccaggaggacaggaaacccaggaatggggttaggagcaccaggtgggtgtttaatttcccaagacatttcccatctatcttcacggcagtgagatagggaagtttctaatgtacagtagatactgtatagtcagaccgctgtggttttattttttaaagggaacaaaataaaccactgaaattt

SEQ ID NO: 43776 - DNA, 1564 bp, Homo sapiens
agcccacaatggccctcttagacatgccaacgacgcccctgcagaatctgctttttctctggctgttcctaggcctggatagggttcccaggcctggacaggattccccggataccggcgaggctcattactaaccactttattttaaatgggctttgaaaacaacaggtggcatcttccatcagcaagtggacataaatctcagtgcccagtgtttccaaggcctgcccgacccacatggctgtggggtgtaaactgtccagtcgttcctggcacacctacccagcatttaggatgtcccactcttagatccatagacccagcacctctcttcttaatacccaccctaaagaaaagctgtcgaatgtggatgctgatttagttgcaaatatgctcagttttttaatagttttatattagtaaaaacgctacaaccagaatgtctcactgcaggaagagagttacaaggagtatttaacggcatggtggaaaggctcctccgtgctaaatggccaaaacgaacgcaagtttgcatacggtgtgatttccactatgtctttaaaatgcatggcgaaacacctacaggaaaataccaaaatgtaaacagcggctgcttcggacgcatgggatcgtggaggctgctgttctgcaaggacaacgtatcacttttatgaaagtcagcttctgaaaacggactatgggaagttccttacccgtgcacgcggcaaagaccttctttgccatagtcagaacacacgcgggagttcagaggagcggggcccgggcttgtgtgggcttgtgtgccccggggacgcgcacgtaccttgtcccgcggcctgagactgcgctgcaccgcgcggaggccgaacccagaggaggcggcgtggcgccgggcggggacgcgagagggacgtggacgcggcgaccgaggacgcggggatcctgcgggaccagtggctccagtcgtagcctcctgggagagccaagcccggagggggcggagaggtggaggagggaggcctgggggaagagaaatctgcaaagtcggggaagggaaggaaggccaggagggagggaggcgcagtggggaggagacgagagaagggagggagggaagtgtgaggggaggggaagaagtggggtggtcggagggtggggtagggaggaagagggagggagagatgggagaggctccaagataaagaaaggtgcagggagagggggtgggagggagggaaccgcagagaggaagggagaagagaatcaggcagccttgagggaggaggcagggaggccaggagaaggaagacagccagccttctgtgagatttacgtgcgtgcctggcttccaagacaagtaacttctgttgtaaatacaaattaagctattttttgtttattttattttattttattttattttattttattttattttagagatagggtcttattctgtcacccaggctggagtgcagtgacacaatcatagatcactggagcctcgaactcctggcttcaagtgatcctccccttcagcctcccaaagtgctgggattacagg

SEQ ID NO: 43777 - DNA, 1038 bp, Homo sapiens
aattaagtttttgtttgtttgtttgtttttgtttttgtagagacgggctttcgccctgttgcccaggctgaagaaaaattcttgtttccatcctacaatgcgcaaattgcttgtgacacctaaaaggacaatttttcaacttcaccaattttagtgccaaactccatggaaaattaatcacacaagtgattatttaacctaggttcttaaaaaaattaagtttccttcttacagaaactctcagcagaaatgaactctaagatttcatggagttccctataaattaaagagctatgactcagcgtttgctgctcgttacccctccaaagttatctttatttttcattataaaataggtaactaaattccagggacagaatgagtccaagctgaattaacaaacagggcaaggtcaaagttaaacaaaattgctgactctgctcaaactcctgtgatttacactgaccttgaaggcaaggccaggaaaagtattccttggaattgctcctctaaagacgcttggaacaaaatcagaaaaagtgctgctgtgtttcagaacatctcaaaataatacctgagggcaaacatattctatgtcatctgttaccatttcctggccgtgctgctgactcagcctccagcactccttggtggagctgcagggagcccgctgggaaagcgctgaatcctgtgcacaggaaaggcactgctggtgaagacaggtgagaggctgggtaggtgatttctagaaggttcttgagcaccagtcggccatcttgtcatccccagatagaaagcttaaatttgctttttttttcactttttattaatgaaaatgtacaaacatatagaaaggtagaaagaagaatacaattaattcccatataccccaggcctaaatataattatctttagtattttgctaaacttgcttcatcgatttttttttcaaaagtgtagaaattatagacaacttgacattttaccccttaataattttgtagtagtcagcctccaagatgactcataacgtgccct

SEQ ID NO: 43778 - DNA, 842 bp, Homo sapiens
gttaaagcatttaagggctgtatatgccctgggggctgtcaatgtcatagacactgtcatttctctctccctgcacaaaaataactaaaatgatgaatccggctggctctcccctctccctcgctatcctccaccttttatgcagtcctgcggacattctgatctgtttcctcctccccatcctccccttccctcccaagtatactctcagctcttcgtggtctctctctcccaactgcagcctcccccaagactccatcttcaggcctccttccctcaccatctccaaggctgcggctccaggacacaagctgaccaccctgcccaacccgaagtcctcgactgatgctcagcgcttataggttcaagtccaggctccctagcatagcactgaagtcatggctcagtttacccttccaagcctgtctcccccaagtcctgccctcctcctctcatcactgccaagtacatcaagcactcccacgtggctgggctttaacccaagctgctctctcttcccagaaggctcttctctgacttgctgccaaaacacaaagtcgcttggaggtgaaggcaaatattagttcagctggcaagctcctctccacgtcctcatcaaagcccccagctccatgagcttctgggctgttcctgtggatttctgcactctctgtgttgaaacatctgtaatgggttatagctgggagttggaatgtctgcctcccttttcgctgagaagaagggggtctttacaggatcgaacgctccctgggttctgtctccttcctttcaatatagtgagcagttcctcccacctagtgggttctccttagatgtctggg

SEQ ID NO: 43779 - DNA, 1542 bp, Homo sapiens
cagcctcccaaagtgctgggcttacaggcgttagccaccgcgccccaccgtatcttttcggttctaagcacaagacaattgtcttgggaacacctcccggctcttggcctcagtatgttttctttagccctacgtttcccctttgctctctccccgcgtgtgatgggggctgcctgggtggggctgtcacagcggcaggtgggtgaggagcccctaggcgcgtccggaggaaggctcacccggaggccgcctgcaggcggccaggtgccagccactgcgggcctctggggccgaagccggcggatggtgagacgctggttggtctgcaacactgcccagaccccgggcactcatgtctagaaaaaagctgactcgtgacaccaaaggagctctttcaagcttcctgcacgctcttagcgccagagcaccccagccgtcctgggagcccccgaagccaagcatattcgaactccgaatccgctcgatcgccggggacctgccatctgggttcggttccccaaggtcgctgccgaccttagaccgcgggggtgtggggcgccggggaaggagacagaaggacaggcgccgcccagggccgcggggacacttggggctgcgtcctgggtgggcgcgatgctcccccagaacgactggagatggagagtgtcggggagggaaacgggacccacgaattcagggcgctgagtcggcggaatgcgccctgactccccctggccgagagccggctcagaatgaaagagcgcggagtgggaggtctgggaaatggcagtatttgtattagggagagaaggaaacaggagtgggagccgcacggcttggggaacgcgggagatcgcggattgcggggatagcgcagcgcggctgcccggggctgctgggaggggccggacgaggccagggcgagcggggtaactgcggccggccggacggcggcggtaaccggctgcaccgaggtggttccaccaccgcgctgggcgcttgcggttcgtctgctccaacgaaagccgcgtcccacgctccctgccgccgcgtggttttgcctcctcagaggggcagcggcgacccaggggctggcggtggatgtcaggagtgcgctttccttctaggccttctccctcatgactggttttgtttttagattacaaaaataacttatattatttaattaaaaatacataaaatatattgtgatagcgcagaataatggccctccaagaatgtccacggcctaatgtctagaaactgttatatggcaaaataaatacataaataaggtggaaggcctttgcagatgtgatcaagctaaggatttttttatttttatttgatattgattgattgattgattgagacagtcttcctctgtctcccaggctgaagtgcagtggcgcgatcccggctcactgtaacctccgcctcctgggttcaagcgattttcctgcctcagcctcccgagtagctgggattacaggctcctgccatcacgcctggctaattctcgtattttagtagagacagggg

SEQ ID NO: 43780 - DNA, 3006 bp, Homo sapiens
taacgcctaaagtctgaatgcgaaaaggttagggcaattccagaaggaattactatgcagaagggaaaactggttgacaggttaactttcctttgaacatcacaagggaaggcacctaaatacaaaaggaaggcttcctccacgccccccatacacacacattcccttcatcctaacctggctctgcagctccgagggtcacatacctgcccttggcactactagtacttcctccagcaagtctcagtctttctttcagaatccttcgcccttatgccatgtaacatctgatcggcccggtctttgcccctagtatcagcaggccaatacgtgctctgctacaggtcttacagggagggtgagctcttggagttggatcagaaggagaggggctggggaaagatcgtcttcaaattgtttctttggcggtagtatatataaacatatttaggcagggcatagtggcacatgtctgtaaccccagcactttgggaggccgaagcgtgaggatcgcttaaagacaggagttgaaaatcatactggtcaatatagtgagattgcagtgagccattatcgcgccactgcattcctgcctgggtgacagtgcgagaccccttctcaaaaaaaaaaaaaaaaaaagaaagaaaaaaatcataagcaaacaacaacaaaaaaacaaatataaagaatggcggtctgcttaattctccgtgccagcccttgaaatcagtgggtattattatgtagagtttgagttctttcctcccttgagtaacatgagtgacatcagtaacattagtcaagcgctgctctttttgaaagactgtatttcattatttttattctaaaccttactctgtttgatgaagattgggggaagagccctcccaattccaccgctcacacataacagcggttgctagcattctttatttgtgctaggtcatctgcatattgtttaaacatttttcgaggctggaaagactgctcccactcaggcaattctgacgtggcggcccttctaatttatattctctaaataattcttcatttagagaaaacagtcagggattacagtgagggagggtgacgtgctgacggggacagagcttggcttttgatcattctccccttagctctgcccaggcaagcgtccctaactcagggtatcggaaccgatctcccttagaggattatgtttcaaccaccagcctcagcggtttactcaaatgtccttccagccaaatgcagaagtctccctgggagtaattttggtgaagtcagcttttgcctttttcatcacaggcaggctttagtagttcctcaaaacgtgcaccacaactgcccggctgccaaacagaaatgctgatgcctgggcccactctagccatttggcctcggcatcacggtgcgggagcgtggggcgcagactcgcattgtcacaggaacctcccggccttccgaagagccccgcgccggggcctttgtctcgcacgtcggctggggcgggagctaggttctcgcagcctcctcccaccgctctgcgccttctttgtccctccagaagccgccatcaaagctcagctcctgattaggtttcggccccgctggccggcgcagtctcggcgactaccccaggcggcctggcgcacgcgaggattcgccgcgccccagatgcaggtgcctcccctccttagccgccgaccgacagtgcacgccgcggccgccggaagtgacagcgcctgtcgttggggagctcccgccccttccgcctcggcgccccgcccaggcctcgcccctaggtgttcccgcccctccccctcccgtgtcgctcgctttctgtcagcctctctccctctccctctcccctctccttcctctcgcttcctctctcgcacctgagcgtacgcacctgcccgggcccggctccctcctcctctcccctccctctttccccgcccggccgcgggagcctcgtggctgcgtcaccgccgcccccccagacaagatggacaccgcggaggaaggtaagtcggcgacgcgcggcgcccgagcccttgcgtcggcgcccgggttcgtaccccggccaggtccgcggcgctcgaggtgggctgctggatcgcggcggggcggacgcctgggccgtttgtccacccgctgggcctctgggccggggagcggaaggtgaccctctgcgcgccccccgccgtttcccgcccgcgccgccgaggggggcggggaccctgccgggcaggggccggggccggggtcggggcctcggggctactgcaggccggcgtggcctcccttgtccccgccgtcgcgcgctggcccagaaaagggggcctctgtcgctgccgtccgggggcgttttccgcacccttcccccactgggttttgtctttctttacgtccttctgcctattgctcgccaggccctaccccctcgcgacagaacttctttgttgactttgaaacttcgcgaaaaataccccgccagatgacggccgagtggagtgagctgacccctgttgaaaagcctggtcctcggcttgcctgccgctcgagaatctgtttactaaacggggaggctcttttgttgcgatccatttggttttaaatccttgacacctataagcagggttctgtttgttttgttttgcgattgcttgtgttttggatacggttacattgaacaaactgacccttgtaaaatgaatacttaagatataaacgtccacaccttatgtctcttcaaacgcattttcttacccactgaaggtagtagattatttttaaccagctgtgtttttaaatgagtggtgagtttatagaggaaattactaaattttgctttttttgatgttccggttatcgtgcaaatgcttttctactttaggtatatttatgggggtatgagcgtctttcaaccttatgggttgcgattttggcgattttaaacgaaaatgaattatcaaacgccgtcatggagtgcaataatgagtg

SEQ ID NO: 43781 - DNA, 316 bp, Homo sapiens
aggaagtccggttgctgttctggagctgagacagagcccagagccttctgtgtgaacagggagagagccaggacagagcccggacagagccctcccttctgctcggtgggcaggcattggcagacacccagggcttccttgtaggcatgcaggccgttggctgccagccctgccctctgcaggcagcacctctggctggtggcagagttcattcagcccctgggcacgtccccgggtgtgtctccgggccagatggggctgcacagttctgcattagcttaggaagttggttttcaagacattgatgcttcctttt

SEQ ID NO: 43782 - DNA, 795 bp, Homo sapiens
atgtttactatttgattacaaaggatattttaaaggctaccaacagtcagaggaagacagacaaagggcaaggtctggaagggtctggagcatgggggcttttgcccccatggagttgaggtacatcccctccctgcccgcaaatgagctcttgttcaccttcctgttggtctcgatgtgtttagcttccgggaaactttctaagccctgtccttttagggtttctttttcctggaagctttgtgattgattaaatcattggccaatagtgatcacctaagccatcagcccctctccccacctccaaggttgggctgggctgaaagtcccacccctctaatcctgccttgggctctccagtgaccagccccatcctgaagctacctgggccatcagccaatcacaagcataaagaaagaactcactttggagattccacagattttacttgtatgccaggagcgggggttgaagaccaaatatatatttcacaatatcacatcccttgtctgcaataactttgtcccaacgaatcccgtgtttggcagaaggtttaggcacacctgatagtattcagggtgtgtgtaagtggagccgcagatcaaaggccatcagcgaaagcaagcagcacctcagaagggagcccgacctctcccgtggctcccacccatgtgggctgaggctcaggtttttttagactttagagggagagaatgtatcttgtcattaagactcatttatcccagatctatcctgattcctatgtacagcatgtcaggtggtactaaattgtag

SEQ ID NO: 43783 - DNA, 2382 bp, Homo sapiens
ccgcacagccccaggacagttcaattagagaagcaatgtgctgtgttctaccagcaacagcaggaatgccaatcctaatgcttatgcaatgcttcttatgtgccaggcgctgttttaagaattttacataaattagctcatttaatcctcaccaaaatactatgagaaaggctctattctcactcccatctttatagataggaaaatagaagcataaaggggttagacagtagctgaaagactgttccacttgtcaagagaagctgatgcatttcctgagcctagggtgttataatgtcccccagaaaaagcccatccgaaggccagggtttttgtttgagacagagtttcactcttaccgcccaaagctggagtgcagtggtatgatctgggctcactgcaacctctgcctcctgggttcaagtgattctcctgcctcagcttcccaagcagctgggattacaggtccttgccaccacacctggctaatttttgtatttttagtagagacggggttttaccattttggcaagcctggtctcaaactcctgacctcaggtgatctgcctgccttggcctcccaaagtgatgggattacaggcgtgggctatagcgcccggccagaaaaccagtgtttattgttggtcttgtgggctgggagctaatgagcacattcttcaatatcagtggcactctctgggttaaacgtgcagcaataggtcagaggacacccggggtgggcattcccaaccagtgatctggccctggggaatttggggtaaacaatgatttgaatcgtagttaagctcaagagccaacaagaaatgcctaaactgtgagtagtgctacagaggatcctgaaatccaatgggctgcttggaatcccctccctgaggacgcctggaactgggagggagccttcctccctaggaattccattctcagtgggaggccacagggcgtggagcactagcactgaggtggttcccagggcacctcttacaggacaggggctacaggaatcaagagaatttctgggatagggagagagctggggcagtgggtttagcttccttctgcatttactaagggctaattaataatcataactaatattgagtgcttgctcagtttcaggctccacactagatgcttctcatgcgttgcctttctctgtcttccattaccacttcgtgaggcaggtgttgtattcctggacagggatacataacttacccaagctaaaaagagctgagtttttaaaaaagggccgggcatggtggctcatgcctataatcccagcactttgggaggcccaagcaggaggactctgtacaaaaaacaaaaaaacaaacaaacaaacttattgaagggttgcaaacattcagaaaaatcttaagtatatagattgatgaaattatgttaaagtgaacccattgggacaacagataggacattcccagtgcccccaaaacctcccttgtccacttcccaatcactaccccttcttcctcccaaaaggtagacactatcctgatttccagcactagccattagtttagcctgatttctaagcttctgtcaatggaatcatacagcatgtgctcttctgtgtttggtttcttttggtcaacgctaagcgggtgacattcctttatgctgttgtgtgcagctcacccgttctcactgctgtgcggtgctgcactgatgattgtgccgcaactactctatccaatctactgttggggagcatttgtttcctctctttcttttttgccacggtgaaaaaagtttccgtgaacattcccgttcacgtctttgtttggccacatgtacacatttctgctgggtacgtgcccaggagtggaatgactgagtcacagggttggtgccaggtggggttttgagcctagacatgcctgctctaaactcaagagcggtgccatgccatagatcactgtgtggatgtggaggcctacagaggagacacctgaggtggcagtgggaatggagggggagggatgagaagcaggagctgcagagggaggcctcctgggcagatggcagtgctgtgttagtcaggcttgggggagtctctaggtgcctgtgtgacccccaggaggcactatccagggtgccgtctggctatgcctctttaagcttgatgggaaccctgggtgtgagggggccagccagggctgaaggtaaggtgcctggggagggaggggacagagacaagccttgtgccttgggccctcaaccctcgccactggagagtgatgttgcctgctcagaccaagtggggtgggactgagagaaagtggtgactgtttataaagcaaggccaagtgcaagaactgctgagtgactgggaacttcctg

SEQ ID NO: 43784 - DNA, 1309 bp, Homo sapiens
cgccaggactgacggggagagggcaaggccgggccagaggggctgtgggcctggactgcggctgtcgcccgcggccctgctcttttgggcagccagacgtggggtcagcgcccagtcgcagcctccgggggtgagtccgcagatccccgcacgtgacacaggccaggcatggggacggggagttcctcgtcgtccgttcccactcagatgctccctgaggttccggaacaccccgccccccatcccaggatctgaccaaccctcaagccacggccggccccggttccgcgagacgggggactctgaggattgtcctcccttccgggctgggactcccccacagcagccgaccgcccccagttcagagtggcccggcccgcagcgctccccgggcacaggtcccaggtggacggctccgctcccgcgcccggctcctctgcccgccaagcgccccggggattccccggcctccaagcggccgcggccgggtggagtcagccccgaagcccgggatcccccgaagggagaaaacccgctctgctcctctgaagcggcgggagaaaccggccccacccaggtccgggggcccgacgccctcggcggaggccggctccaggggtccgaggttcccgaagctggaggccggctccgccccggcgtccccccgccgccacctccgcccccatcccgcgggccggcggagggaggggcggggccgcttgccgcccgcgactcgggttcggcttctttagtgattgcttctgcttctcccgcgccagctgtccccagctctggggcaacgctgccaggtgcccagtccccgcgctcgagagagcgcctgcctggctctgaactctggccaggaaggggcgcgaggggaaggccccgggggaaggcgtgtccccgcgccccgccccgccccgcctcggaaagcccccgcggtcccgcccaccccaggggctcgctcagcctccggagacttttttctttgagcgcagccgcctggtgccggtttccgccgagctggagcgcgcgggccacggcttctctggggacgcagaagcgagaagcggggacctcggcgcgcgccccgcgtcccgctcttcctgcccgcgccccggcccccggcccgcgccccggccgccggcatggtgctgctggccgggaccgggccggagggcggcggggcgcgctgcatgaccccaccaccgccgtccccaccccggggcgcgcaggtcgaggaggaccccgctgactacgaagagtttgaggacttctcgagtctgccagacacccgcagcatcgcctc

SEQ ID NO: 43785 - DNA, 1164 bp, Homo sapiens
tggggccagaccggagggttacatcctgagcaggagaggagggaggaggccaggtggaggagcggcctgggggacataggtggttgtggtgctagattggcagtggatttttttctgaaggctgccgtaacaaatgaccacaaagtaggtggcttaaacatcagaaattgattctctcacaattctggggggcagatgtctgaagtccaggtgacagcagggccacgctccctctggcagagctgggaattctgcggtctgtgacagcatcgctccaatctctctctgtcctcatctgtcctctgcacatctgtgtctcaaatctccaggatgatctcatcttaggatccttaattatgatctataaagatgctatttcccaacagagtctcattcacagcgaccggggttaggatgtggacatgtcttttctgggcgatacatttcaacctactacaggcagttacctgaaggagtaactgaaggagaggggttcagaatcctccagtggggcctgatgggcagaggagagacttggacacccttaagagacgaaatgaatcttcagaggttcagccattgcttgcaatgtcatcttctgggctcatccctgcactccaaccctggacattttctctggtcttttctagtggccaccatctggatgattacgactctggaaatctctgtccatcatccatttttttgcctcctctgtgaacgagcaggtgtgatggcctgaaaacagagagggagaaggctgagtgtaccagggcaggggaagcgcttcctggaattacgtgtcccaggacaaaagtgaaactgccttcgctgactcataggaaagtttgaaaatatcatgtttcgcctatgcctgggggatctttgtttttggcataagccgaacagattgttccaggccagaaaaaaactaagccaaaccaaaacaacagaatgacttaattatgtaccagcaccctttaaaattaattatgcttgctttctttttgtccccctcaacttttagtttaagttctgaggcacatgtgcaggatgtgcaggtttgttacacaggcagtgtgccatgcccattgtggtttgctgcacagatcaacccatcagctaggtattaagtgcagaattctttagctattcttcctgatg

SEQ ID NO: 43786 - DNA, 1890 bp, Homo sapiens
aaaaaaaaatcaagttagaagacattaatgaacacctgcagaacagacatcccaaagcccagaatgtcatgtggaagccaccgccctgacagctatgagtcagacagacagatgtcagtttcagttacaccttaaatcacaaatgagttgccaactcagtttaaaaagaatagggttggggggcatatatttaaagaatattttgaaaatagaagaaaatgtggcaaggctgtctcctcccacaccagctcccacctgagagccagatagttagcaggaaaatctgatcacgctgctttctaagaccctgcgtggttctccaccaactttggatgcacttcagcctcctcagccctcgtggaagcccgtcatgacccagaattccccactcgtcagctccacgcctttgcacatgcttgcctcccgcctgggacacggtccctccaccatccctggcgctgcggacctcccaccattgcttggctaacgaggctcaacctggctgggtgccaactcctcccagcctgggcaagttgccagtcatctgtgctcccaccatcctctgggccgagcctggcattctcattgtttacttctctgcctccttccccagactgaatgtcctgaggggagggagtcgcatttcagcaatctttgtattttgaacacacagccagggaccagtaagcctgctgatggtgaataaatgctcatgggtgatgacgacagccagctgaaagcggtgcagccctcctccctgcggggcatgctctccgtggatgtgctggtttagtcacacacattttaagtgtgacgacacctatatattcctaaatctgtaagacaaagtacaagccacaatatctcgagatctgcccttctcctttgaccactccaccccagcctatgacagggggctgccatttccccccatggggccagggatgactcttggtagagcacccaggagctggtgcacatgagaacaagaccagttagggggcatgtgagggagtgctgtaggcatccaggccaggactaggtaagaatttatttggatttatatatagcagagactgggcaagacaagaaggtgggtgcgttgccccactgaaagaaagccaatcaagtaaaaatgaacaagaacacaagctgagctctgtgtcctgtgtccccgaaggggtgactgagcaacctcggtgcctgggtgtagagataacaccaccactgtccatcccggggcctcacccagggcgtcagcggagcatgctcacactttaggtcctgtagacaaaagtaattgcaggctcccagccaggagcctgggctgaggcctgaggatctgcatttctaacacgctcccaggggacgctgatgccgctggtcctgggactgcactatgagtggccaaagtcaaacctgcgcctggcagaaaacagtaaataggtcgtttggctcaatcattagccaggttgttaattctgcatccattggtttgggttgtactaaattaggccacactttttgtgaggtggaccagtatttgtgcatgacaggcccaatatttgtgaaaacattgccttgaaaatagttggagaattttatttctcatgaatagaacatgctgtcgtctgagagcctgcctcagagcagctggctgggagcctccggagtgggaaccgctttggcagagtaggtaaaacattcaaaaagggtttcaagtctttgagtctgaaacgagtggacaatgtagattcctttcatgaaattgtatgcagcattttgcaaggaacttataaagctgatcatagtctatagatcctgaaggtccaatttgctttccattgattgcttgtcatttttttttttttttgagacagtgtttcagtc

SEQ ID NO: 43787 - DNA, 763 bp, Homo sapiens
tatggatacatgcatatgtaataaaaattcaaaagcaaaatcagagcatacacagctgcaccaaatagtgatcacctctgggagggatggagaagaaagcacaaaaaggcatttcaactttttctgtaatgttgattcctttaaaaagtttgaagccgttatgacaaaatattgacctttgttaatgttaccaatgaagacatgggtgtttatcttacttatcttactttctattttacttttctctatatttggactttttctcataataaactctgatacacacataccaaagggcacttggaacaggggctgcctgagtctaggcagctcagtgggggttgtccctgtgtctgtgtggttcgcctgcttttccccaacactgatctgtggttaagagtttggtgcatggaacgttccatgggattctttattatgagctggctttggagaagcagtgggctgaaatggtggtgtctgacctgcggtgctggggccacaccctgtagggattgacccttgggtcctgcctcccggccaggaagtcctctccccttgccacttgccacccctctgcactagacctgggcctgacctttaccctccaaacttctaacaacacatcccagaaaggatctggttcaagatactaacaatcacacttggggagtgtatttcaaggaaaatagatggcatatcgtagaaattgcagacaaacctgaactcctggggagtcccttcagaaaggaagtttgctgcctgg

SEQ ID NO: 43788 - DNA, 568 bp, Homo sapiens
tataccgtttcaaataagagagtagaacttggtgagtctcggtttcccagcgttgccttatcttttcctgtgagcttttctgagctcttctgattggccatggcagcgccacacccctgcccgctggccagccaggagggctcctcagccagcttggggcttgcctggctcctccttcagacccctgcctgccctgcaaagagcagggatgctgccctcccctactaaccctgcccctccatctgcatggtaaatgccttatgctaagaattcctggagtctgttcatgccgcgtggctggtatgatgtcatatttccaaagccgacagctccctctactggcctggtctggagaactgcagtttgagtgccttgagtcagtcaatcttagacaacccaattctgtaacattttccaatttttagagcagtttgtgtttattgcctgttttttttagatggagttttgctcttgttgcccaggctggagtgcaatgatgtgatcttggctcactgcaatctccgcctcccgggttcaagtgattctcctgcctcagcctcctgagtag

SEQ ID NO: 43789 - DNA, 1127 bp, Homo sapiens
cggagtcacggcatggcctgtgggtcaaccctgcccgccttggctgtggggcatgggcatgttatttaatttcccatgcccagggtcctcatttgtaaagtggggattgtagggtttgcataacaatttaattaaatgacagaaattctactcagatctttaacaaggctgctgcagagttggaggccactaaaaggtagtttcctgcctttctctgtcctgcttcaaactaaataacagatggctacaaaatccaggaccacccagggtcatcttccagagggccagtcactgaggctgcaggtgagggagttttaaccctccccccagcccctgtctcccacacccactggctcactttccatcagctctaaaagtttcctgactatccaggggccacagctgcggttgcctgggcttttccattcctgagactaaaagaatgttcacagctggaacctgcaccaaacccacccagtgaccccagatgaaagccccctgtaccccatagagaggcaggagcagagagagggcctccagtcactccgtgctccagggtccagggtccagctggggtttccagctcccctgttggcacctgttcccctctgcgtctctggcaatgactcattcccagggacagagctgccttcctgggggatgagcaggagctgcaggaagccagaagcgaggctgggggcagtggtccacctcctcaccccttgtgcccagggttcagaaaagtgacctgccaccagcggccgcctattggcgtgtgggaggtggctgtcctcccaaatgctgcaggacattgctgattaggctgcttcgatgtgggcgttttttgactaggggcatattaaatggcaatggaaaccagcgaaatcagccctccgggagacagcaacgcggaaagtacctgctccattaggctcagcctggctcttctcccagaaaagcagactggatgaaggcactgggccagcttaatgaaacccagcagcagtccacgtattctttttttttttttcatttatttattttattaaaaagctaaaatatatatttaaaaataactttaaaactattgaaagcacctgtgcaaaggtgggggaaagtcaatttga

SEQ ID NO: 43790 - DNA, 1160 bp, Homo sapiens
tgtttagagatgctttgtactccagtttgtcttcttaggcacagccttgcctgtgatggggcaagtctcaggatgtgggtttcttgcattggccactggtcccactgggtgaggatggaggtgtcattggtatagaaggtagggaatttgtgatgaaacttgcatcttttgaaaagttttgttttgtacagtgctctgaaatttgtcttttatatatgcgtgacgcaatctagttgcacatgttgcagctaaaagcggaaccaactaattgaacattttcagagtctgacggaaatggtgggtgccagcattcctagtctatcatccagttagtttggaggcttgggtaagtgccaggtacggtaagaaatgaccactttctcccagaactcacatctagccttcactcctgtaatagaaacagggatttgttgagcggctgcgataggtaggaattctgctagcagacagggacacaggacaagggcaaagtccctgccctgaaggagatctttacctacatgagtttcttttcatgctgcttttctgcagacacacacattttcctctcagctatttatccctttgccatgcacactgatatctgggaggttaatcaacttgagggacacatggttcattttggaaagcagctgcaattctttgcaaagaggtttctagacctgtttttgagaatatttaaatcgctgagccaaaagccagtgtgactgtccttcctgccctaggtgagtgtgctgggaagccaccgaggacattgatcttggctcttctttgtatcagtgattgagaaaacaaacactatgctggagagccactgaacgctctccctgaaggcaaagatttgctttatctaaaattttccattgcgtccaggagcaaatctgcatcacagcaatttactattttctgctccaggaactggaaaacacaagcttgagctacgttagctgcttccacgaaacgtgctgtcatcactgaaacacatgtattttttttttttcaggattccaggttgagggaaatttgcttttgattgtttaattgcattattatagatttttagtggcatctctggcctccatctactagcaacctccagacagtgtcaaatgttccctgggggggcaacatcaccccca

SEQ ID NO: 43791 - DNA, 1001 bp, Homo sapiens
tacacttatttaaattgaaaagaactgcaagccaggcagaattagccaggattagaatccagataacacttcctatacactagcagaaactgcagctttttcacacccagactaagcagccacctgatgtccgtgcacgtgggtctctattgtccatctggcaaggaccacatcaaactcttaaaaggaccctttgtccttaacaaaagtttgctattacttattttctaaattttcttaatgaagatttataccttattggcattctgtggaaactgcagacagacaggataaaatgccagaaacgctcagtgactgagtaaccctgtggaatgcagatatcatcaagactgagtttgatggtctcatctttaaaggaatgtggaaagggctgagaaacccaaattcatagttttaaaacttccctaaactcccaaacagcaactatttaactcaatatattcaagttactgctaccccaacatgtaactcatataaaaattgagaagacttttaacattcttttgtgttctaaggctttacaccctccctcatcatcgtggtgctctgacagcctggtttctgccccagttctgagaggtgtaaagcgatgcactcttgtgagttagagctggacaggaggttccctaccaggcagacggctgctgcaatctataccttcatcctttcgcagttgagagcttaagggccttcagtgggggccgcctggatgtctcccaggtgggccggattctgtctccctgcacttagtccagcgcccatcccaagtctaacgctcttccacaggacagtcctttggtatttgaagaaggctaccacaagcccccagaacatccctttcccagactcaaaggcatgatttcaaattccttcactctctcagctattctcccaactgcattccagtgcggtttctagagttttgcctagaactgtacgcgacaccccacatgtacctactcagtccccacaggacaccg

SEQ ID NO: 43792 - DNA, 2000 bp, Homo sapiens
ataaataaataaataaaaaggttgagggggacggggggcgggggggcagtgggtggtgcaaccaatcccctgccatctcgtctctgaccagtagagggagaatgaacttcattcagggcagcaaattaggcctcaagttatccctaggatgatggttatgtccctgattccctgggacggtctgggttcaggcattggtcctggtgttattactagcagtgctttctttcactctcaaagcatgtcagactaaatatgctgcatggtcactccaagctgagacacagaattctggtatgatcctcaacttttccgggacacttaagtttcatttttcatggaagaaatgctcggattgcctgtgcttggttccaccttgatacttgagccagctgataaacagcaacttcaaggctggctcatgttctctttccatcactttccttcccctccaagggcaggacttatactttcccagctgtgttgccataagaacttcccaacatggctttaggcttatcacaacacagctttaggcttctgcacgcatggctccccttcaaggtcaaggaccatggtggaatttgttgtgtgcccagcgcctggcacatggtctggtgcgcacacatactcaacaaatgctttgagcaccaaatgacatcaccggtcagcgaccctcagcttagcacaagtttgtggtcgtggccaggcagtgaatgaaccagggtgcttagctggaactgtttgttgctcatttcttaggaatgagtaactctcatgccctgcccgcctcaaaggcttgcaaaagaggcaaaagagcgattagagatagtggatttatttttgtgacccgacaatctggctgagctggatctgctggccatgggttgatatctggagtccccaagcaaatgggcccttcctccagcttttgccagactgacctggaagattggcttttctccctctttagagggagctcaggctaacaggtacttcttcagatcttttcaaggcaaacttgagaatggtgatagagccatgagctgaagcttaaatgataagcacaattagctagaggcggtaaggaaaagagggatggggtgttatcaatgaccacattcacgagcctgaattaacgaattcaacaggaaaaactccatctaccttctttatggcaactcctggcagctgccaacaacagctggatggctttgcaggactcttgcctaaaccagagaaagactaagcatcaaaggtagctcatcttgttaagaaagcatgtctttttaataaagtgcgatgtcactcatgaccaaaaaaacccttgcaaaagggacagtaacatgcagacagatgtgcacccttaccctgagcataaacgatctggcatgccttgcctcctcagccagagtctcaaatgcctgaagaatctgggtcttaagttttcaactttcgtctccttacctaaggctactccacaatttctgggtttagtcatctgcaagtgaatgctgggaaacagcctgtttctgttgattccccttatcaccaagcacctaggagcagggctctgtgaggaatgactcactctgggcagtaggacacatcttacaaagcaggggtgctcccaaaatagggagcttacttgttgggacacagtaagatgtttttccctttagaaacaatatgaatgatgcttaggttcctaaactgtctcagaagacacgtaatccaagtgtaggctgtgaaatgctagtgtgctgagttggggctgagagctgggcctggctggctgtgggcttctacagagtagttgcagccctgtgcacaggcagggggggtgtcaccgactcgcatgtgggcaggtctttgctgcgcatcaggtgctttaagcttcggaacaactgtgcaggattctattttagtattctggaagcatcattgaggaagtagtccagtgaagttagctctaaaaaaactctttactctaacaatta

SEQ ID NO: 43793 - DNA, 807 bp, Homo sapiens
gcagaatgactacattgaactctttcagtggttatcaacttctctgtctgtagcagtagatcctgttttaaaacatcaaatctgaatggaacctcaagatatcaaatggatctaggtggggctcctattgaagtgggggagggagaagcctgaggtggaccccaaggcatctactcattagtgcaggcctccatacgacacatgtacccatgaactaggctgagggaaaaccaaccaaccagccgaccaaccagccaaccaaccagccaaccaatctgccttacatctttatctctgttgacatctgactgatatttaacatgccctctcaggatgaactccacaggcaaccttcccaagccaaaggctccataatcgattcctaggaagcaaaggttacagggtggggaaactggaatctcagcaagacaacctaacattggaatcgaaggtcaactgactagggcaagactgagacaaggtgaccagtaagaggttctgtggctaaccaagtctaggatctgtggcagtcagagcagttccttgtgggagttacgttccaggcacgacagcaggactgggctgggcagcagaggaggagatcacaatgactgattttcaagcccaggaggagcagggaatgagggaggcagaagagtgaaacagagaaccaccaccaacagccattcataacgtgctttatcttgctcaaggctggcatcttctcatctgacaggggttactgttttacccccactttccagctaagaagcccccctgagagctgaagtgttttccacaatcaca

SEQ ID NO: 43794 - DNA, 541 bp, Homo sapiens
agaggaagagaagactagagcctggttcacagatggttctgcacaatatgcaggcaccacccaaaagtagacagctgcagcactacagcccctttctaggacatccctgaaggatgcagtgaagggaaatcttcccagtgggcagaacttccagcagtgcacctggttgtgtactttgcatggaaggagaaataatcaaatgtgtgattacatactgattcatgggctgcagccaatggtttggctggatggtcagggaggtcattccaagcggtctgattcaccgtttgtgagaagcaagtttattgactttatacataatacctttgaccatatggtctgaccaaggagaccatgggcatttgagccacttcctcatgtaacttacttgtgccttcaggacttcctcaagcccagtcatacttacatcacttccatttgatgatggaatgctgctgtgcatgacccactttatggcttgatgggtcagaaagcaccctggatggctagggacttcaaagaagcatgattggaaaattgg

SEQ ID NO: 43795 - DNA, 910 bp, Homo sapiens
atctgatactctgtacacattaaacactaatccacatttccctttcccccagtccctggtaagcaccattctaactttctatgagtctgactactttagatactgcatatacatagaatcatgcagtacttttcctttggtagctggtttctttcactaggcataatgacctccaggttcccccatgacgtggcatatgacaggatttcccctttttaaggttgaataatattcctgcgtgtgtgtgtgtgtgtgtgtgtgtgtgtgtgtgtgtgtgtgtgtgtgtgtgtataccctacattttgtttctccattcatctgttgatgggcacgtgagttgcttccacctcctggctactgtgaacagtgctgctatgaacacaggagtacagatatctcttggtgaccctgctgctttcaattcttttgggtatatgcccagaagaggacgagggctaatttttaacacaaaaaactttgtggattgctacccaatatatgtttcacttttggtatctagatccttctggatctttagcaaaatctgacatctcacctctcaaggcctccatttaggagcacctggattaagtgatcctcaggttgtgtccaactctaaatctgctgattctatgagaatcccttgggtagaacaccacccttgatactccagcccgtattaattccacagtaatgactacagtcctgccttaggggatatgcactataaaaaatcaaagtaaacacctgccgagagagaagggaaggcccaacagaacatgtgaggataaagaattttcttccccaacatggctactactgcattcaccttttttcaccaactggaaaataagaagtaatcaagttaattgactattttatctttagagaatcaaagtccaagataatt

SEQ ID NO: 43796 - DNA, 2381 bp, Homo sapiens
actcatactgtatcaggttttatagacaatactcaatggggaaggccacttagaagcagacaggcagggttaccaagaacatgcaccacttcctcatgtgggtgcctactcttggcaactatccatttggaagcctagcccgctgagcactccatgagaactgggttgaacttcctgctacgttacctagcacggtgcatgatatgggcaagctgatatcctctttggggttctgtttccttgtacataaactggggagaataccacctactattcaggactgctggaatgaaatgaaataaaagcatgggcctaatccacaggaatcaaggttagcttctttccacagcctctttccccttccacaccctctcctcttctgactgagacatcatctggagacaggctgtataagtagagagcttagtgctttcttctacgtggacgagctcccgcagaggtgtgttagtggtgcctgtttgcgtattgcaaagtcgagagaaatggattcctttcaaggtccctgaacccaactggaaatctgaacctttaaggaaaataggtgttgagcaggggaggaggggtctgcaaggagacccctgtgcaggccccaggagggttggcagcagaggtatcatataaggacacccagtcactcataagggcatggccttgtaattctagatctggctgatgatccgagggaggaaatgcttcaaccattctgaaatcagaagttcttgccccagctacacagacagccaggtccacccctgaggttcaactagtgcggcaattctcaagggtctccatgtgatttcagtatggaagcctaagttgcaaactactgcccagaaattgttagtatttgtttctctggaatgacaacagaaacctggagtacaaaagactcacaggtgcaagaatttgcctacttcgtccactctggtggtccagccttgggaagagggtggctggcagctgtgtccaccatcagaaaaccaatgagccacaggaagctgctcctgcttggcttggcttgccctggcttccaggaagggaggcacactggctaaacccaggcacctgggcaggtggaggtaggtctctaactgtgcagacagacggggcaccagcccctgggtgtggggtggggaacagggtgggcgcgtggcaactgctcaggaaagaggacctctaggggctctattttctcccctgactgaaaacaaagccccctcctccctgattaggaagggaaaaatacacagaacagggccccacatagcccaggagttatcagaatcatagaacagagaacaaatgttaatgcttaaccgaatagggtttttggaaaacatgctcaagagtcgctagcatcatcccacctggggctttcccattcctggtcatccttgtctttctcttctttggtgtctcctgtatgtgggtgtttctgcacaattcgcattccaccagctttcactgaaatgaaaacagagagtgtgggattaatgtggaaatggggctgcctgtggatcagggggaccagctggaaaggttctggttgctcagtggccacaagtcagtctggagaatctggcaatgaaaatgattaactagggaaggtcagggttgtcggggtaaattcaaaatgatacagcactcaacataatctcttactacagatccactcagaaactttccaaggctcttgtttttctatctggtcacctttcaagtattttgtcagagcagcagtgtaacgagggcacaaactacacaaagagagtggctgctgctttcagttctccacagtctcaacacaagagctcacctcaaccctcccctgtgaaatttactttctcaaatatcgaagatgtttttgatggggtgatatggtgatgggtgacatgggacagctactgtgccttcacagagcccaggcaagtggcaacaaaacttctactgcagctttgcccaaactgtgctgtgaaaccctaccgctggcagatgttaacttagttttaaaaaacagctttatagatatgtaattcatgtagaatacaattcattcatttaaactgtataattcgatggttttgagtgcattcagaattgtacaaccattgccataatcaattttaggagattttcatcaccccaaacagaaaccccacagccatgaacagttaccctccattccacccctcccagctcctggaagccagtcacctggacttgcttatttcggacatgtgatataagtggaattataaactatgtggcctttggtgactggctccttgcacttagcgtgttttcaaggttcatccatgttacagcacgtgtaagtatctcattcctcttcttgtcaaata

SEQ ID NO: 43797 - DNA, 2508 bp, Homo sapiens
gaattcccgccctatagcggaggacagcagagaaggataatgggaatcttttttttttttttttttttttttgagatggagtctcgctcgctttgtcgccaaggctggagtgctttggctcaatcttggctcactacaacttctgcctcccgggttcaagccattctcctgcctcggcctcctgaatagctgggattacaggcgcccgccaccatgcccagctaatttttctacttttagtagagatggggtttcaccatgttatccaggctagtcttgaactcctgacctcaagtgatccaccctccttggcctcccaaactgctggggttacaggcatgagccaccgcgcctggccaggaatctttattgtcaagaaaatggcgcaaatgtgccaccaaaagaagccatgtttctcaaagacttctgttcctacaagactgagtttatgacactaaggcgtgctattaagacctaaaagaacctcacgcatccatacattgaagtgacttggcttctgagacccaaggcctttgatcttctcaccagtgtccctccatatgggccgactgccactggaaaggagagtagaaacggaaacagacccgtctggacagaatccaaagtgcaaacaggaactgtgcccagagagaggaggaggtggcagaagcatgaaggctgcttagatccctatgttctaagaaagaccgctctttcctggctttaacttccttggctcagaagtttaggatttgctcaaaatcagaaaaagcaactttgggggaaaaaaaaaatctggatgtggaagaaactggcggtgaaagtcatattgagtgattaatgataaaaattatttccgctccttggttcttgagtcggtatgaaacgctggcagcctctaattaatcatcaccatgatattaacaccactgacttttcattgcttctgctactttctttctagacatctgtatcctctaagtaaatattatccgccaaaactttgttataagttgtgcaactgggttcgcccaaggcaccggagcctgcgcgcaatcgcacaggtacgcggccgcccgcggtcctcaggaagaaacgcttcgccgccgccggcaagcggggccgaagctccggcgggctcctcccgggcctgggcgcccgacctctccgcggcccgcgcccctcgggcgggcatcaaggcccggaacccgtctcagcgctcgccggggccctccccgcggagcccccgcccggcgcccccgggttcgagcccgcccccggcacccgcgcgtggagagagaggaaaagagtcagtaccggcgggcgggtgtccagctttagtctctagtttcccttcgggaggcgaagacatgacgcggcggggcttccgcggggccgaggcggcggcgcggttctcgggccgggcgggcgtgcgcgagtgagctcaggtgtgagcgccggggagcgagcgggcgggagaacgacgcgcgcgcgtggggcgccggggccgcgcgagccgggtgagtgccactgccgttaagggggcgcggccgccgcgcgccgacgtggcgcagccgagcccaccgacggcatgcgcactgacgtcaccgcggcccgcccgccctgctgggccgcgagccaagcatacggtgcgtgcgcagccggccgcgccacgtcggatgctgtggccgggggcgggggcgggggcgggggcgggggcggaggagggaggggagagaaggggtgaagaagtgagagggagaaggaaggagagggaggcggggtccccgactggctgcggggactggagttgcggaaagttaagtagggcccagctgaggatggctcctgcagcgaacgcgctcagccgggctcctggctacgcggcgacggctgggtgactgcgccccacagtgcgggccagggccggggcgtcccggcagggaggcgaccgtcccctgaggccctcagcccctgccgcggcagcgcctaatgaagcgcggaaaggagagcccagatggcagcgacgggggccgagagagcaggaatttgttaaaagacgatgcgaggggagagcctgctttccgagtgagggccagcgctggggagcagagacggtggcttctgtccctgccctcctcgttatgaaccaaaaataaaattctaagccctgcagccaacggatggaccctcccctccgcctgtggccttctaagttatcttgaaaaactagttcaggccttgatgggaagcggaagtcaaacatggcctcacaaacatccgcacggagaccctaagactaatagaggactctgataagaaacatttgcagtgtattcccggcttcatctgcatgataacaccttggtctccacaactccttcatgcaacccggacattcccttctactgagtccaggtctttagatgataactctcaaccagttgccaatcagaaaacctttaaatgtacctatgacccggacgcctccacttcacattttacctc

SEQ ID NO: 43798 - DNA, 458 bp, Homo sapiens
agaaaatagggatgaggaaattgaggttcagaaatgttaaatgtttcagccaacaaagctcacagatggaatccatctccggctggaatagaaccatgctgcagatgctcagactggaagtttacagtcaggccccagagatgccctttcgaactttacctttcaaattccccacagaagagcatgaggcaaactgggctcatacccgactgcctcctgagcgtgtcagaagatcaaaggagatagcgtgtggagaatctctttctgtagtgtagtatgccatgtttttagctgtttttagttgtagtcctcttttgtttagtagcagcttagcctaccaatgtgatatagctcaggcagcaatttttaactccttaaagttttgccaagaaaatttgaagtttcatatgaaaaggcagacattattaatagcatgtcaacaaatatttggaatgagt

SEQ ID NO: 43799 - DNA, 713 bp, Homo sapiens
ggtagaggttgtggtaagccaagatcgtgccattgcactccagcctgggcaacaagagcaaaactccatctcaaaaaaaaaaaaaaaaaaattgaggttatttcactcaaattcagtgaaacactagctatgctttcatattaacaagacaggaagttttcttactctatttctattaaattatttttttaatctgtaaggtacatggacgtactttggtcaagaattaggccgaggcagacatccaggcctgcatgactcagcgggactggtacgcaggtgcacacctccacttgttacataacctgtttgtgtaagctcatacttggctctatgccactattgtctttttttttgagatggagtttcactttctcattgcccgggctggagtgcaatggtgcaatttcagctcactataacctctgcctcccaggttcaagcgattctcctgcctcagcctcctgactagctggaactacaggtgtgtgccaccacgcccatctaattttttgtatttttagtagagatggggtttcaccatgttggtcaggctggtctcaaactcctgacctcaggtgatccacctgcctcagcctcccaaagtgctgggattacaggcgtgagccaccgtgcccggccgtatgccactattatctgtaaagggtataactgccctgctgatgctgatacatgctgcttggctctcatac

SEQ ID NO: 43800 - DNA, 485 bp, Homo sapiens
tatttgctgtgtattaattgaaagaaaccatttgtttggtggctaagtttgcttctgaaatttactaagaactgagtgctgatttctcagaaaactgaaggccaagtttaatttttccagctttcaacttaatgcattatcctttttttttttttgtctaaagagtgaaagccttaaatggaaatcaaagtctgtagtgcaagaatgaaccctctttgcctgaactggtgtttaaggagagctgaaactcttcatttcctttcttgtttctgagaaactggttcaaaggtcaagcctaatggaatgtttcagaagttttattttcctttgcaggcttacgaaaggcttggagctgacccagtaaaattgagattatgaagcattcagttgttaaaggaatttccatggtttttccctttaaaataaatcctatatagatcaaaagacagtgccttgatatttcattaaaccaacacacatatata

SEQ ID NO: 43801 - DNA, 534 bp, Homo sapiens
atgggaaaaaacccacacatttggtcacagaagtcttctgtgtttgttgttgttgtgtgagagtagaagaaaaatagagtttgagagggtttttcccaaaacagaatattttcaactcaaaagaaaatctatcagacattcccctttgcaagaaaatcatacagaagccatgattaataatttaccaataattaaagagatacctgaattaacataagaagcttagttagtattgtgaaatacagtcaataactaatctactccacaaatatttaccaagttcctagtccatgacagacagcagacaaaaactggcaaggccatttgccatagttgattttgtctgagtttatttgtgaaagaaagcagaaactcaaataacattagacccaatgcataagtggatgcatatgtacaggttaaaaacaagattctcagaattgttcccatctttcccgcacaaacaaatgagattgctgtggtctgaatgttgatgtctcccaaattcatacgctgaaatattaatacccaagg

SEQ ID NO: 43802 - DNA, 1735 bp, Homo sapiens
tttttctgaaacatttcagttcatttatcattctaataattcttgtgttccattttaagggactagacaaaaaagctgaaattttaatcaccactctattttgatacaaatatttatgacactatggtttattcagtgggtatctaagttttttaaaagaaatgtttcaacaaatttctattacttacctcattttaatatctgaaatttcttgtagttcattaaagttaagtcaatgtgcctgtggtaccactttatgtttatgaacaatatgaacatgcccaactgcaaaaattgtgtaagccacttgatgctgagtttgtggttgatgacattggattttcttataacaatcaatgacatgaaagatattcctcaagctcagtggagaggaaattctgaaaaattctcctatttcatgctattattaggcttataacatcctttctttacacaagttctgttgttatatctgtcatatctttccttgacttgcatggctgattttttggaagaaaaaatattcattaaaaatgcatctaaatgacatatcctaagctagaaaaactacatcattttctctcagatctagagactagcacaattgctgtttatttcttgctttaaaagactctcattactatggacagccatgtgtcagttagaacatttgttgagaatcactggtaagaaatcatctaagctgttgactaaatgctgattcatttgttactcagctgcaaaggaatcacagccaactggtgattattcagctctttagtttagcaaatacctgagcacctacttctgtaccacgtgctctcactatatcagagagcagaggtcagcaacggtctttgctaaagggacagacagaaaatatttcaggctttgcgggccataaaaaaaaaaatctgtcacaattgctcaactctgttgcatcataaaagcagctagagaaaatatgtaaaacaatggatgtggctgtattgcaataaaactgtatttacatcaggcctgatttggcctgtgagctctagtttgccagttgccctcatggaacagggagaatgggacagagaattgggatggcagaaactgcttactctttgaagtctacaatgtactttgtttctttctctgcctggaaaactccttttcatttttccatgctagctcacatattcttttcttccatgaagttattctcagattcaccagatagttttctggattttcactgtactattatgactactaattttcaaatctgctattcttgctaaacaatgggctccttgggaaaaaaagcacctctttgacccaattaaaggcatattgtatacaatatggccagttcccttggagttgagcaacttggtggccctttttggggacaggaaaaatatctcatctctgtatcctcatcatagtagagtgtcatcatttaatgaacaaataaatataaggaagaaagtgataagaaaaataaacaacatgttccatgaactcagaagaattagagaacgccttcaactggagaaatgagagaaaggtatacagaagtctgagtgaggatatgtaaagcaggaaatagcatctattgtagaccctgtgtatagcaggcagcctccagcatggcctacaatgatccttgcctctggatattcatgccctgtgcattcttctcatgctttttggctgaatataatgacataattacttactcagaatg

SEQ ID NO: 43803 - DNA, 647 bp, Homo sapiens
ttgaatataattcatttgaaaaactatactgttgggattatcaaaactaattgtttaatcttaaacctaggcttactctatcagttaagaaacataggcattcaaatgtgtacttttatcattactcctttcccaatgtttttcctcatttgcttataaatcacaagaatattatagaatcatatgacaatataaatgttagaaattgttctgtattaatataaagcatcacaattttcattatcactattattaacataattatatataatatataatttgatacccatgaaattgtcattcttggatttcagaagctttttatttttttcatttatgtaatgttttagaaaaatattttattttcttctcttgctagaacctcgttaaatccatcaaagtgacttgtacttggttaatcattagtttagtaagcaagaactttgtgtgaaaagttgtggaatgcctaatggtatgcaatcgaaaggccacctcatgcaatgtggcaacactgacaaaaatcttaaaggtacactgtcctaaatcccctcctgggaggttcttacctaggtcctttccctccatcagtgggtgatccttgggtaatcacaaacatctaagaaaatgaataacccaaaattctaaca

SEQ ID NO: 43804 - DNA, 756 bp, Homo sapiens
tgtccaagattagagagctatagtgataactgagaatgaaacctagtcagaatggatccgtggcctctccgcttcatctctgcaatactttggaagcactatgcatgtatacctctgcctttgcagaaaacatgaaaatgaaatggacagaactagaaacctgagttcaatttgtggcatatttgagatgcctccaaagccacgtgactaatgactaggatgataaaagccaggagaacaacccgagtatcctggccctcggctcacagtcctctaccggtgaacaggggcacgagcacttttcagcctgtagcatgatggagggaggtatacggagggagagcaccatccgcagagggctctccctgtgccctcccactgcctacagtctaccttagcaggtacctgagaaaaattaactcaggacttcgatattcaagggagctgtcctcattttgagtttagctgtcctcattttcaagtttcatcccaggaactacgaggacatgtaaacacagaatctcaagtagaagattaaccatgggaattcccagaggtttgcatatacctcatgacaaacaaatgtgattctcataccagctttccctgtcagtagccaggaatcatgggcaaattacccagtgtctccaagccttaatttctccatctgcaaaatgaggatgacaaatttgacagagttgttgtaaagattaaataagttaacacatgtatgtgcctggtatagtatgatgcctg

SEQ ID NO: 43805 - DNA, 1079 bp, Homo sapiens
caaatttaatgcaaatcaaaaaccctgggaaagaagaaatagagtggctattttcctcttatagtcagaaagatagacatttgcacctcactgggatgagaaaatgtccccatattcattatggtagatacctgctgggtgtcttcccatcttaccctccctgactcccctttcctgataataaacattccccgtgacccagtggatcccatcccgcctgtgtccaccacaggatctcacagttgagaggcccagtactaggcacctcaccagaactggctagcccaaccccttcctcgggaatctggagctggcctggtcctgtgaaacagtctcagaagctgctaatggcataaactgctcatgtgagctgcaaggcaagatggctggtctgcagtgagcaggtgaaagaaggaagagaaaggggttgcaagtccaagcggggtccaggtgctgagtcggtcctggcgccaccgtttctaaggccagtggcagccctgccttggaatctgccagacattgctgaccatttgcctgagctacctctggtcataatcattgctacacagtgacaaacggaaataagagtctacattccaatcgtgccgcaatgttcaacagaagatgaaagttaactttctaagaacgtcaatggaagacatgtggaagtctgatacacatcattagccaaagctatatttatgaccctttaatccatgaaaaacagccttcaattattaatctgaaatcacgaaacacaggctgaggttgctatcggtcacctccatgatgaagatacctctgccttctgattgggtaatgattaacggcattatacagaaaggaaaaaataaacacacgactgtcaacaggaattttattatacaacctacatgaaggtcattagtctgcttgcaaaactcttcgtaatcttggtcaaaatccattttccgctggtctaggaaattgtattcctttttctttatggttgccacaatgccctgaaatattatgagataaattagataatatttcaatattcttatattacctaactaaatatgacccttaaatgtaga

SEQ ID NO: 43806 - DNA, 1263 bp, Homo sapiens
cttgatttcagcccagagagatccatgcctgaattctaaccagcagaactgttagataacaaatgtgtgttgttttaagccaactaagcttgtgatttgttacaacagccaaaggaagcatatacccctggcaaaactgaccagcacctgaacactgccccaacagagaactcaccagaagacccttgagtcgggaattccttcctgtgggtagaacttggtataaacaagtaagccaagcaaggaacttacaccacagcccagttaacaacaggatgcccatgagaacccctgacccgactcagctccctaaccctgtccacaaatggcccgggctctgtgccaatgactaatctccaaagtattcagtgaagcgtctgctccattcgggattttttcagatgggcattttggtttcatcagccctgctttctcccgctccgtgactttgcatcagttgtcatgaggatgattaaataatttagcacttagccccctgctgtactccttggcctggatcatgaccacaccgaaggagtgcccaccagcaagagacctggagacatccccagtaagtgcaaaagctggacacagtcttagggtctcctgccggaggcggaggggatgaggggaaatgcattgcggctccaagaggaatcgctggggagtgaatattggaaggactgtgtgtgtgcattctgagcttcccagcagcccaggggtggaaaatagtgtgtcaatcactacatcagcctagaatacaacatcctccacttccctggtaacctcccctctactgcctctagaccacttcaagtcattccagaaatggctgagccctttcaccctacagggttgactggatcagaggagaaccccgggccaagctggaccaatcagagtttccatccctgaatttggaattggagctaagctagaacctgtctctttgatggcagtaaatgtgaagctcaaacactagtgattggcttctctctccaaaaagactatggacacaaacaaagccagtcttcagaaagacaggaacaagaatgatgcagacacatcatgtgtgcagagatgagagccctaggttacctgcatctgcttcttgcaccttcctgagacctggcatcatcactacccacgctgtaattccccgagacaaccctggcccaggcccctttcactgctttagtaggtatacattttttgcaagcaaaagaatcctaactcagatatcactattgtaagggtggcaag

SEQ ID NO: 43807 - DNA, 1508 bp, Homo sapiens
aaagtagcagggcttggtagcaggtgcctgtgatcccagctactcaggaagctgtggtatgagaatcacagaagaatcgagaattgcttgaacccttggagatggaggttgcagattgcactactgcactccagcctgggcaacagagcgagactctgtctcaaaaaaaaaagaaaaacaaaaacaaaagagggagggcaaaggtggagagggaaggaaaaatggaggaagaaaagaagaaaggaaaggtcatattccccagaacctttccacagtactttaaacatagtaggtacttaataagtatttatggaattgaactgaactgcccaggtatctgtaataccattttctcaactccagcctcacttcctaagcattttctctagagagaggtaaacagaaaaagaaagcgttcattccaccagttctatgcccttcaccccatgcatcgggcctggccatgggccgggcctgcccctgcaaggacaggacaaactgatccatgtcctgtctcgaagctggtttcctggcaggactgtaactcaacattctgggaaatacaaatatccctggtaggtaactcactcttgagttgaagccgtcggtttttattcataaacaaagtaatgagtgagcagttgctcaactctttttttgtctgtttgttaaaagaaaggccataagaagcaaagccaaatgcaaacagaacagaggtataaataaacagccgctctggtgagtgccaggaaagagcttagcgtgactaaaggagaaaatgtaacaggtaaacttcctcctagcatttcttatgcagcaggaaccaattcctccaaatagccatgctcactgtatccttttcccaatactgaggcaagccttggtcacaccatcaccaggcacctggggaaaacaaacacaagggaccctgccttcctgcgagaattgaacattctgtgaaagtgacatttcagggatgcaacaatttctacaccttctatttgcttgagtgtctatttgcttctatcttttctaaataatataaccacaaaaatccatatttgcagaatgcataatcaattattagggctaccaaaatcctttccaaatcaatcttggactagtggcactaacctgccaatatgagggttaagaaaatcatgcagtacaggaaacagaggaggactgggccataggtttgtttcacgattgctggtcttcactttgatctgcatatgctcatttaccaccttccaccatacttccagcttaagtaaaatggggattgcttactcagctggggagagcaagagttgtaaaacagtgtttacaaagatgtgcctgagtgaacagaaaaccgaaaatatttaccaaaggatgctcagtgtgtcttaggagaagaatgttgtgcaaacatttttgaggtcactattcttcataattttttctaactataaattatgtatgtataaaatctgtatattcattatagaaatgttaaaaataaa

SEQ ID NO: 43808 - DNA, 1810 bp, Homo sapiens
tagatacattgctcttaattcaacaagtataaatttatatctttaaaatcatgacaaagtgcatattttatcgattagcataatagatccctacagttatatgactatagtgtacctgatgaaaatatatatgaatgcaatcgtccttgaaaataaatgcaaaaacaagtactgaacttggattattcttcaatccacaatattcacttaaaaaaaaaaaaagagccagactaatgaaatgaaagttgatgtaaatgtatagcgtgtgtttccagctgcacctgctccgatgcgcaccgaggcaaatgtaagagacagaaagaacccacccagcggggctttctctgcacaccatacccctccctctctccaggggaactaaacattcgcttctgtccaaacccaagggctaatgagagctggtaacagccaacgaacgacagacacaaaagcgaccttcgccacacctggatatctctgatgctcgctatgggacaatgggtggattgggtccacgtcgcagacaaccaatggccttttcagcagcaagaggaagaggaggaagtccctgaacttagtgcgttttgcatttcggggtgccctggtaggcgtgattgacaactaccccctgaggaaaaaaacgtgcgaaattccagaaacagcaatcccagccctaaaaggtcaagaaagtgcttttggcccccaaactctgaaaaccccggaccacaagccgagcccctccctggtctctgccgccaaccccgcgagccagggaaccccgggccgctcggccgcgcatgcgccgcggcggccctggctgggcgtgggagccgcgtggcccgagcgcgcacagtaccagtttgtccatggcgctgtgctgcggcgctccgctgggactcgtagcgctcccccggtgcagggaggaccccgccgcagccgccgcgccctgccctcgtctgctctccggagtccgctcaggccgcccggctagccggctgtttgctgctcctgccgttgccatggcgacgggcaatgctccgcctgggcctggccaccgcccccagcgcggcgcggcgcggctcggctcggcgcttccagggctccggctcccgagctacttgcatgctcggggccggctccggttctggggaagcccagagcttccggcctgccactgggccccagatgccgtttcttgactattttccattaggtttctcttagctctcccctgattgtttagcatttgtttgaatgtggaattttgagtgtttctagctttaggaggaaaaaataattcaaaatgaaatttagaagatttcaacattaattcgcacagtcttgattattagtcttagactgtaagttttagattcttctcatagcttccgtgtctggtaccttcacagctatttctccagctaagacctccatagaaacgtttaactttgagttttaatctataggtaataaagataactttctaaacactgtacacccatcagaataatacctcattggcatgtatgaattccaagtaaatttgccttaaagcactttccaaaaaaatttgaatagaaatatttcgtatctgcaaaatctttctcatctgggccagcactgtccaatagaaatataatgcctgacacatgtgaaagtttatgtttttaggagccacattttaaaaagtaaaagaagcaggtgaaattaattttaatagtatgtttcagtttcttcattcattaatgaagtcattactatgtttcagccaaaatattatttcaatatgctaccaatataaaaattattc

SEQ ID NO: 43809 - DNA, 5505 bp, Homo sapiens
gggtggggacacagccagaccatatcagcaactaaggcttagagcggttgggtaatttgctcaaggtctcaaggacgataaatgatgacttttgaacatgggtcctttggctcaagaacccatgtggtttttgttttcttctatttcacttggtttatgcctaatggcccatgttttatcaggaaggtgtgaataaagacatgtcctagccaggaggtgctagggctgaaggtttgagggaaagtagtagaaaaggtttcaaacagctgctttgagtgcctgctaatggcagattatggaagcccaatgttgagggtctagtaagggtaggttatggaagcctgacacgggtgtcttggagctctctccctgggactcctgtgcttgtggtgctgtagaaccaagtgttggcacacagtcagcaatcccagctgagccttgccttgcagccatccccactgaggtgctagacttacaagggaagctgtcctggaccctccagaccagtccatctgccagccgaatacaacaccaccacctcagccagcactacatggaacagaacaatggagcagctgagccctgcccaaactcctcacccacaaaagcacaaagagtaaaaatggctgttgttttaagccggtcagttttggggtaatttgacacatggcaacagataaccagaatataccacaagttcattttgtagcttccttctcttcatggtgccagacaaatcatagccaatggccaggctaacaaccagtcacaagaaaacaaactctcccctcttgcacatggcaattcacacacaaaaacaattacagtgattttgcatttcttacaaatagcctatccatgggccgattcgaaatgttgcccataaaaccatttttcctttgcaggttataaacactgataaaaaggaaacatgtcctctccgtgcagactgagccgacaggacggacattcttttgatcattttaccattttcatgtttgacacacaacagctttttcactgttcaacccaaatttgaagaggaaacaagataacatctgtttccttcaccatccttccatgcatttcatagcacccagatatataggtgctttgctcacagggatcacgctattcaagttcaccttctgatgattctgagatgaaaatggcatttgctatagatccctctcacagggtaggccgggaatgcagactagctaagtagggagtgggaggcaattactctaacctcagtggacaaaacagttccccaaactgcagaattagcagagcacaaacgctgcagctgtttgcaaaggcacccgcggtatttctgacatggcaaatcatgctggtgatgtcagactcttttcttaaacaaaagtgaaatgtgagaaggtgaaaatacgtgactgctggaagatgtttttccttgtttggggactgcattcgcaaatgactcttgtccaggaccctgggttttccccaggtcttttaaaggtctacattcctttagaatccttcactaaacctaccagttggctccctaacttcccggttatctcaccgctctgtcatgcaagtcactgagcagggaaagtgactcataggctctaaagaaaacctaattcattgaattaaacattggaaagaatctaagtgagtcactgtatccttcgcttggtctttaggcagcaccacaccttgatcattccagccagaagggaggtaatcatatttttaaaaagctgcttggagaaggattatttacaacgataataaatcccatttctatatatacctatattccgaaaacaacagcaaaggcactgcaaaattaaaccccaaaatacaaactgaagagcagaaatatgcaaagccttgagcctagctcacaccgcttctgtgcaaattagaaaaaggtggccccccaggttgaaggaattaggaaaaagcacccacttggggcagcagctgctgacagccatgtttgggggcctggtgagtaagcaaatgggctggatctccactcacccccctgccctgccctccagcccttcccctaaccacctccacccctgcttttgtgcagagaacaaattccaggaccttgtgcagtggcgtgagaagaaggacatggaactttttatgactccccctccccattttcctggtaaaatctttttttccctacttttgaccctgttgttccttattgctaacacttggaaacactgattttttttttaatttgtcacgctgtactaacagttgcaggctggcagttcatgtgtttttatccaaccaggtacccagcaggtgctcgagaaccattacaaaaagaacgaataactctctcagagggaatgagcacagcctccagttctaacgtctaatgctgtccttgctttaaactgaaaggaagagtgtgatctcacctctcctggggaaaaacaacagacctgtagacaagttgctctgcagagcaaaattccaggcagaaaaggggcatccttgagcacacgggtttctgcagccatgagatctgggccccgcgctggcgctatcacccttgcacttgcctcttgtttaggtgcctttccagagcgttctccctcacctagtagcacattagagggaccatcaagaaggggagcatcatttcttacccctcagagccctctcacagacaaggaaggggctgcccttccagggctgggggcacagccccatttcctcttagggagaagatcagattcacagcacagccaccaaaaccacttccccagggcagactttcccagcctggccccagcctggccctaacctggcattctcggcatcccaacaagccagagacagctgccctgtgaaccccatcactgataggagaggccaagcaggaggtcagaaacagaaagtccgggggccagttcactcagtccacatggtgtcttttgttgttgttagctgttaatatttaatggcctgatcccatttatatgaaatatccagaacaggtaaatccatagaaacaggcaaattggcagctaccatgcctggggtttagagagaataggaagtggccgatgtaatgggaatggggcttccttttgcagtgaagaaaatgtttggaactagatagtggtggcagttgtacaaacttgttggtgtaccagatgccagtgaatcattcactttaaaacgattacttttaggctgggctcggtggctcatgcctgtaatcccagcactttgggaggccgaggcaggcagatcacttgaggtcaggagttcgagaccagcctggccaacatagtgaagccccatctctactaaatatacaaaaattagccgagcgtggtggcagacacctgtaatcccagatactcaggaggccgaggcaggagaattccttgaacccaggaggcggaggttgcagtgagctgagaccagccagtgcattccagcctgggcaacagagtgagactccatctcaaaaaaaaaaaaagttaactaatttcatcctatgttaatttcagctcaatttttttaagtaaatgaaaaacaacaaaaaaagagtcagacatttttcctattagatttctagcttctcttgagaaagtagaagatctggccatgtccacctaatccccgcgatgcagcagctgcctgtgaggaagggacatttgctgtctgggttgcccctcacccacgtcctcatctcagcttgtgacccctgctcctacccacaaggaagctgcttactttccccagagagtaaacagagtccccactgagctaccatcttcagatgagtgggaggcgagagcatgactcagggtctaagcacacagccggggtggaacaaatatgaagaggccatgaggcaggggtcaggggagtcagaggcaggatgaggacccaggtgttcctaattacgctgcatctccttccccgccagcccgctccgacctctaacctacctcgttttccttcccagcttttactgctgacttactgtgtgtgtaagtttcctggggcttttatcacaaattctgacaaactgggcagcagagacaacagaactgtattgtctcacagctctgcagactggaaatccaagatcaaggtgtcagcagggctgtgatccctccaagggccccaggggagaaaccttcctggcccctccaggcttttggtgatccaagtgttcctagacttgaggcagtatcaccccaatctctgcctcccccttctcccatctgtctctgtctcaaacctccctctctattctcttttaaggacatcagtcattggatatagggcccaccctaaaaccaggatgttcttatcttgagatctttaacttaatacatctgcaaagaccctatctccaaataagatatactcacggttatctaaccaggggttagaacttggacatattttggggagacaccattcaacctattacactctgtatcgatttgcttactgtgtgactcatgtcatgtgtcatgagagtagagactttgcccgtttttttccatgtcggaaacccatagcctagaacaatgcctggcacgtaggctcgcagtaaatgaaaagaagaaatgaggaagcatgtgtgtgggatgatgtttggctcaagccaagtcagcaatcacaggaaggtacaacaaaaccaatccagcacatgaaaggcagggacagctatccgatgaacccaaggatgagggtcaccagatacacaaggaggcaccaggttaagaggagaagtggtcccacttgagtaagaagtttgacattgaaaccgcagcacctgagctgttggaggttcttggcatgactgctcaagacggtggaactggtctgcagtggtgttggactctgcaccaagtaggggctggacaagtaaacttcaggaagggttaagcctaccttctactcctgctggggctgccgctgtgtttgtcacagtcccagcctgggtttttaactcactggaggagtgatatccaaggtatgggccaagtgactgcttcagagtcacctgggggatgtgagttaaaaatacatcctcttgggcctcagcccagaccttctgaatcagaatcccagggattctgagaacactgaagtttgagaaccaataaaatgcagtatttaaatgatgaccacaattgcagggaacatcccacattctttgctacttgctctggtcactgtcttcagctcaggtagctaattggtgagcctgcccagtttcttgcctctctatttttcctactgtcaccagagttcgaacacatcagggatggcactatttctgtcctctaaagccttgaggggtttctccattgtctggagaatagacactgttggttgtgcacacaacagctgttcctcctttatttggtactaacagaaccccagtttcattcaggcctcgaggagaaatatgatcacggaaaggggctctacccctacacggggaac

SEQ ID NO: 43810 - DNA, 6327 bp, Homo sapiens
acactggacaacccagacactaaaaaattgaataggaattaatgagaagatgcttctgcaaattttggtccaagatctcaataaactcaagggtattttttacattactaaggaaagtacacttttttaagggtttacccttaggaagagaacctactgcttatgcacttctttcttatccccaagcagataatataattatgtaaatttcttacaatgacaccattgactgatgagcaatggaaggagaattcttgaataaaagtaaataaaaatttgagatggtatggagtctatgggagctcattcacacaggattcagaacttctccctcttggttcacgttgcatgtctggaaacaagctgcccttttcagggaagagaaattaactccatacacttttgatcagttcaaaggcagattgggccgggcgcagtggctcacgcctgtaatcccaacactttgggaggctgaggtgggtggaacacctgaggtcgggagttcaagaccagcctgatcaacatggagaaaccctgtctctactaaaaatacaaaattagctgggtgtggtggtgcttgcctgtagtcccagctacttgggaggctgaggcaggagaatcacttgaacccaggaggctgaggttgcagtgagccaagactgtgcctagccgagattgcaccattgcactcaggcctaggcaacaagagcgaaacaccatctcaaaaaaaaaaaaaaaaaaagaaaaaaaaaggcagattgtgccctgaaactcttattgttttagagaaaaggaggcaagagattcccttttagaatgttgaatggccttgatgggcaccctaacctcagcagagctttgacagttggatggaaattaccacatttcttccagattagacacaaccaaaatcccttctcagagtcattggtaaggaatttgcttaataactgaacctgtggtctctgggctgcctgccaacggcaggacaaaataaagacaaggatgcagacacaggcaggcataagagaagatactgtgtccctgactttattgttctgccttttttttcttcatctcttcctattctcctttcttgtctatttatagcaaacaaaattatcccttaaatctgagtgcaacacacatgaatgcatggcttaagcagatattatgcaaatgattatagaataataaaatcagatgtccaaagcaaagtatttccattaccatcaacccatggcaaggttccctattctattcttaagcagcttcaaatctacttgtgatcttttatcacaatttcattttcataacaactttcctagtttatagaatgtttaccatctatatgtttcctatacagaagaaaacaaagtctcccactgtatctatttctatagcaagattttgtaggaaatgttgcctatcaaggaatatcctttcaattttcacccacatggaaaatcaaactgctcttcagacctactaaaactcgctttacaatttccagtctatttcaagcttcatttgaaaaagtgactttttttagagaccagaaaaaacctaattctgcttttctttttcttcttttttttggggggagggtacagagtctcactctgttgccccagctggagtgcaatggcccaatctaagctcactgcagcctctgcctcccaggttcaagagattctcctgcctcaaccacccaaatagctgggactacagggacgcaccgccatgcctggctaatttttgtatttttagtagagacggggtttcaccatgtgggtcaggctggtcttgagctcctgacctcaggtgatccacctgcctcagtctcttaaagtgctgggattacaggtgtgagcctctgcacccagccaaaaccaaagaaaacctgactctgattttctaataaaagtaccatgaataataaaatctgggcatattcaggaagcatttgaaagttttgactggagaaactattgatcaatcttcacatatcttcacattaccactcaattgtctctagttctctagtttcatcagttttttttatttccactgaaattcccactgtttcttatttttctgtggaagattaaatctacaaatggagataaacattgttatttatctagttggtgcttattgtactttctgtatctggggaaccatgtatctcaccaattctagtaaattctccaattgtcatttatttctttatatgtttcatatatttccttctctccattcactccttcaggaaatatgtgaaaccgactcagtttatccaccatatctctttttgttttgctgtgcataaaaacacaattctttatttgagtgagtatatttactaaactattttaacatagttcatgaattaacatagtttagaaatgatcgattgcaaattaaggaccttgctgaccatacttacttcttatgctttatcatttcctaatttttaagtaaactttactgtgctacaatgtacacaacaaaattcacaaattttaagaggaagtggataaattccgtcaaatatccatgtaaccaatgccccatttaaaacatagaatatctccttagatagtttcctgtgcacattttcagtcaatcaacaccccaccaccacaccctagtcaaccccgatctgatttctaagaacttcatcctataaacagaaacatacaggctttcctctttcgcctccagtttctcttactcacgataacgtgggggaacattcatccacgttgttgcacgagtcagtagtttgttcctttttatggccataaattggtattccattgtatgaatacaccacaatttgtttatccacatgcattctacgtattattccatacatataagcaatctaaattgttacattataaaattgcatatgttcaatataagatgatatacaaaaaaccttggtagcttctaagtggcttctcttgctcaagtcttcaatacatccttactgccaagatcaaccttcccttcacctgaaaatcttctattacgttttgctctcatcccctgcaggaagcaatccctcttgcttcccagtttttacttcacacgatacaccactttctattttgtgttatggttacttatatacatatctaatatcaactgctagacgctaagctgcttgaagtcaggatccaagtgaattttagctttgctgatccacagcacttagcaaacggctggcttgtgggaagggctcaatgcacggcagctgagtacgtaaaaaacaggtgaattcccgtattccaaagtagcttcagtggctccctgctttgtagtttgtcatgcaaactcttccacgaggagctccaacctagttttccaactgcagtctcgtgatttttcctacgtaacacttctccttcagttaaattcttctttgctaacttccatccttttatctgttatattattccagtctggtagaaaacacacacgcacacgcgcacacacccctatctttattttccccaactcctgaacgagagttacagtttcaagatttcttttaccagggctccccaccgccgcccccaccaccatccgccaccttggtcagcagggaccataaaataagcagttgcagatcgtgcccagtagggggaggagtgcccataagtcttccactaaatccgaggcctttctgaagcccaggagattttaaagaagccacgtgtttacgaaaacgtcttctaggttaaagaaataaacaagagttcagctaactccttcctctgattacaaactgagtaatctctgctcaccaaagcacggtaatttaagcccaaataacaaagacaaaaccatatgaccatttttaatctctaaggacctcactctatttgcatcctcatttttttttaatccataaaaatctattcacagattgaatgttaaatctgtgttgttgaatcaggaactagtaatggaaagctggacgtcttgccctccagatgcagagattagttcaaaagaaaaacatctgtactgcctacttctcttccatctccacccacttctcagcaccatttaggttttaaaaatgttttgtaatggtctaccaaatggcaatcattttttatgtactaagtttaagataccatgggatttgatttgactcaatgttaatcattgagtcatgctgatcacaaaccaaaagtgaacagtcatcatgaaacaaactgtgtcacaccacagggaacaaaatggtagccccgcccgttctcacacaggggcagatagatttcacagagaattagtaaagctcagggcttcgtaagcttaaaaattaatgacgctggaagagatcattcaatttcataaatgagaaaactaaaatcttgagagatcaaagtggctttctcaagagaccacagccagttagtgatgaagcagagactagagtccagtgtttggatctgttacgtcttggatgatcttcatctacaaacactattcattgcacttccttggcagtgtcagcaagagatgatatcttaaaaggatcgtttttgtgcccagttcctttagagatgtactaagaaggcaatgcaaacaccaggtcaacttgaagaaagcctctctaagcagccatccagacttgaagcttcgtacagccgccacattgacaccttttaaacaagtccttgtaagaagaatcttcaaggaagaaagcaaaatccatccacggtgaatattgcatgtgttagcacacatcctatacatctctcccgcaattatttattgggtggagtatgcaacaagagtgtgttattatattagtcagttacttgtcccttgaatctaaagataacacctacagctcccattgcattagagataggacggaaatgctaaaagccgtgttagaatgacagtgcttaataacaatgacacttgaggtttgtaacgcttttcatggtagatctcaaagcacttggcaagtggtcatgacatttcgacacagtattattctgaagaagcatcactgtgatttccttttgataagtcagagaaagaaagataattccctgttaaaatctatctagcgactgggatttttagccctaacatttttatttttaattatgcttaattttgtacattagctaaaaacttgttgggaatacatttaattctaattaaataaataaagtgatccgacttaggatctaaactcaaaagtcctgtgctcattccgaggcagcagtaacttttctggcttcctgacataaaattcatacaaacaaccctcgtagaacatcatctgatattccaggagtggaatgtgtgaggcaacctaacagggaatagagcaacttcaaaagaaaaaatacagaagctaagattctcttcccggaactatcactattaaaaattaatccaggaattcaggtttgggatgaggtaggaggatgggtgggagggaattagagaggaaggagaagcagacaaagactctttaaatatttatgattcttatttgaaatcagagaaagattccctacttgcaagacttgaagtgtcattataattaagtacttcagatattttatattatatttgatgggttttgacttcaaaggaacttaggggcaaagtctcagccaacacagagcattcactgcagcacccccgaagcagtcaaagtcatcacagaggcttcagcctagcctgtctcaaaaaagcacgatatcctaggaatgcaacaatttctcaactccaaagtggtcaatgagatgtaagtggaacttgttggatagggcctctggaaaagttcctaaaagagggctgactcagctatgaggtgagctcttttatggttccacccacgtcttcttcttcctgcctgaaatgtggacatgatggctggcgttccagcagccattttgtatcttgagatagaccttgagaaaaaaagccacactctgaggggggtagaagaaagacaaaaagaacctacacacctgatgaccaagttgatgtcatgcccacccagaattgcctaatttgggatttcttttacctaataggaggtctcttacttgagtttttcattatttattcactgatacagccaactcaataggttttaggactctactttctctaaaactgtctttgattcttgagcaagcatagtcagtactgttttccttgactttctaagacaggttcaccaagtcctgcacgttatgtaactctggaagacccttcttatatcgtgggccatgagacactctcacttagaagacagtgtgaatagggtcctcc

SEQ ID NO: 43811 - DNA, 8375 bp, Homo sapiens
cttgcttctgctgttcaccttgatcacctggctgaggtagtatttgtcacatttctccactgtaaacttactcttttgcccctcctttccattttgtattctttggaaggaagttactatgtgcaggccacggtttaggagagggctcctccatttcatggagggcacagtatccacataaattatttagaattgttcccaatgtatttacttaatcccattgatttacttaattttaaaaatactatattatatattacttaatcccacttatttgcttaatcatttattttcatcactatggactcatggataatttattttatacttttggttataatcacattctgctttattttcttgctcaaatcgtttcagctttggccactgggagcgctttcaattagctcctgtgtccctttgaggtacccccaccattgctgatgtcaattaaaaaaatttttttttcatggggggagcaaattacctaccttttggcacaaggtgctccaggcacaccttgaatatttcccgtcccagtcctagaatcagtcatttcctcaaggagctctggctccttttattggagaatggtactagaagcaagatcagagcgctaggtgtattcgttgctacagagtgttgtgtctaggcccactcagctgacaaagcaaagagatacaagtatgtgtacgaccctttatctacaaatctctgtacagacccattatatacattatgaatatataatatagatgtagaccccaaacatgagtccataacgatgtctccaactctaaccctgtaccacaaggatcactctagcctcttcctggctgtaacctccactccagcagtgaagatttgatggccaccatccaccatttacatttgtctatttccagtatactcgtgtggtggtttcatcacccagttgtttttcatctctcttgcttctgcctgtttcccccggcactggatcctttcactctcctcgtagccggggcataggcgttttgaactagaatattcgtccagcgctggtttgacacggatcttccgcaaaggaacatttcttttggcctccccagaccccgtcatcttccccattcattctggcggagtaaggactgagaaaccgtgaacccgaggttcagcagccgaaagtcccctgggagatggggatacaccgagaggaatcccattttacaggagagctttgtacccttaggagtaccgtggcctccgggactggagcagataacctgttttcgggccctctatgttcactcaacaactattaagaagccccctccccgagccagggccagcgctgagcccactagggaggcacccgccccggcccgcgtcaccccgccttgcgggctagacgacgaaacgcctcggcgctcaggggaccgcgcaccggtgcaggagccagcgccccggttgggggcgcaatgccgggcctgggaaggtccgccccggctggtcagagctttcctgcgccttccaaggcttggagctgccccggggaagcagaccgaaccaaaccgaacgttcctgcagcctccccgccagccctgcgggagcccatccgcccaacgcggccccgcccctcccccaggctccgcccaccgccgagcccaggctcggcccttgacgaagttcgccggaaattaccgaagcccctcttttttttccttcctctccgttccctgttctcccttttcctttcacccgggttccctcggccgtgatttccccctcccccctccttccttccccattgaaatcaagatggaggctcgcggcagccgccggcgcccgtgatcccggaggtctcgccggccacgggcccccgccctcgcgactgcgcgtccgggaggcgcgtgctgctgcccgcgctccggccggcgcccgggaggccgtggctccgcgcctccgcccctcggccagctcgcggctaccgggcggagtcctcgtctatgtgggcgcgctccttgggccgagccgccgccgccgccccccgccgccccggggctctgcgtccgcgcgccgggcgcgggcagctgggtgctcggcgccgccaggcccggcgcggagcgggcggcacgcggcgctaggggcgcggggcccgaggcgggcgcggccgcgggcgccgccgcagccatgagcggcagcagcggcggagccgccgcccccgccgcgtcctccggccccgccgcggcggccagcgcggctggctcgggctgcgggggcggtgccggcgagggggcagaggaggcggccaaggacctggccgacatcgcggccttcttccgatccggtgagtgcaactgcggccggcccgcccagcggcgctgccccaagcgctcggccgacccgccgcggagctgccgagctccggccaccgcgcgctggtgcccgcccgtccgtccgtcggggcccgcaggctctcgcctgggaccactgcttccatgcgccggggctgcccgccccacatccgcgtgtcccgctgcccgcgcagccgggcgcgcggcagcttggcccgaatgccaccacctcgccctccctgcgcccgcccctcgttttagggcagaatcccccggtctgccgctcccggcagccgcggcttcgcgggttggggcgccggctctttgtctctttcgctggaggaccgaggaggcggcggcggagatggcgtgggcggaggctcttaccccggaggccgagcggactgagccggggccggtccgggacgggaaattggtctttgatctgtgcctgtctctggctgatttgtacctggaccctcctcgaccccattagcagccgggtttctttgcttggccctctagcctgtcatctccccggccttggtctacacttctgtgaaacggggcagtcacggcactcactgcccagggagtggggacggtggccgagctgaagctcggaggaccgggaggcgcggtgagccattgtctccggggacgacccgggagggtcagctgggaacgtggccccgggggggcggcgcggggctggggctcgcggggcactgtgtgggtggcgtggaggtggaggcggtgccaggtggccccgagtccaccccggcgcagagggggtggccgcgggagaggcgcgggtggcgaccggtccgcgggaggggcaccgggtttgctgcgcagggggcgtgacagggcgtccccggtaccccagcggcggcgcctcctcccgctccggcccagatcccgcgcgagccgggcccgcgtccccgcgtcccgcgtccccgcgcccagtccggtctgctcgcgcgtcggctgagcagcagcaggaggaggaggaggcggcggcggcggcggcggcctcggggccggcacccagagcgcagtccttagcgggccgggcacggggcagggaggatgcagactccgggttggagagcggaggagggcgggccaggtccgggcctggagaggcgggcgggggtgctggtggcggcctcggggaggacggccgggctggggacaccgacaggccgggggagcggccctgcgctgggggacgcgcgggaggtcggcggttcacgcttttccgtggcctctttgaaaatcacctccccagattcggtgagatcagttccccaatccgggtcacgaggagcaattgcagcgggagggcgatggtgagaggcagaagttagcagtgctggtagatacctggtttagtactgtcttctcttggttgtcttgatctttgctaggcggggttatttttgattcattttagcagattggttgtggctgggagtgacacagccgactgtccagtgttagcttggggttaatctactccccagtgctcactctccttgagaagtgcctgcagaaagcaaaggtttaggaaaacatgagctccttctaaagaaagctacccccccccacctttttttttttggtgcgactggccagatagagcagccccgtcttacctcttaatagcagaactgggacgtattcccttcatgccctgaagctaagtctagctttctctctacctacctgtcacagaataatagattctgtgcagaattcagctcctctctgttagaaaggctcttctgcgttggagatggattttttggtgtttgtgagaccaggcttttttacatctctattatgcatagtacaaaaatcacttctgctgctgctaagagccctccctaaaagacaccgaagatttgctgcctgttggcgtggctctctccaggagttgtcgtctgctcttggctttgcttaggcctgtgctgcccccgccgccagggctcctgttcatgttccgtttgggtcagaaccaggtaatgtctcactggcttgttcctttcttctgccctccaaaatgacaaacttaactttttagttgtttcacttagaatcaggagccagggcagaacttaagtaggtatcagatgcagcatcccattccagcgatagcctggaacgtctttttaaaagtgaaatctcctttgggcagctctgagtccctgacctagatcttggctctagcatctaggccaacgatgtctagcagggggcagagaggggtcattctgttggatgggtgggtgtgggggtggggtttgaacagtcagggctgaccgggcaaggaagctgaggagaatggagcagtcaaatccatcagaaatctggctttcttttctaagactcagaaacatgggaaaataggttctcattgactggggaggacagatcatggtgtgtttttgagcctggtactaaaagtgccaacctgacttagacaaaggctttccattgcttgcctttcctttctcagccctgaaactctgtttgcatggctgcctgattttctttcttttttttaaattcgttcttgttgcccgcattcggctttgtctttgtagccacagattgaaaactaataccagtggttggatgaaagaaagagaagactttaatagaacttttaaacaattaagggaagttcagaaatagagtgaacagtcctgtgatttctccattactggaagtgctcacataaaggtgctgtcacctggcagggtttggagttgggctcaggggacaggactgctgccctggagaggggtccgggagatgaccttggggctgttcccctttccctgtggactctggctttctctgagtcctcagtgcctaatcattgttctccgcttttctttgggtagttcagggctccagagccctggtgcccttctcctctgctgagcgtccacccagggttcacctcacccaaggtctcatttcctttgctgtcattccgttctctgctcaggaccttggcactccctgttcattttgatgatcattttgatcacctatttatagacctggcatgaagcaggcaggccaattagtgttcaagtggattgagttgtaataatgtgagtcaagtcctggtgcttgtgtgttaaagagcagtaagagattttctgcaggtgttagtgaatttcaaacttcacttttctcctttgcacagagctcagcacagtaaaaccaatttcaatgcaagagcaaaaagaaaaaaaaagacaccacaaaaatgagctagccttgttttaattttattttacagatgaggaatcagccttagggaggtttcatgacttgccccccagagtggaacttgggtagagttagagtcagggccctggtccctggtgctctttcctggtcgcttctcatagccaggacgttgcttacattagttctcaaccccactgggaccaatcatttttattgccaatctattttggggctctgttctcgtggcaataaatcattctttcagagctccctatttaaccttgtgagagcgtgtgtgtgtggtggaggtgcttacataaatgcagtatttttaacctgcctggcacgctttaggttggcgttaaatgaatatctggagaataaaggtttgtagttattctgaagcatcacgtcctgtcgtgcttggtttctttcattattaaatcttactcgactcctcctgcagcccctgtctttccagggaacaggtgaagaaaatcaagtctattagggagaagcacacatacttttatatattttgatatgacggtttccttgtggagtattgagagaagcttttcttcatatttataccttgaatgccacttaggtagttggcctggggcgggctgtgctacttctgttggtattgagaagcctggcagctttggtccttgtgagcaccaataatgattgtattacaaagtgggtccttgttaccctcaatatttcaaaaatagaaactgaaggaaatgtaatttgatagtgaatgttggtttctcctttttaggtggcacagtcagttttagaggaaagcaaggagatttctaaaattcctgtaagtgactttcgaggaatcaaagaagtgcagtaaagtcatcactgaaagaagcttttcattgagaccttgtaaaccgacatattgatgtgggatattgtattttttccctttgcaatttaactatttaagattcaaatgaaaatttaaagaagccatttccaccatttaaatgattaaccagatttaaatgaagccggtggtggtgttcaaaatgaagcatgtggtttacatatgtttcctaaatgtaccctaaaaatatgtaatttcagtggccttttttgaccttttaaatgttacgataaagttgagatttgttctgaactgcaggtgaaagatgtgtttgaagctgtcataatctaagtcagctgtattcaatatttactttgtttatttacttgactatcgagaaaataaaattttatctcataaccttggcagaattccagagaaaagtctaattcttaatcaatagccacactttactgcctagtaaactcactgatattgatagggatgagctgtgttttactacaaaaagcagtgataacaccctgcccccattcctcctcaattctataatgaattggcttttatttccttaagtgcattgtcttgacaaaattttaacagcgccactggcaggaaatagtagcgactccctggacagtgaagacttggatttgcgggagaatcccagtgtattctggtggaaagtgcgtgctctgacctcatcctcccatttcttccaagtactcagctgcgtagacttggccaaactgacaagggtgatggtgtggttggcctggtggatggagatgctgtcttttgaatcttctcagcctcattttaattaatgggctgcagggaccaggctgggtccccagctggagcaaggggtaagcgggttcgatgtgcatccacagggttctcttcgtcctattccagttctgctgacgcgctgttcagtgggccactgggagagggaatgaacagggagacttcccagtgacccttgcacttgggaattctggctgctgttactcagcgggagctgttctgggaattcctattgctgtgcctctgaactgaggggaagggagcatagaggagtggtcagaggcttgcggggccctgcatgtgctgctggcttcctgctggacccctggtctcctccccctgtgcccgcagaacaggacttcgctctcactgccaaggtgcccagctccctgctagttcgtaaatctcaaagagagatacctggctagattgtccagtgaggactcccagctttttgatgttactgagccttctgtgcagacagtcttgcttttggggaatcttgctctcatgtttaatggttaacaagtgcataaacactcattttcgcttctcattcactcatggaaacacttaatttgcttactgaatagttgtgttgttaccttaatttcctcttttctgtcccctctccacataaggaagccccttgaaacccaaattactaatcacctgccccccgggaaaggttgtatgtggggaaagagagagcaaaccagagtgaggctacgagcggggggcagagggcattgacctctgagatttctccctgtgccatttgatggcagaggggctgtggaaatgtaaaacctcgttttggtgatgaacatacttgagttttagattactggctcttttcattagccacatgtctactcttgtctgatgggggaggattgtagagtagtctagagctggtgttttggaggcatcttcctatttgggctttgtcatcaatgagtgcattttagcagttacactgacagagaaagctttcatgaaaacttactcaacacaaagactggattctaggtctagggtactttgactttgtggtgtccacgtgagttgatcaggcttgttttctc

SEQ ID NO: 43812 - DNA, 960 bp, Homo sapiens
cttccgtatttgtaattcccttctctgacagtgaaaaacctggctccttttatcctccgtatctttacttattcactcaatcctagaatatgcagaaagtaatttgagaatgctaacccacaccacggtgataaatgaacctccacccccaagtttaaactgttcaaatcagcagttagtggtcagcttctgttcagctcagtgccttgtcagttagtcatccaaacaaaacagatgaagtaatgctctgcagttccccaggggcatgtttaagaaaagagctgccagactccatcaacagcttactttctggtgatgtcggagcacaaaattgaaaaatcaggagtcgccagagaagaaagggagattaatttcatacagtttataaaaaggacacctgttgtgggaaaaacagtttgtcatcttcatctcaatgtacaaattgccaaagagaagaaataaaaaggaaagtgttgagccagtgagaatgggtgtgtagaggaggatgggtcgagcggacctttctcagggatccagtacattctacaaggaggagaagaagctgagttcatgtgttggagtaagctgtgagtcatgacttgaaagactgttgcttactgcccttcattgactaaatatttcttcccagaaaccacctgcagtaaattcaaagcagctatgtttctgcctcagtgcgggatttctgggaactgagtttatgtgcagtcagtcccagaaatcatggaacggtgggtgagatcttaggatttcatttgctgttctgtatttttcttttctctctctctttctctctctctccccctccccgcctccctccctgtgtctccctctctctccctgtctccctctctctccctgtctccctctctctccctgtctccctctctctccctgtctccctctctctccctgtctccctctctctccctgtctccctct

SEQ ID NO: 43813 - DNA, 859 bp, Homo sapiens
catagtacctgatgcgtagtttttaaaccgacaccctcaccctctggtagtccacagtgtctagtgttcctgtatttacgtccatgcatccttaatgttagctcccacttataagcgagaacatgcagtatttggttttctgttcctgtgttaattaagattatggcctccagttccatccgtgttcctgcaaaagacatgatttcattcttttttaatcaatgcgtagtattccatggtgtatatgtaccaccttttctttatccagtctaccattggcgggcacgtgggttgacttcatgtctttgctgttgtgaatagtgcagctgtatttttattttattcttcctgttgaccctctgtctgtctttctgaggctctgtgtctctgtggacccttcaaagggactttcctttgtttaggagagtgactcatcctgaggtcattctcaacctttccttgggaagggatgtagcccttcgcagacagagctgcatttgcccagaagtaagcattttcacaaaggcccctggatcccaggtgccctcctgcacagtgaactctaccggtggtgtcattcttagccttgtgggtctgggtttcccagcctccagaggtaggaacgccaaccatcctgggatggtaggtggccgctaggcccagatggactgcatccagacctgctgagtgaatgaatgcctttcttctgtaaatggactccttatcattctgttttagctcctctttttctcatttcttcctttctcctgcatttctcttgtttctcattcttctttgaccacttaagagtgacggtgtcactcatggccattgcccattgctaaactgtgctggaggc

SEQ ID NO: 43814 - DNA, 2334 bp, Homo sapiens
attgtccggtgtggcgttcagtgccctcaagcatgggaatggagcccttgacgggcatctgtgactgaccctttcctgtactctgtacaagggggcctcgctcccctggcagtcacctgccccttgctaggtgctgaagctgtacaaagcctagtccttttctcagcagaccagggaaaggggtgggggtgggctgatggcttattagagaaacacagcaggaatagcgtgtaaaattgaagaaggaaagtgagcccttgttaattgtgcactcaaacctggtagctttttcctttttttctcttatcgttacgttgcacctcagaagatgcctggtacttttaagtaaagcaacaaatgtaggaagaattgaactgctcttttcaggatcctgatggatgtctcaaatgtttctagaccttgataaaagtacttgagcctgtcaatagcctagacgttttaaaagctgcttatgctttttatttcttgggaaatgcttgttttgagttgtgtgtcttgttttaagccaaacaagtgtcatctgtggttgtgctgctagtacatttctgcttgacctcacaataaaatactgattttgaaagcaccagcctgtctttttaccgcagaggtaatttgagagaggagtggagggtgcccggggaaggagttctgcactgccagcctcatggatgccagagagaaaggggagttcttttccttggtcgatggtcacagaggaggaagagtgtgaacttactccttttttgttctgcaggttgtcttggtctgtctttatgatcgtgggcagcttagggacaagcaaggtcctggcacccatggttgagtgagtggaccacatactaacattgtatggtcagtgttggtctctaggtcttacgggaatgtgtacttaagtatggtggaacaatagctaattaagtagagatttcaagaaacaaaggatttgaggaagatattgcccaaaataagactattgtatattatcctatgaagtcctgaaccctgtctctcattaaaatgctattcagattttggggaacagacatgaagtaaaagatacagtgtaacatggagagttaacctaaggatataggagcttagagcagtgaccctgacctgggcaagtgccttcccctctttgactctgtttcctcactgtaaaatgcagataacagtagtactcattcactgggctgttcggatgattcagtgatttaatatttgtaaagagcctagaacagggcctgccaccatgtatacactttagtaataatattagtcaggggtgtttctagccgtgtagaagtctgggatgcgtggtgtcaccccttcttcagggttcctcttccaagctctttttcctgctctctgtttccaccgtggctgcagtagagacagaggccaacatttgtggtgcaaagggaagtgcccacggattcaggagggcacaggattttattgtcttaaatcattaactattgcccgaaaaatccacagaacatcgttgtgtaactgcagctgcaggaagtgtctgctttctggcctcagcgccagggaggtggagttacttagcacatccaccgcatgcttcctgggctgtttcttttgtggattgcaaattctttggaaaatagaacatgtgatctagagaaaagaagaaaataagaacaaaggataaaataattgtccccgtaatgtagcagctaacagtttcattcagaagtacctgaaacagtgaacagtagttcctcagcatttgaagtaatgttacaagtcaatacactgttcattacgttagattcaaaatgaaggtctatcttgtatctgaagttccttggccagggagaggataaaaacccctggaaaaaataggaattatgcagctgtagttacaattaaatttaattcatgaaaactacatatcatacttcataataacattaatttttattatctggctactgtgttattaacacaaaatataagaattattagtgtttcagaagatgccagttggtttcttactaatgaaaacattatacgcatacaaatacttttatacaaatgtttttcaatttatttatttatttagagacagagtctcatgctgtcacccgggctggagtgcagtggcacgctctctgctcactacaacttctgcctcctatgtttaagcgattctcgtgcctcagcctcccgaatagctggaattacaggcccgtgccaccacacccggctaatttttgtattttagtagagaaggggtttcaccatgttggccaggctggtctcaaacttctgacctctcaggtg

SEQ ID NO: 43815 - DNA, 3212 bp, Homo sapiens
cacgcagccaggtagcatagcaagactgtctctctacacacacacacacacacacacacacacacagccaggtagcatagcaagactgtctctctacacacacacacacacacacacacacacacacacggagccaggtgtggtggcatgcacctgtagtcctagctgcttggtaggctcaagtgggaggattgcttcagcccagcagttcaaggttacagtgagctgtgatcgtgccactgtactcaactccaccctgggcaatagagcaagaccttgtctcagagagagagagagagagagtgaaaatacaagccacagaccaagacaaaatatttgtaaatcatatatccaataaaggatttttaatccagaatatatgcagaacttttataacacaataaaaagaacaaaaccaaattaaaaattgagcacaagatttaaatagacactcaacaaagaagggcaaataaacacatcagaagatgttcaatatcattagtcactaggaaaatacaaatttaaatcacaatgaaataccactactcacttagaacagctataataaaaaagattgacattgccaagtgttgatgagggtgtggagaaaccaaaaccctcataaattgggaatataaggttgtacagtcagtttggaaaacagtttgcagtttcttaaaagtttaaacataggcttatcatttgaaccagcagtttcactcctgtgtatctccttctaaataaatgaaaacatgtctgcacaaagacttttctacgaatgtacagccgtattactcataatagccaaaaatgaaatgatctaaatgtccaccaactggaatggataaacaggatgtggtatatcatcatcatatccagacggttaaatactcctcagcaataaggaacaaatttctgacacatgccacaacctgagtgaacctcactgactgcatgctaagtgaaagaagccagacacaaaatacgacatattgcatgatgccatttctatgaaatttccagaaaaagccaaattaggcaaaaaagcatttcagtggttgccttggggtatgggccggtgagaggattgactgcaaagagtcacaaggaaacatttcagagcgaagaaagtgttaaaccaaactaaagcctgaagatgtctctgtgctttgagtccttatgtaagcaactgtaatctaacttagtatgtaaactaacagaaagtctaactgaagagtatacttttgtaacaaatagctgactctcagccaatcacagcagctgggcttcagttagtcacaagtggacagttcatcagaccttgttcaaataaggcaaaggctgagctttaaccagttgagctgtttctgtacctcacttctattttctgttcataagtgttacctacctgaagtggaactctgaaccctctgctggttctaagggttgcctcattttcgaatcatcctattctcagttaaactctgttataaagtttgtttgtaaaactggattgtgatgttgtaaaactggattgtgatgctggttgtgcaattataaatttattacagtccgtgtaaaatgggtgaatatttttaaaatagtgcaccagaatttattcgacaggtcgcagtttgccattttctgtttcatctagtcctaagaggtagattacattcctgttttccagaagaggaaactgagggctagtgccgataacttacaggtctcagagccagtaggtcccattctcatgttatgaccatagagccctatctgctaaaatgagtaaattttatggtatgtaaattataccttaaaatacctcatgacgttgtaaagaccatattgtgaacatcctttatgtcaggaactatatttgccatcatttcttaaaattcatattggaacgttttagacatacatagaagtagaaagaatgggtgatgccacccgtgagctcttcggaagtcaccatctgtggcctgtcacgtgtcatgtctctactccctcaattactttgaggcaagtcccagttactaatatattctttctcctgtaaatagtttagtgtaatgtcattatttttaaaatgattgcttactcttccatgcttgtatcgtactgggttaaaccagtggttgatagtgggtcacttgagttgactcttctgtatggccttgggggtgctgccacagacaccctgttagctggatctctcgagcagcggttgttagttgagctccgtggtctagaggaactctgtgttgtttgaggttgtgcagcacactttttttctttcattaaatgctttaaaatgtactctaagaaagaaaaaacattcaacaaaattgacagtattggccctcaaggcagtatttttaaattgtcaggagattttttatcagactcagatcttctggtgagaggaatttaggagggcttctgcacagagggacagaggcagtggcagagcattgcagccccccagaatggggtccccagggtgttggctgctccccctctccctgtgtgctgagctccctgtgtgcgggcctagcatccagcttgcagcgtggaccaagtggggtcctggtgccgtgggagccctgattgctggaggagcccagctggggccacaactagggcagcgagtgcagggtatggcgccccaggtggggtcagggggagtcagatggaggagcggtcggcccctttggttgagttttgaaggaatacaagtagatggtagatgaacggggaagttctgtgtagaaggttggaagtgtgaaatggcatgaaattaaaccactggttacttttgaggacagcttccttgttgacagatgtagaaacagagtctagggaagctttggcttgtctgaggccaccaaggtaattgtccagcgaccccagccaagagtaggggtgtccagctttccccaggctccgcaccctctgctgtgatccccatggggacctatttgcagccagccattttgtggcctgcgtttagcttcttgctgtccaggtgccctttaacttatgggagcatctgtcagagcccatttagaggtctctcttttccagatctgtggagcagttgagaggaggttattttgcagcatttgtttcttctaaatctcctttcaaaccacttttgaaagtgtttttttgttgttgttgttgttgtcgtggttttatgattgttt

SEQ ID NO: 43816 - DNA, 2317 bp, Homo sapiens
catccctataaggaccaacaggcgggtttctgaggaccagaaaaatttccagctcgcccaagtatgttgatttggtgcctgggctggtggctccctctgatgtcacaccccagtgcagctccccagggctcctctggaaccttcggggaactccagccaacttctgtgaaccttgtttccaccccaactctccctccagactcacatacctgctcaaacgtgcagatgctgctttcattgaacctcagatgtctcaggcatgtagggtgttttaaatttcagacacctaaaataaagtgtctgaagtttaaatgttaacctgtgccagtaaaaatagcagaagtgcctgaggaaggcctgtggtgggtgggtaagaattgttggcattattgaagaaaaaggaaagagctatgtccccccaatccccaaaatggagaacaaagcaaattaccctatcctgaccagtgtacatcaggtctactgattgattatagccaggaagttagggtttggcactttattgcttaattttttaatttacacattgaatttgctttgcatcaacttttgagaaagtggttctcatgacttatatttgtatagtactcatacttgttcatttattttctagcaatcaggagaccaaatagggtagcctgtactttcttcatgtttgcctgatgaaaacactgtacggttagttaagactcatggccggatctgatttgtaatttcttgtttctgaccaagaagagttcagttgctgttgaacaacacggacaaagtacactaggggaattcagagcaggtgtgaggttcttcctgctcctagaggtttgtgtgctctttacaaacaaccttgcaaacactgaggttgggagggaaacaagtctgctttgcacttagagcgcagaaggatttctttggttggaatgaaggagaaggaaagtacaatttttttcctgcttctcctccctcctcttttcttttcactcttcttcccctcttctctctcaaaagttatttctaaattatcaggttaatatatgtaaactaatattggtatatataaatgacactatactatattaatacataaatatataaaattatttataatatatgcactatatatatatattaacttgataattaactctagctgctagcagaggcgagcaggctactttcacatgcctgactcaccagttagatactaagctgatgcacaagttagctgtgcttgtttctaacccatttatgccaaggacacctttactatcaacatgtaatttaattaaatattttctgagtattttcagatatgagtgggaaaagtatttctataaaggctaaattgatttgggatgacttgttaaagatggtatgtttaaaataagctgtcacattaagcacaggagagaactgtaaagtcagggaaaattttgtaaacatctatgagcattctgaccttagtttctttcagagtgtgtctgtattctaactccagtttaataaggatgaatgccagaattggagtattagggtttattcaagtaagacaatgaagagcttctgtccagggattcatccttcattcacaaaaagaccatggtactggcccagggcaggagactgacagtgagggacggggctgttcaagtggcactcagcaatgtgcctgtattgagcgggaggatgaaagaaaaccatatttaatgtgtgctttctaatgactctctgctttaactgacttagttaaaaattatcttacctgactacaagtgatccccttgagaaagagagcttcatgcagtcaggcaagccgcagtcagggctgtcactgcttgagtttactgtcatgtgctcctgctggaaatcaatcagattccttattctttaaattacacacaggtggaaacctagagaagggctgggttgactggccatcttgaaggctgaaattggtggcatcagttgctctctgctaccctgacagatccataagccgtggtgttcatggttagagacagagcccttcaggccccaaggaagggtatgccatgggtcacctagggagggctgctggagaattcctctcttcacaggcagagaaccgaggctgtttgtccaagactcacagatgtttgaccacacactgaaaaactcagactccagtattgagaactcagtaggtgtttccttaccacctgttttctgaaaggatgcagggtcatctcagtttggaaatacaggttagtctgacaaacacacagttttttgcaaaggttaggggaaaaaaatctgttatttaaaa

SEQ ID NO: 43817 - DNA, 1171 bp, Homo sapiens
gaaatctcctacagggcaaggaggcgtgctgggaacagcccagcttaagacggcagggccaagtggtctggtatgtgagcagaggcccagatcatgcattcctcctccagcacgatgccccatgcgtcaccgagttctctgatcaccggtcttttacatacttcattcctcccattgtttactaaaggatgtttgttactaagcatacctggagccaggaatgaacaaaacaacagaacctacagtgtcctgagagccactgtacagaatgtggtcattatacgcaggccattcaggttgactctctgaggtgtcctaactctgtcctgttaaaccattaccaggagagttcacagaaaggaaatgctatccctacacctgcagcttctttctgggcccctttcttgccctcagtcctggcactagtccccaggagagtgagagttgttgcattgaaatgaccataaagcttttcttctccctcgtgctgtcccccacgaacccaggtatgaagtatacagaaggtggggaattaggattctggggctttcccatgccagccacgacagctgcagcctgctcagtcacaggcacactcagttattaaaattagatttctgatttataggaagattgtcttgatcaatgatgacaagggcatacctgactaaattaatgagaaaatggctagggtaagtcctgggcagctatgtgaatgtgagtatcattctagaagtgtgtgtggcacttgctgcagccctgtgtggctgtcctggcactttgttcccggtgtcagggcctctggtgtgtgattgtcgcagcacgtgtggggcagtgtgtgtgggcattcccagcctgacacatggcttgcataaagattgcataaggttataggaaagtgtctctgtcttttacaccgtattgccagtactaatcagtccaaagtttgagaaaatagtaaaagaataacatacatggttgaaatcaagcatttaaaaacattcagtaactttttgaaagaagactctgcttttctgattaaataaataaaagtcttattaatgatttttagtataactatagttcatgtgtgtgttggggggagagtctcgtttaccttcccaaaacaggttggattttaaaatgcaacttttgcaaagtaagtaagttt

SEQ ID NO: 43818 - DNA, 1169 bp, Homo sapiens
gggcatgcaccaccacgcctggctaattaaaaatatttttttgtagatatgagatctccctatgttgcccaggctattttttgttttgttttggttttgtgttttttgtttgtgtgttttgttttttgtttgttttgagtctcactttgtcacccagattagagtggagtagcacaattagagctcactgcagacttgaaatcctgggttcaagtgattctttcacctcagcctcctgagtagctgggattgcaggtgcataccaccacaaccagctaattaaaatttttgtatgtgtgtgtggagacagggtgtcactgtttcccaggctagtctcaaactcctggcctcaagtgatcctctcactcaggcctcccaaggtgctgagataggcatgagccaccatgtctggccttggttaagcttttttatcctataccagagacgtctaaaatatttacttcttgtcattattattgccaatgaggttcctgtacaaagacgatgttgactactttaggcccatagggagatagtggtagtttcagaggtagaatgaatggcagaggataaaaaagtacagttcagtggtgatagttggacaagctgggcagtggataggggtgccgggcagtagagaccttagaagcttgtggcaagaccagtgagttgaggaaatgctcctgcttttgctaatctgtgggtggggtggtagctgccctggcatttttaacattccctgttgttgagagatgggctaataatgctagtcagaagtctgatgtttgccggaggtagccccgtgagcaggttttgcaatctcagtagatacctgtgtgagggaaggtttacaccacaattgagttgggggaaatgttctgtgatctgtacttacagaagcaatattaaaaaattcatatttggtgtagtaaaggaataaaatagtgaaaattgtttctgttcctacatatacaagtaaagggaagccttgtaatgctttaatgattgcggattgtgatgcaaaatgtattagcctatttcacagaagcaaatatgtcaattaattaagagaaatgcctaaattgccacgtcagatcatttcacagaggtgtggaacatttaaaaagtactttatttgcaaaaagttctgaaatgacttattttaaaat

SEQ ID NO: 43819 - DNA, 8680 bp, Homo sapiens
gagtagaattatagctttattttctgaagccttttacagaatatgattttcttttgcattaaaacacatgggataattgagttttttctttttctttgtctgaagaagagtaagagtgttaaaattcgtgagcagattgatacaatgattgaatagggtttcttttagcactcaaccttcttgatctgatgtgtatcaaaccacttgatatgatgatcaaattgtagtagttttgtccctctggttcatttgatacacactaaatttctaaatgactttcctgagacactccggtaaagcaagtctttggggcaggacagcatcacagaaccctatatgtgcatgtatgtgtgtgtgtatgggtaaggggatgtatatatgtagataagggtggggtaactccagttccagaatacagcctcagaggcatccctgacaggctttacagggacatgcacagacaggtagacgaatgtgttctttattctggcattaggcaaacaggatcagttttctctgtgcatagctctgtgcttgtccctggggatccaaacatgaacggcacacctgggcacatggtttcttttttgacttatgagactgtaagaaatagagtccctttataatactactacttcttgactatcaaaatattcccttccattggtctgtgatgcttttaaattaacttccattgcacaattaatacataattaaaacatcaaaccttaagagttctacagattgcttcatttacattaaaaatatatatatttgtttaaacttttttttgttgtggtctttttgattattttggttttcttttgtattttatattaaaaaatagaactattttaagttgaaatttctttaactcccttgaattaataaaaaataaactactttctttctttgaggtatgctgttataggctgttgcttctaaaattatgtgaaggggtaaattagccagtccaacagttataaccataaaggttataggtaaaaattgtaatgctgtattatgaaacccgtccatattcttgtgtggtcttgtctgtgaacatgtccataagtcttaattcattttatatgcattttataagtgtggattttgatatatttatgttaaaaaaataatataagcattgtattatgttttgattttttttttttacatattagaaaaagtgagggttataaccttgtgtcttccccccaccctttaacatgttcattaggggatctaggcttgttaaaatgcctccttcctatgcatcacttctagatgcgtgcacagctaaaacccttgatagcacaaacatcgggcagccacgtgcggccgctccctgtgctgagagtataatcctgcgggctccgcagagaagtggccggcccggagagggtgacgtcacctccctctgcgcgtgcgcttgcggagcgagggcggtgcctgccaaactgatgcagatttatcactcttctctttgtgtgcaggcgtgcgcgcgcgaagtttcccccaaagtaactaatgagtaaaattcggtaattaccactaagacccagtacttataggaagctccagtttactatttaaccttctttttctggttgtttaaaaatactggctgatttattaacatttttgttactgctgcaacctgtgttttgttaagtatgtaggattcttttttttttttttttcccaatctcttcccgcagattattttcccatttagtaaacactaactcggaatagctgacaggcaaatgaaacccctgagaatgggtgaggagcacagcttgtcttgtgggcttggctgcttttaaaggaggagacgcagccagtttagaatcgcatcagttcattttgttcaacagctcaaatggtcaaggaataactgtgtttcttctaacagtttttactggaaaactcatttgactagtttaatttgaagattaggtaaaatttcagattactagtatctgccagtgtcctgggagaaatacaggattaaaaaaataataaaacctatgttttacttaaaaaattttaaaatttgattcatttgattcatctttctgccagttatgtaaaaataccatttttaacataatatgctatataaaagcttttgctcattgtgaaaatatttctagggtgctttttattataaataaatcggagaggggcttgttgttcctggactatttgttattgttgtcttaaatttaatgccacagaagtgaccaagtgagcgagcattctggtcatcagtgactagcttagaaaggtatttgtctcagtgcagcatctctttgcagggtttcaggatgacagatgagtaattgatttggtcagtggggtattagatagttgaagttccagactgttgattcagtggaaagatatttcactgttgaatgataacttgcagaatattccttgttagggcagagagattaattttccatcttatgaatataaatcatactatgattgaaggctaaactacctaacatttcacaaaacaaaaatagaaagtactaaggaattttggggttcttgggtaggggttcagggtcaagatgctgtggaaatatatttatttgttggttgagttcattgattgattgattcattcattcatccatccatctttcttttccttttctttttttttggagacagagtctcgctctgccgtccaggtaagcagtggcatgatctcggctcactgcacccttcgcctcctgggtccaagtgattcttctttctcagcctcccgagtagctgggactacaggtgtgcaccactgctcctggctaatattttttcgtattttagtagagatggggtttcaccattctgcccaggctggcctcaaactcctgagttcaggcaatctgcctgcctcggcctcccccttcatccatctttctacccagccaacccacatctgatgaatgccctttgcctggccctatcttaggtatctaggatacagcagggagcaaaacagacatgtcctctggcaaattggctgatctagagaaaaagaggcaactattcatttgatgaacagtataatgtttattattaaggaatagaagtgatttgggggtgcagatttaacatttatgctcacactgacatgctgtcgaaccaaacagtaatttaaaaggtggtaacagaattaattttggcaagtagtatgctgaaacttgtagttattttaaaatgagtatgttaaaatctctaaacattccaatttgttttagggaaaggcagttttttgtgtgttggcttgaaaccagaaagaaaatcatcaagcaccacctatatatatttatatttagttaacaactataaaatctgattttttaacctaagcctgttttcctcagtagcattcaacaaatattagtgtaaacattctgaacatagtcattgtagacttggttcagaagcatatttgttgcctgcctttaaggactcccctgggaaacatcttctgcacctagagataagcctcgactgactccattcttgctgtttcactgtttcctgaagctagcttttcattagagtccataatggttgctgtatttcagatagtagcaaaatatgcctcaaactgtgacggaatccagtctgtcttttctgcgcagttaatatgggctctatataacttaaaaattatataattcaaaaagtgggtacaactaaatgtcccccaatttgggccatttaccctctggttatctcctctcaagttgctcttctttgtctaggctttctgttaatcctaattttaccaaatttctctttgtggcacccccttccacctatttaagtagcattgacaaacccccctggtggcactgagaagtagaaatgttgctgacgcctggtctttggtacaaagataaggtctgggatcctatcagggcctctgtgcggtggtatttgctgttcctgaacctctctgtgatggtgagaagtatgtgcttccagggggcggccaccgagggcagcctgtatttgctgctgttcagtaagtttgagaaccacagttagatcctttaatgcatgaatgaagaaagtattaggagttgagtcttatctgctgtgtaatctagaatctgtggaatagcagagaagccacttatttttaattttttagaacgtttttatagttccacactgttttcctaaatagctcttcagggcatggaacacagcctgcctttttgatctgaggaactttcatggttgggttcttcctgctttttattgaaagttacatatgatatatttaatctggttttagtatttatacatgcttcctgagttctttgcttattggttttttttttaaatggaaatgagatctaaaataatacctaagtgaccagtcaccacaataatgacaaactcaagtttctttgtgtggttagttttatatttttgccctttttatattttctgtttttgaagtattaattgatggtttaaataaaagtaactctttttcagtgacaatctacaaaaatatagttaaactggttagaatttatattctggtctatgcgtgggcatgtacctacatcgcaataaaagtgaagcaccttttcacataagtttctcattaattcatgtacttttcttcctctagaaagactgagtcttccttaatttggggggaaactgagggaccaataggttaacataactacagctctgagaaatgaaaggtcacatgagagggagtccatgactcatagtgggacataggaaattgagacatttattgagttctgttttctgcaccctactttcaaatcaatatgctattcctcctgtgagatggcctggaatatgacagccctcacttccatcttccactccattgtgggtatcagtaaataggtgtgattcagaaagttagcagtaattgtcaaaaatgctttggaatgatgactcaggtcacacagctctctattgggatatcagcattgggatcaggacattcttcttggtgatggctgtgtgactcacaagtggggctctgtctctctagtgtcggagccagggctgcagttggtggtgacatttctctgtctgagggctttgctgtgtcctggccatgacgtgtgggtgtggacgtgggaatggtaggaagcatgcgttttctcatctgagcaacagaagggggaatcctcccttcaaacagatagggatctacagctgtcgcttactccttcctagtatttgtctatcatgtgatctgtcccctcctcatttgcctgggtcccatagcacttcgtgctgcctatgaacatttcataatctgccttgttttataggtgtttgtcagcttgtctctttgagggtcgctggggagccttagtcctctttgccttgcagttgccccagtgccatctgtgtccacggcagccacggcagatgaagtcagtctttgtagacacattcagtgagttacggtgactggcagtgaattgctgactagattgcatccattcaagagttttgaaggaacctgaggatgaaattgcagaactcttggctcagatgttttgccttttataaatagccactgttttcaaagcttggtgggttgccagcacaaagcatggtgcattggaaaggaaaatggcctggtgctgtggaggccccagctcggtcaaatctacccataactggctgaatagttccacgcagccttcctaggacctcatggtcctcagccggatgtgtttgctgtgaagtctgtggtaattgtcagtgtcatagttaaatctcattaaactgggttcattatacacgtggacgtattctatggacaggagcgatttacattaagaaatcagatcacaccgctgatttattcattctttgtttctatgaatgataatgttgtagagactgaattctgctatattcctcccgaagatgttgattttgttgctgcttgtttgcctgctttagcaggcatgtaatttggcctgacccacactacacattctctgtgtttgcagtgggcagcaactcaaattttgatgtagatctttaatccttagcagggctgcttggaattcacctggtttttgttttgaaagctccacattgcttagatggggccctgccctcaggctaacagccctaatgatgggttgtgtacccagggtcatttccttttccaggtgtctctcccagcttttgtcattctctagtgcctggagagagtcgttttttataaatgttccctgtagcagggcttgcccgggagttgctgctcaggacaccaaaagtgaaatgttcactccttgacttcagtactttccttgccttctaattccaagtctacatcttgctgtggttgtattaccatgctagcatttgcgatgcttttcttgtactattttggcaaaaacaaacacaaatgggggtggggaagtggtgttttgttttttcctagagattgttctgctaacagtgttagttactagttttggtaggcatccctgaacctagatgacctctgttagagatcgccgagagaaatatccagttattatgatgagtatggacattttggaccccaaattcccacgtaggcattcaccctggtgagctgggctagatatttttgggctgcaagaattccttttgcttagatggattttggcctaaattgcctattgcatgctccttttctacaatattcccactgggccttctaagatattgggagcaggggcagagttggtttttagtgagaagagggaccttggccacctctgaagctggagtggcactgggccgtatgaccacattagccattgacattcctccagggggcatgacccagaaagcctggaaggagaaagccaggccccagctatttataatcccctctctccgccttgccactgtgtatttttaaccagaccctgaagtctgatggaatgaggcattgagctccccctagaggttttaggatgtcacaagcagcaatttttataaagcagtgttgctgttttctttgtaccagcaaagatttatgtacattaatctacataaaaattaagatttggtaaataatctggactgatttcatatcctgtctccttttgggaccaagttgttattgctagaaatgactcagagcgagccttttggggacatgagcctctgggtctgtgtgcaaatcattaaacattaaaatagaagacagttttgtgatcacagacatggaatttaaatgttgtgctatgatcatgtttcttaagttgatttaatggatgtggataaagctgctgtgttggcattggatagaatggttaaggaattaactgtcactctggcaacccagtaattttattttctccttctgtatttcagggtttcgaaaaaacgatgaaatgaaagctatggatgttttaccaattttgaaggaaaaagttgcatacctttcaggtaaagtttaactttcaactctgctctatccaactgctctgacacaatttcagagtctgacgtaataaatgaactcacctgccacaacatataaaaacattggcatttctatgaattttgaatggctttattcttgtagcactgtttctgagaaattagtgcccaaagcattttcttccagttaggaggcacatgataagttagttagtgttggtgatgaaaatacatttgtttctgccattcaacaaaaattcagctgttctgccccaatcagttaagtaaaaaaactgattttaaaaatccgatcatttcaacaaagatggtgggaatgtgatggtatgtagatgggtcctgaatttctcacttttgtttctcgtactctgtacctgcctctgttgccttgtcttttgggaggcaaggatgcctgcttctccttgagatctgctcctttgtggctctctggtcatggagtaactaggacccatgtcatggacgatgaagccctggtgattttaccagctgagtctgtttccctgtagacccagtctttgaggccctggcccgcccgcagacagactctgggccagtcccttgggcttgggggcacctaactgccctctcttctgcacatagtcagcgttaggccgttttggactgtcttcttggggcctccctcccacataaacagaacagcccttgggtattataccttttggaccccagttcacttgttaccaaacaaagatttgcaagatttttctgctctatcaggaagtacatctgtagattgtcgtcacatgcttttagatgaatttcccttgagaatttttatctttcttaaataggcattctgtgctgatctgtgtatcctcttgaacacatatcatttttaatatataacactgctagctgcttttataagtttttctgtcctttggacatgtgatactgctatatatttaagatgcagcttcctatggtgtttttgctaatcttgttttgcttcatgttcagtaatatttcttggcccctgttaatatggtttgattttgtgggagtaaatctaattcattatgtatttggaaggttcacagaagagtgtaaggagttcatgaaaagaaggtgctttaaattgttggaaatacatggtgaaaaacaaatactggcttacaataca

SEQ ID NO: 43820 - DNA, 749 bp, Homo sapiens
tgtggcccaagacaattcttcttctcccaatgtggcccagggaagccaaaagtttggacacccctggtttaagccatggggcagagaccactggtggggctgtgtgtaagggcattctgtcatatggtgcagcattaaaccataggtgaaagcaggagggagctgagtgaaccaaaggactctttgttagtgcattgtcctagaaagggtaggtcacatcatgacctgataatgtcaacaatgagtttcccagggatcttgtcattgactcactcattcattcaatcagcaaatatttattgagtgactgcaacgtgccaggagctggacagtcagcaagacagatgaagtctgtgcattccatggtatagggtaaaaaagctttgcgtgacatggggaattttattcagtatcatataaatgttatatcaacccaacaactcttcctaactcccttctctattgccagcttccgcccccacctaccaccatggagcctgaaaaagctaaatgctgctttttcatcttcccttgcagcccgaatagtcacatgataccattctgtgtaatgttacttaatcagttgtctgctgagggcttttgggaaggaatttgctctatctgatggaaggatgcatgtagccaatgctgactcttccccttcttccttccctggcttcaacagccatcatgttggaaggaccaagagtcacagggttgaaaagcaggagcaacaccagaatgcctgc

SEQ ID NO: 43821 - DNA, 738 bp, Homo sapiens
ttgttgttacaggatcccacccaggacaccagaattacatttagttgccatctctcctcttcgctgtgagtttctcatacatttcttgtttttgatgaccttgacagttttaagagtactggtaaagtattttgtaggatgccccactaatggaattgtctaattttttttttttttctaattggactggggttgtgggtttgggggaggaaaaccacagaagtacaatgccattttcatctgatcatatgaaggttacatgccatcaacatgatttatcactgagctcaggtcacgtattaacttggtggcctgtttttaagttttcagtttctaagatccagtagcaaaccaaaagttgttccttaaaagtagagtagttacccacaatgacagagatttgcttcaaaatcctaagggtttgtactgtgattcacctatggttgcttgccaaaattctaaacagtgtttacttatcttttgggagaaagggccttgctctgttgcctaagctggcgtgcaggggcatgatcatagctcactctaacttgaattcctgggctcaagggatcctgcctcagccttgcaagcagttaggacagactacaactacaggtatgcactaccatacctggctaattacatttttttttttttttttttttttgtggaggtggagctggtctcaaactcctgggctaaagtgatcctccccccttggcctcctaaagtgctggg

SEQ ID NO: 43822 - DNA, 3487 bp, Homo sapiens
ccttcttccctctgtgcacatttatctatgtgtccccttctaagggcgccaaccattcgatttagggctcattctataccagtatgacctcatcttaaccaattacatctgcaaaaaccctatttccaagtaagttaatatcgtgagggtctaggtggacgtgaattttgggggatcctgttcaaccctcctcaatcccacaccttaatagtctttgtatattcttttgtacactctgaattttttagtatgtgcatttattactttttcaagtaaaattaaaggagaaaacaatacccccggagttctgtggcactaaatataaatattctttctgtccagtttctcccttggaggtcactactatttagtctccctaagctggtcttccaagtcctgcccttctccaaacttttaccaaactgaagacaaagtgatttttcaaaatgatctcaagatctgtcaatgaggattaagcataagcgccacagttagcctaatatggcttttcatgatctggtctccactacccctctttcagtttcatctttcaatacaatcccctgctccctacctgttccgccctggactcctcgcgggtttctgaactgcccaggccattccatcccgccctattccggggctgcactctgcttcagcgctgcttcttgcacccacgactgcaactcaaccgcagaggctactcctctactccatcccagagatgaagcatttcgcctttggatgcttgaaaacggttaatattttcccttttgtttctcttaaatcaaaatgtttacatgaaatactatgatccaagaacacacactgctgcgcttgcttaaccgggtcgagttgaactagttcgtcttctccgccccaaccccggtgccgtaactcccagccccggagcaactagcctggcccgacagcggaggcccaagcccgctgggctcgggcgttggaaccgtcccggcggggggaagcccgggcaggacgcagccgcgcttcacagctgaggaaaacccgctgcggcgtagggcaacgctcagaagccgagagtggcaccgcgacgcgccggaacgcgtcagcatccttcacacctaagaccagacttcctcctcctcacccaggacgctccccgccgctcgtccggtcgtttcccgctctcacaccctctgccagtccccacacagctgacaagggaagcaagccagcggcgtccggggacggagcaagcgcagcagccgcagcgcgcggttccccctccaggccccggcgactcagcccgcacacgtgtatgcgcatgcgccgcgtccgggcccttcagcctccggccgcacctcctcgcgcagggtcagaggccgtggggcgggccacggtgacgcgcgcggaagcgctctgcgggccctcggaaaccgccccggcggctgagaggctgcggccactgcctggcaccccgacgggaggggctccggatcgttcggagccggctgaaccccttcggccgcgagcgaccgcatgagtcgggggactatgccccagcccgaagcgtggccaggcgcgagctgcgccgagacgccggcgcgggaggcggcggccacggcgcgggacggcgggaaggcggcggccagcgggcagccgcggcccgagatgcagtgcccggccgagcagtgagtccgcgggggcgcggggcgcgggccgtgggcggcgggctcggtcccctccggaagccgggctggggtggggagtcgtcagcggagggtcctgggcgtcttcaattctgagtgaggccgttggcgacaaggaggaattggcagacagttttcccagtgtccgagtgcagatttttaaccccagggcccctcacaattctggtcacacagtgactcccctctcgtctcatttttgatatctgcatgtctgaagttaaagaaagttccagaaacttgggaagcaaacccgagaagtgatgtattttattactggttcccgctagatctttccttcagcctggcacagggaggaagtgaggtcgaccctgctgcagccgccggagaacggcgctgcgcgacttgttcttggaggcgacgtcccacctgttggacagactttggacccaaagagaatctgacccattctctctgaccctttaacggcctgactagtatgccttcccgcttttccttttgaaaaggaaagtcagtgctggttagatcaatttcttactgtactgtgaagacgacgatttgggaagagttcctaatttctgcaagggtctgggggtacgcgtggaagcagaatagaaactcgagtgaaacttttctacactttcaagttttaggcacctataaatgcccttggaatttaagaaattatgaaagcacacagacagccagtttgacagatattttaactggctggaaagttaaatttaagatgtgtttaaatgcaaaaagcactgctagaacttttgaaaaaaaaattcctaaaaaggggtcctttggaggcctgttaggtagatattgtgttataataacatatttgcatagtacttagacattctcatttgttgagagcccccttgggatggtgttattcacacttaatgggttaatggccactggaaaataagattgaaagtcagcgggattaccttttagcatgagattggaggggagaaatatccaaatcatatcagagacttaacctcagactctgcagagggttaaatagagggtctcttgcccccaagccctgctccacggcccgtgctggttcctaatcgctgctttgcctgccttctaccctggtggtgagaacagtgcgcttaatttaatgccctgtctcacgtgctgcatgcacctcggccccagctgtgtcatgcctcctgagcaatgcagaaactttgaagccagaccatgttctcagaagtatatgtagttatttggcaagttttctggtggacatgattctcattcagaacacctgtgaaaacagacaatgataggaagagtgctctttcttgaagagtttttgtggcacaggtgcctcttctgtctgctgctagtagaactatatagacttagagctgaaaggaatgtaaaaaaaaaactagcctaggtttgtcattttacacattcacagatttttaaagtgtagcttggctggagagaccctgatgcatcaatgggaacctccccctacctcttctgggcttcctcagcaaaaccaggcagagagacatgatttatagtgacagccaacttcactttttttccccccttggtttgcttcccaagtttgcttcccagtagatgtcccggtttgtgtgtgtggtttttagcagcttaattttgctttttccttatttttgttgcgtttgattatctcattctctttcacctctcataagatggggcagaacaagagaggtgagtttaagatgtcaccttttaaacatcatgtctcaagttttggactttct

SEQ ID NO: 43823 - DNA, 1805 bp, Homo sapiens
tcatcgcatttcacacgtgagagaagtgggggaaaagaaacattaaccacatggataagctacattgttttcttgttttgtgagacagggtcgctctctgttgcccagtttggagtgcagtgacaatcatggctcactgtagcctcaaccttctgggctcaagcgatcctcccacctcagcctcctaagtagctggggcaacaggtgcacgccaccatacccagctaatttttttttactttttgtagagacagagtctcactatgtggcccaggccggtctctacctcttgggctcaagcaatcctcttgccgcagcttcctgaagtcctgggattacaggcgtgagccacagtgcccagtgatgaactactttgtatatctcattgcagtttttctttccctccctctcttccttccttttttccatacacccagcagctcatttgagagctgtggttggctcacatctcctggacaagtcctaaggatggcttgaaacataacttagggtcatatttgaagaactcttttgtcagaccagattagtttaccttcaagctccctctgctgctctcctatgctctatcccctgctcactccacccccaatatctgactcctgctgatctggtcctgggacatggttgctggctaggccagaaatgcttagggaattgagaagagactactccatggcccttctctgcctgtctgagggtgagacagggtttgaatctgtggaggcatactgtcggtgaacccctctgaaattgaaagcaattttatgtatgtttctgggcttaggttctgatgaaatctgaattctcagaggggctgtgaacaaaaaaagtggcacactgttgttcttgtggatgtattttctgccccaccccacccccagatgctgctacagttcggagtagggataaagtccactttctcccaacctcatgaagagcctgctttgaggcccagagctgggatgtctctaagaatcaaaccttattgagagtggctgcattgaccccggatacctctggaagtcacatggagtagcatgagccagtcgtggaaagtccacttgcagaagaggggtggaattttggcctgggtgccggtactttcctgtatttgatgtgttgttcacccatctctgaaccgcaaagtggtgaagaaaggctgggttgagtggtctttgcttttcctgtgcctgtgtgggaaggtgtgttagtgtaatattggttgacactgtctcaccaacattgccttagtgttgacattagtctcataggagaggctaagttaagtatgaactgcagggttcaagtccagagagttgaattaaaaaaagccatacttagttcttatagacgactaaggggaacaacttttaaaaagttcataatggtgagtgattaaaattctgtcttgttagctttgcatatacattagaattgattttttttctgtacgtatttacttgaatcaaaaattgaaaaactggcttcacagaaatgccttcggcttcactaagttctgcttttaactcacagcttttgctcttgggaatagtataattttgtgtctgtacagtaagcatgtttaaaataagttttcaaaaattggttggtatgcaggtctttgaacagaacaagtggtaccagttataatttagtatgcaacgttatatagcttactcagttggatatgttgccttaatatcaaaaataaaatattttatctccaggttaagagaaaataggtaaataggccgggcgcggtggctcacacctgtaatcccagc

SEQ ID NO: 43824 - DNA, 3225 bp, Homo sapiens
cataactatagtgatcagggtaattagcatgtccatcatctcaaacatttatcatttctttgttttgggaacacctaatatccttctagctgtttgaatctatatagtagattattaactgtagttatcctacaatggtatagaacactagaacttactccttctatccagctgtagttttatcctttatttgtatcctttaacaaattttaactgtggaattgaggttgactgccagaaaatcaagtcatttagactttggcttaacttttctttaccacacaaagaatgtgtgatctggtgatcacctgagtcactgagcttcagtggtttcttttgtgtcagagtggatacctctccaccaccaccccaacttgacacacaaaaggttgccaaatcccttttcctcattgttttattatcttcccatcccataacaaaaacgtaaacttaacctctacctgttccagattcctggcctttagtatcatttcattgtgtcattgttttcagctttattattttaatacttaaaaaattaaagcaaaagtttattgagtgaagtatttttaaaataaaattattattttttggctctgtttcttcctctctttctgtttgcttatctttctattagacgggtaactatttcattctgcctgcgaaatgtcctccttcctgaatatattgattgcgcttcattgctcaaacctaaaacttattcttcgggattattttttaaaaattaattaactaattttttttagtgacagggtctcactctattgcctgggcaggagtgcagtggtgtgatcatagctcactgcagcctccaactcctaggcttaagtgatcctctctcctcagcctcctttctaggggggattacaggtgagtgccagcatgtccaattaatttttttttttttttgtagaggcggggtcttgctttatgcccaggctggtattgaactcctggctttaagcaggattatttttattttaatggtggcctttagtaaaggctgtgttacattttctgtatgtccttggtggccatgaagtaagcagatgtttgtgcacaggatctgagtgaaattcagttgtggttaaagcaatttgattatactctggttctcttattcttccatttctgctttgcttttttcatatatcctgaatctgtgctctttatttccagtaatttcccgttcagcttccctttgcatttagttctcctgtttgttctgctgtttgtttcctttcctttcctgttggcctttgtaggaatttgtacttgtgggatggagagttgcttgtttagagaacctcctctgggcattgatgttggattttggttattttgtagattaaaaagaaagagaacaaaagtggagccaaatgtgcatgtagtatagccacagattttgctcgaagtacagttttcgtagacttagactaaagaactggaagaggaaccatgtagcttacacggcctcttccagtcttctcattttgaagatgagaaaactgaggccgtggggaagtggcttgcccaaagatatatgcctctgataatgatactatgaaagtgctttgcttaaatgtctgttttacaggattggaatttgtcccttattttataaagccaggaaaggggctgaaagatgttaaattattgagagaagaacgaacacatttggtcacttttgattttaggcctttgatgtatggtccccatgaatcaggtttctgtttgtttttacctctggcatgggctctaaggatgacatcacactttttacttgaaatctcactggaagcaaaagcacatggaaagtacctttttctgatacttgttcccttaccctcacaacgttaaaatacacacagttacacatttagagagaaaaaaagaaataaaaattgataattggtcagattgttcattaatactttgcaacagtggatataaaatgagaataagaatagcttacttaattttgagtgctaattattttccatgtatctgtttcttaaaaaagccctttaaggtgaatactcttactgcccttttgacaggtggttaaatctagatgccgagaggtgtagttactctagtcatagttatacatacagctaataaggaccagaatgaggactagttaaataaaccctggcagtctaattcctgggtccccactccaatcattgcactctgcatgcagagggcttacccacatggcgtgtatcgtgatgtgtttggcagggggcaggtcaggagttgtgggccgttcaggaagagggaacatctgagcaaatcacagatgtatgggcacatgataatgttggtcaggcgtttggactgaagtgtgagtaatgcatagggaaataatgggatgcaggctggagtggtgggtgaggtcctaattttgacattggttccctgagtgggaaccattgaaaggttttagtggggacatgtgagacttccttcctcagtctggccctcccagtaccccttcttcatctgtctcttgctgtctgacttcttcctctttcccccagctgtactaggccatataccaggagctggggtgatgagggaattgggggtagggatatctcagtcattcactgaatattttttttttagcctggcacctcctccttcctgtgttccactgggtctgcagccttgtgtgaggatggggtatgcgctcatgaggcaggagtatggggaatcgggggtctgatcattgcttatgtgaaggtcagctagtctccttgttttctgctcagtgtgttactcatgcctcctgaaggacttgatgcctccagttcctgagcctttctggggttctgccaggttttctgacttgcctgccacggatgcccatctcccagccttggcttccctgtcctgtgtcatttaccactccatctgctttccagctctttggactttcacctgtcttctggtttcatgaaagatagaatttgggtttctgtttccctttattgtcattttggggtgaatcttgggggaaaaggggtgcatcttcaaaccagaagtcccattcttcatctttgtctagcatctagtggattttttccctttgtagtacttagtgggctcttgctagttaactaaagtactagagactaggaagctctgagtaagaagtcggtagtagcggacagtgggaatctatgtaacagctgc

SEQ ID NO: 43825 - DNA, 2028 bp, Homo sapiens
ggtttttgtcatctaattgaatgccaagaggcctctgtcagagagggaaaacacagtgtacctgcctgtgggtttgatatttatgtttattaaacgttggatctgaatgttagctgaagaacgtctttgttctttccttgctgtcatccagccagaggacttgtccttgtgttgctgttccagccctcagcaatttaacatagtttgaaaacttgctttacccagttcgttttgtggtatcacgtctgagacatgattggatgacaaattcaaattcagcacatgctttgtgtttgaggggccagtgaaggaaggaagggacccataagcttactctggttgtgcaaatctaccaggtggcccgcagaccctcctgtggatgcctttccattcctgttctcactctggcccccctggccccacagcccttcccttggaaggtccactctgacaagggctttgttgagtgagcgtttcttgcagtgtgactgaaataaatcaggggtggaacctttagctagctttatctgcttctgtttgcagattgagagatgttctctgtggcatgttgctgtcttctctgtcttttagaacatcatttggttttagggtattaaagggagctgggaaagctagactgagtgaccctccccttaatctatgctcggtgaagaagacccgggcttcctttctgctgctgctcagctttgctggccttgctctgttccctgcctgtgaggcagagctttgtccttatttgcccctctgacagttcggctgtccctcacctcctgtcatcctgcccaggtgtcctgtttgttgttcccatttctgcccagatcccagtctccgtgtttggctgcagccagatcatctgaccctcaccccagctatggagatggcctagcctggctctcaaatgtgggacaacactttggttcctgaggagggtaccctttagagtttggtttccaagttcgttacattttataatgtctctgaactggttagactgtgacagtgtttgcttagagtgagatagactgtgtatcaaaatttttttgtaagttttggggatgacacatttttattatttgctttctgttgtggtatcaagaattaccggcatatgctagagaaaacaggctgttttatagtttagtcacaaacaaaatgacacctaagctaattacctactttattcttgaatatttccaatcactgtttcttgtttaaatctggtttcttgcttaaattttctttattctaatagaagtccagtttgtgcttagtggaaaacaaaggttatttacgtgtgttccatgtgctgtgacctctgaaagcgtttgaagttgtattcacttttttcttctgaataaatttgacttcattcttttctgatggcttttttcatgcttcattttttaaaattgtcttaaggatttctgcatttcctggaagtctacaaccctgaactgtttgaccagtgtgtgaagggaatcagaaacaattgtttctctctgtgtagttaggtcttcagggtctcctgagtaattcagttgagtactgtacctactttttagataactgtatcatgtccccagatgctcagccggtcttctgggcttcccttcacctcatttcccagctcacatctgtgtagccagtattttctgcacatttgtagttctttgtgcccaattgtaattttagcttgttgccacttgagggcatgtgaggttcttgtgataaatctgagagactgaattgaaggttttgctgcagaactgccacatgttgccgaaacgcagggcagtgtgggcacggagtgggctggtgcagcctttaggtgggtggtcatttgttattctaataagatgaggaggagaagtccctctccacccttagtgagtgatgtagttcgccatcactgtggtcacagtgaaaagtaatttacatcccaatcgtggttctgtgttttgtagaaaccaccttagttcacacgattgctctaggttgagaaggtac

SEQ ID NO: 43826 - DNA, 1801 bp, Homo sapiens
ttataaatcttgaatattttcataaaggagttgaagcaatcatcaactgttacagcatattcacggtaaaaaatcaacactttcagatatagttttataaccagctttttgaagaatatgaaaactaaatcatcccttctatcatctaggtttaatgaaattgccaaatgcacacactacatgaaagcaaagtgtctttcagatcccaacgacttactaatctagtaatgccgcgttggtggaaagacatgacatacctcaaacagcagggggcgccatgcgccaagcccgcagagggttgtccaactcctattccttttctctgcagctttaatcctttcctggtttttctcacaggatctgaggactattgataaagttccacactccagcttctgtttagcctttccttctccttgactattaatagtcaacttggaacttgtttgggactgggggaaggggacatgaggagtgactgtttagtgggtatagggtttcagttttgcaatcccgttatgggcagatggtgatgacaagcagcaatgtgaatggacttcactgtccctttaaaaatggtgaggttggtacactgtatgtgtatttttctacaattaaaaaaatcttaaaaacatttggaacctgcttataacagcacactctgttcatttgctcgttgtttaaatgacacatgtgcatctgccctggtgtcttattatgagggcttaggtagagttttagggactagcctttattgtcttcatcttacctaaattcccccaaaacaaaccaatcaaccactcaaatctgctatacgtgctggatttgagcaaatgctggattcctgaagcttccagagagaagtgcggagggaaggcagagggaaggaagtcactcactatgcgccaacagcgctccatatgtgattccatttcatcttcatacactccccagatagatgccttattagctgaggaggacacagggcctacagggactgtgtgacttgccccaggtcaccggctggtaaagaggcaggggccagagttcaatccaggccttggggccgcagaagccctgctttctccctgtttccaagatgccctaagctgctaaactgttcaggcccaagggtactgtgaggggcaccaaatgagaaagtgttgaattccattaattcacctttggttcttttctcatcccccatacacaagagaggcattttcttccagtggagccgggaacaatggggtggcagtctccacctcacggcgtgggggtggggtggcccagcattaacaaagcctcaaacaggccgtctttgttccagacaaagggtcagcatggtgccaccgctggaatatggcctttagcatccgcccaagagggctgagtgacagctatggcttgggggaaggttgccacaggaaggtgagacagggtcattctcatgaacggaatttctaacatggaacgcagggccagccgggcaaagtcctgtcggatggcaagttttactacaagctcagattctgctaccttctagcacatgacagaaggactcagaactgacacgccttactgagacgcagctgcaaataatggtgtgcaaccaagacggtggagtccttggggtgccggcccaagcagcggcaagacaggagcagcacaagctcaccagggcgcggaaggccctctccactacacatggacagtaggtagaaatgggagtggaggagcccatcctgacctgcaaggtgcgtccaaaactggccctgaaatgatgggaaaaaagcctttt

SEQ ID NO: 43827 - DNA, 1029 bp, Homo sapiens
gatggaaggaggcagctgtgatgtccctgtcgtttggatcagaagctgtgcagagatgaaaaggggattagtagaggtttgacctgggaaggcagggagggagagctcctgcctgattttgcagccaggtgagaattgcatttagacatgagctaagctggctgaaacacaaagccagaatgaagatgttacttaatcatacagatgatctactttgggtgccgaactgtggaaattttgttcaaagtttattgttgctgctgctgtttatttgcacatgtgttttcattcagtcaacaaatgttcactgcgcagggatctgcaaggagaccatcctgaccttgcccacattgctgtccccacacccacctctcagctgaggccactggcaatggtaaaggcagctgtgccaggcgagtagagcaacgaacacaatgccaagtgcaagagcacagggctggctaggaatagctcatgagctaaaatcccctggtgaaggttacggtcactataaaacaccagctgaggggacttgactgccatggttgaagctggggactatggaattggtgaaagggcagtgttgtaagctgaactatgtcccttcaaaattcagatgttgaaatcctaacccctggcatctcaggatgtgaccttatctagccataaggtcactgcagatataactggttaagatgaggtcatactggagtagagtgggctctcaatccaatgactgatgttcttataaaacggatattcagatacagaggcagatgcacacagggagaactcagtgtgaagatgaacgcagaaaccggggtgactcctctacaagcccaggaatgccaaagattgccagcaaacacccagaagctaggggagaggcctagatgacagtcttcctcatatctctcagaaggaaccgcccctgcaacaccttgacctcggacttccagcatccataactgtgaaatgctcaatttctgttgcttaaaccacctggtttgtgatactttgttacggcag

SEQ ID NO: 43828 - DNA, 2573 bp, Homo sapiens
aattgaacaatgagatcacatggacacaggaaggggaatatcacactctggggactgtggtggggtcgggggaggggggagggatagcattgggagatatacctaatgctagatgacacgttagtgggtgcagcgcaccagcatggcacatgtatgcatatgtaactaacctgcacaatgtgcacatgtaccctaaaacttagagtataataaaaaaaaaaaaaaaaaaaaaagaaaaaaaaagaaatggaaataaggaaaaaaaaataaaataaaatacaaaaattagctgggtgtgctcatgtgtgctgtaatcccagctacttgaaagtctcagaagggaggatgacttgagcccaggaaggtgctgcagtgagccgtgatcgtgccactgcactccaacgtgggagacatagtgagactctgtctcaatcagtcaatcaataagtgtcataacagaaagctctgagttttttccaccacagctttctatttcttcttgacataaactgttcatgggatgaaatgatgcctttctgcaggtatgaaatgtagaagcaaatatgacctgaaaatgttcaattctcacctttctgcatttcccagacctttcaggctaaggccagggaccacttgaatgagaagcctccaaagaaaactctggacccacaggaagtggggtgatgactcaataggagggatccttcctctgagtcagccccgtctcggtgtgaccctagagcgtgcactgggctctcaaagccacaacagaatgaagatctgaaacccagattttgctcacaaaggagcctacacaggaagttagtttctgggcgccagctgaattcaagccacagacacggactctgtttgtgttccctggtggcactagtgcctgttttcctgactctgacttcctgggtctcggcaccacagatagcttctgcgtttctctacaggagggaagaagcaatttccaattctgagcttcatgagggaggagaataactactatgaaagcataaaaacgattgacttttttttttttttgagacagagtttcactcttgtcacccaggctggagtgcagtggcataatcttggctcactgcaacctcctcctcttgggctcaagagattctcctgcctcagcctaccaaatagctgggattacaggcgcccgccaccaggccagctaatttttctgtatttttagtagaggcgcggtttcaccatgttgggcaggatggtctcaaactcctaacctcaggtgatccgcctgcctcagcctcccaaagtgctgggattacaggagtgagccaccgcacctggccaaaaattgattgacttttaaagtagaataacagtgagcatgtttgtacatgcctgcactgatcacaattaactttcagtcagttcacaattaactttcattgatttggagtttaaagtacccaagtgacatgactaattacagtaaccatgaattcagtgcctggccatttatcctagcaatttcaagtctcaggaatctcttgcagcattaagaaaccagagagacaactatatgtttaacttctaccttctgtcccctgagaagccactactcatcttgcttccctcaggatgaactttctgtttctatgtttaaaagtctgcaaaataaatttaaaaaacaaacaaaaaaagcagactcagtatgagatcaaaccttacgaatcattgtcaaggtcattttttacctcttctatacctagactactgggtgggatagtgcattcataaaattccagattcaatgctctcatttccatcgtgacaaaatgctactttatgaagaattatgatttctacagggtgctgtggggtgaagaaggaagggggggaataaatggaccataaaaagcaaaagataaatcatggtcctgcaagtgcagatcatgatccctccagtagactgcacagcctcctcactaagttaacctcattgccccaagcagcataatgcattctgaacacgttactttggctggtaacaaaacagtcactcggctttcaagagtctcggctctgccagtgaaacaagctcagccgcttcatattccttcatattccttattcatacacgataaaaagacagtgctgaccaataaccacagcacagcgacagggaagggggaaaagaagagaaacctgtgcggtcttaataggcaccaggactgttctctgacctctccactggccactcagacacacactttccacacgaagcctccatgtgcaactgtacgacgtcagtgggaggcaggattgctggtatcagctaataaaaatcccagtatactgtaggtccttttgaattgcctggtgggtgcgtactattggaactaaccactgaagagtattctgataatggtataccctgtccccaagtacaaacaaccttgtgtgatatgaaaataacaaaaagaatattgaaattctgatgttcaatccacttgatttttagtttcctaacattttaacatatttcaatttcagatgaaacctcaaaacatactttccttgtagtc

SEQ ID NO: 43829 - DNA, 1895 bp, Homo sapiens
gacacctgagcatcaccttcagcgagtgacctctgcaggactcagtatcctcacatgcaaaatcaaagaagattggtttagaagctttaagaaaagagagagaagccacttcgaatgggtctaattgtaatttcttctaaacttcaaattgttgtgtggatgatttttttttcctcacaatccttttatttgaacaacctgatgtagcatcagagagtgacttggggtgtcagagaggaacaggacccagcatgagaggaaggggatgattcattcgaacttgtcaaactcagaagggaaaataaatcatgatcatcttataaaagcgacgtaaaagcctcggagatgactcttgtttctggctctattctctcacaaaaggttttatttgggcatcaatattttcaggaggcccaagggtttcagtcgactttcttggaatgttcatgtcaagtacatctgactgttcttcagtagagtctctgtaacaggttggtctggcaccaagaaaagcttctcaaaaattcacccaaccaagaggcaggacagtcaacactgcaagccacgagctttggccaggatgaacacgatggcaaacaaactctcccacggggaaaagaaaaacactcatttgggatgtgaccaaaggaaggaccagggactgagagctcgagcttttacctcgttgcacagatctcagcctttttagatggattgccgtgagttgctgttggatacaatttttaaattaaaaaataacataatctgcttcgatgatcccataccatggtgttttctaagttcaaatatttcactgaataaagtgcttcaattcttttagacataagctcccatttttctgttgtttttgccaaatagacagatggaaaggatgtattgtgcaagagtctaggattgggcaccacagggtagaaatgatgaatcaaagcttactgattctgtttggctttctgtggtgcattttggcagccctgtgtggatgtgtcagaggctgtctgaccacgcgtgaggctcgttgatggtgataggtttctatgtgtgacgctaaaacgccaggaaagaaaaggatagaaactgctaaacatgagtggaaatgagtgaaatggaaggatgaaaataagaaaggcaaaaagggggtgaaagaaaaaacaaaaatcctggtgaatttaagaaggaatataggcatttctgaactaccatgagatggatgagatggagtacaattgtcatgttaaatgaatcttctcccagtcatatactctgtgctccccagagaccagctttctccttactcctcaatcctcctactgtatacagaactagtcaagaagacagacttgacctgatacagagtgacatctgccatcacttctgatgtttaggttcacaagtgtgaagaagtaaaaggctgtgaatttccccagggtattctgtctagagaatgttccctctgacatggctacataacctacagatataggcttcacctggagagaggtgtgtcaaccccctctttcactgtaaagaataaagggttcactataagagagggttaacaattttaatgtaaaagctaatgcaaaaaggaaaaagcaagatttaaagtaaccaatggccttggtcaacacggtaaaaccccatctctactaaaaatacaaaaattatccaggcatgatagtgtgggcctgtagtcctagctactcaggaggctgaggcatgagaactgcttgaaccggggaggtggagattgcagtgagctgagatctcaccactgcactccagcctgggtgacagtgcaagactttgtctcaaaaaaaaaaaaaaaaaaaggaaaaaaaaaaacccaatggctaggagtatttgtcacttatctc

SEQ ID NO: 43830 - DNA, 1470 bp, Homo sapiens
tccatctcaaaaaacaaacaaacaaacaaatctttctttctccctgtggttctgctgcccagataaacaggcagcagacagaaacccactgtggtatgtaagaataccttaccccaaccaagagtctgcagagccctcagatagctgtgactgcagacaaaaacccatctccatgacattttatctccacagccatagaggctgaaacaatctgttcccagcagggccatccttccttgaaagaaggaaaaaaaatagtctctgatgaaatgtaaataggaaaaaattaaaagtgatttatttttcagatttttttggaaaaaaaattagtcaagttaatcaagcagatctagcctagaaatgacatgtctgctgcatacgatgtattctcgtttgaaaataaaaaccaaaactggactagaagcataaagggcaacaacggctgggtgattttttccaataatagagatataaaaaagcggtttcttttttaatgttaaaattaagttgcatttaaattaggaaggaatgttcatggtcacgaattctaaaacacaacagctcaatgtcccatagaatcaaagggtaccctcaatattggttcatagaatgcgaatagctgtatgttaatcataatacaaaataagaagtaatttccaaacagtaccagtaataaataaaatgaacagttctgcagtttgtgagatcatttcatcagctgacaggagcgactgccaacactcctggttcccaaggtggtgctgaggtcccaagcccaaagtccctattaaattaccactgtaacagcccaaggagttagccctgatacttctattttctgcctggcccctgacttctgcttggcctgtcagggggcatatcagtagcctcccacctccaacagctctggttacacgccccaaaaggtgagcaatatcactttctcaactcagtgaaaataactttgaagaacaaatgtgataaagaatattctaactttgcacagtggaaaatgctttgagatctagaggtaaaaggcaagagattatcacctgttagcaacagacagacggatggtctaattgttccctatgtttttataaaactgaaacaaaacagtgtggaaagaaaaaacaaatattgaaaaataggtactttcctcatttggcttagaacaaatattgaggaataggtgctttcctcattcagctaccattaccaagatttttaaaagacacatgaggactcacaaaaacgactgggcaaatacccaactgccttgtggcttggccaaaagtctttaaggtacgctggtacacagaaattctaactactcagctattccatggcctatcaaaactctttctactactatacatctacagcttctatctgacatctgtttaaatatctacttcttggtgattttctttcttttttatttttttgagacaggatctccctctgttg

SEQ ID NO: 43831 - DNA, 1482 bp, Homo sapiens
acatatgatctagaattcacttctgccaggctagggctgcccaaccacaacacatcttgagtgtcttaagaatcagtctttgagaaaacctcctcacaaaatcattacataaaaagatttgttgcacatttcctgcgttttatttagacaggtacctgagaccaatataatctgtcctccccatcctcaggataaatagaagacataaaacatgaataccttctgtgttttcatcagtttataatctcataactgaataataatttcagcaagcaaaacatccacctagcctctaaaatgaccattctcaatattagcaaattaaccatttcatataaacccagggaattatcaatattctatttctgattctggttttgcaatttctggattgggcaagaggaagagtcacttatcttttgtctgtatgagagatggaggcatgaattgatgtgaagaaagtccagtgttttaccttggaaagcacctcactagaggatatactaaaatcagcacaacagactgaacacatacctatggacgactacgaagcaagaatttttatgtgaaggtagtaagcaaaattgttacatagacgtccttctgtgtatttgaggctgcctttcaaaatcatcctcttttattcctgggctcactgggcagccatatcagatcgagaagacactgctgcggcttgccccgtgttgaacttacctcctgcccagtacacgcacccacacaggctggaatgaccgaaggtggcgacagcatgagtaggaggtaatgaaaacgtgtccagtgctgggaagagtccaaaccaaacacagtcctaggctgcagtgggggaaggaagtggctggaaagttattccctgatggcttggatatttaaatattgtgaggtagggggagtgtgtgtgtgtgtgtgtgtgtgtgtgtctgtgtgtgtgtgagtgtgtgcagacttaggaataaaaaacaacactgctaacttagaaagttagaaaaataatttggtcataactgaaagagaataacagcaagtccgactaagatagcacggagctgcttgagagctccaggctgcagctctattttgtatgtctattttcccaaactgcctctccactgaccattttcccaagcactgcccagaaaggaatgtcactggccctactggtgaaacactaaatctgattcaccactttacccccaacatctagtctggtttttggcatccaaagggcaccaacggtcctgctttgcctgggactcgcctggcttcaggactgagggtcacagcccaggaaacccttggtcccggacaaactgggtcagttggtcactctacaaggtgccccatgtggaatcccttcctcagtatgccttcatagaaagttaaatcattcacttttttaagggcaaaaaaagaattttttgaatttcagcaccaggtacttcctctggagttgatcagaatgag

SEQ ID NO: 43832 - DNA, 2785 bp, Homo sapiens
aaaaaaaagaaaaggaaaaggaaaaaaaagaaatcccaaactagaaataaatggtcaagaccggcttatcaggacacattcgggatacccctaatccttacctggactacgaaacaaatgtttaaaaatggaagtacctgggaaatcaacttggacgcattataaaacagaatctccccaccgtcaccattaccaccagccatgggtaaataaaaacccagcacttaagctactagaaactacattttaattagagctgaggtttacataatcgcaaattacataatactgccgtgcactaaaaacccttccataggtgaagcttcacaccatccagtctttttaacattttccagagagggctggaaaagtctgctgaataattgaggggagggagggagggaatggggtgctggaaaagtcacccttgacaagctgcacacccgaccaaatgtttcaggataaagagggactcggagcaggtgactcccctccgcccccgtgtccgggcgtgtaaggccaaggcagggcgagcgggcgtggggcgcggggccggggcttacctgctccccgaagtcgatggctatgttggtgatgcccaggggcaccaagaaccggatcaggggccagtagtgcgtgagcgccgggaatttcaccatagtccccgccgtgggctgaccccacacacatctgctgccgcgaggggactctgcggggaggcgaggggcgacggggcgacggggcgagcggggcgcgggccgacagaggccgcgggcggcggggcctcgggcgcggcggcggcggctcctcctcgcggctgcggcgccttctccgagcgcggctgctctagcaggggatccgcaagctcaagtccatccctgctgccctcccacacaacaaagatctgccgggaaaaaaaagaggagggacggcggcggcggcggcggcggcagaaggttctgctgacagcggctccattataagcgctctggggcccggaaataaataaccgcgcgcacgaggcgccgccgccgccgccgccgcccggaggaaatcaggggcgggcgcggaggcgcggacaccgccagcggccccgggggcgggctggggagggggccgggccgggcgcgccgcggcctcctttcctgtgccgtcgcctgcgcttggcgcggccgcggggggcgctgcgcacgctcgggccgtggggctggcgcctccggggcgctgggcgggactcgccgcggagcctcggccggcccgggggcggcggcgctgagggcgcggcggggacggtctgggggcttggggacgccggtggggggtgagggcggtgggccgcctggagaccccggggtgccctggctcgccggccgggccctgtagccctcgtcccgtggggccgggggccggggttcccgcgctgtgccgggagggcccggccgtctggaagacttggcagccggggcaagcgacgtgggctcggacgcgcgaggagggctggggagcggggcgcggggctgggaagggcgccgtccggcggtggccgggctggcggcgggcggggactgcggaggaggcagcttgcgccggggctggggcctgcttcgggggactagcggcccgggaggtatggaggtgccgctccggggggggcgaaagaaacgtggaaaggtcgcccaggagggagcctgtcccccagggtttccaggggcaacggtggcccgtgtccctggaggacatgcgccagggcagcagggagtggtccccgcaggctcccaggctggggccggccgccttctggggcgctcagacctgtctgctgcagtttgcaaacagtacgcccgaattcttttcattgtaaaaaatttctattaaaaataactcgtaaagcctatcatctcttttaaataaaggggaagaaagaggaaagtgtgttctgttttgtaataccgggccccagtgatttcagggtaactagtcgcggtgctgagagtttgacctaaagctcggcagtgtgacagcaacgccagcatccccgcaccccaggactgtgacgcgagggaggaggacccagtgaatgaaaagggactctgggcagggctggcttcacgggcgtgcgatctgtgaagtcacagagggcccgcacttaaaaggactaacgcgctgctgttgcactcttgaatttgaacaagggtctctgcattttcattttgtagtgggcctggcatagtatgtagcctatcgtggtcttactattttataccaactctcacacacatctctgcatttaataaatataacgaagtaaagtaatttattattaaaagtaagaaactatcttgtacctagaatgaaccgattaactcacaatttagctttgtaaagcttttgtaaatagtgagcttgagacctcaatatcctgggttcaggtatttcccaactactttgaaagtgttaaatgtttccataggccgggcgtgagcggtgggcgccggtagccccagctactcaagaggctaaggcaggagaatggtttgaacccggaagacggaggttgcagcgtcacccatggcactccagcctgggtgacagagtgagactccctctcaaaaaataataaataaataaataaatatttccatattttgcatcctttttaaaatacttttttgaaattccacacaatttgagcaggctttgaaaaataggaagctaatttaccttgtagctctgatgtaacctcaaattacattccctatgattaaaattaaacttggtaagtatt

SEQ ID NO: 43833 - DNA, 2448 bp, Homo sapiens
attttgtgaacaggatttaggatttcatccctacaagaagaagaagtgagagcaaatggacaaaaattaattccataaagaaatcacagctctcctgcccattttccaatgggaattgagggttatttgttgaacacatcgtcttgggaagtaatctccttaaaacacagggattgtcctaagcatgcaaacatattttgatctctctagatttctgagatcttaagtatagggtcggctcaggctttgcctttttcagaaagtctttgttaataactcctctcctgtgccctctgggttagaagttcttttatactgcatacctatcactgggtttccatattgttttaaaattgtcctcttctccattagattgtgtcactaacagtcgtgcatacaacttcattcatgctcctgctgtgcccagcaaagtgttgtttagtaagtgattgctatataagtgaagagaggaaagaggactgccgtggccattctgcacttggcagagtgtaggtggggatatttggaatccaagcaaataaagtcaggcaagggctgctcttgtttgtgcatgactaatgtgtcccgctcggttgcgtcatccagaggctgagtgtctggcatgccgggaagcgctgtggttccctgcaggcggtgtgttctggccctgctggattcttgtagtggcctgctgcagtgatgtgggaaggtgggaggaggcacacagtgaagcccagagccacttccaaataatcacagcctgtcctctttaagggcttcttttttcttacctttaaaagaaaatactgccttaacacatcattctttaaattcttttctaagaggaaagaaacatcgacaatcacttaaaaaagatggtcgagagttattctgtttcagtgtgattccaggggaaagctgtcttggtccaaagcccaggaggtctttggttttctgtggaagatgcacggtagaggtctcagagttaagggtggaatgtttaggccaaggcatatcagctggtgggctaaggatgctgcgtcacagtgaggcttttggcatcgtcatcaaaggtggtttgatggagggcagaggaaaaagatggaatccttcaaagccatgatagtggacttgggaaaggggatgaaaattaaaataaaagaatcaacacagatgtcttggtttcttaaactaaagaagtgtggggtataattgttttcccaaggaaagctcaaattcactggaaaatatgcatgatttacataactatggtgtatttaaattacttcaattcttaaaatattaagataaacttttatgtgaggagagtgcctttatttaaaactgttgcaaattacatcgatgactttctataaccgtggtagacatgttcatttcacataaaagaatagacctgtcagtattcatggaaggctgacttctgcccagctttatctgtgatgattcagttcctttggctcagacccaagaaacatcaacctttgtaactctctgcccctttgtatttactttctaaaactgtgacatttgccaagggggtaaatgaaactcaatagcagcagctaaactgcttgtccataaaaagacattgttttgagtagaaaaggaattttaaaacgtattaattgacatgttgttgctgcaacaataaagaataagttaataatttctgtgctcatactgtagcttgttttctttttcttaaatttatactgtagcttattttatataaactttggtttttaggtcatgttcttaccaatcaacccatgaatagtaggacaaaatattacccaagccagcgccagcatattttatacacctaagatatgaggcttttatactgaatgggaggttcccttatagaagagttataggggcggtggctatatatatataatcttctctctctctctctatatatatatatatatatactctctctctatatgatatatattatatatatgtataaaatccactatgtgtcaggtgccacactaaatactttatatttcatttattcttcccaacagcccaacaaagaggtattgctagttggacatgcaacagatgtctacatgtgaaaacagatccaaagagggtgagagacctgccccaggtgccatggtttgttggtagcggagctgagatttgaatggagatctagcgtccacctcagcttgagttcttacccacttcaatagagtgtttctcataaacaaagccctacatgaggcacaaaagatgtttataagacatttgcactgtaatttaggaaacaaacccaaacaaaacaatgaatacacaggaaagcagcatcaacataataagctgtgctgtatataataataataataatgataatgatacaggaagccgtgctgtatctatctcaggtgtaataataataacatgggaagccat

SEQ ID NO: 43834 - DNA, 776 bp, Homo sapiens
aagatggtaatactattctttgttaatcattagaggaaaagggctatatgaataaaaatctggcagtatatgtcatgtgctgtggcacacacctgtagtcccagttacttgggaggctgaagccggtggatcacttgagcccagaagtttgaggccagcctgggcaacattgcaggacttccatctctagagtaacaaccaccacaataacaaaactggtgacagaaaggcagagtctgcagtgtgtactctcccctccccctcttgaaattttcctgtagaagctgtgaacatcccaggcctctctggctcatgaaaaactgtgtaattgtgtaacatataaaagctcacagcatgggcagccagacatacctggatgagccctggatttgctagttttcgctgagctattgggcaagatgtgtaaaccctccaagtctcagtttctggaaaatggaaacagtaattgaatttatcttctagagatgtgaggactaaacacgatgaagtatgtaaagtatgtaaagcatttagctcagtatcctttaaccattaacaaaggagaacatgacacataatgaattgtttgcaatagcgagttttgctaacaagtaaaaggggactccagaataaaataagaatcattttttgcctttggaattattgtcagcaatgatatcaatatacattctagatcctaaagcaaattctataacccaaactgtaaaccccttattctgtctcttgtgagcaaaacagccatgacttttgttctc

SEQ ID NO: 43835 - DNA, 650 bp, Homo sapiens
ccgtgaggcaagagggaaatgacattttcacacttattttctttttctgtttttttttttttttttttttttgagatggagtctcactctgtcaccacgctggagtgcagtggcgtgatatcagctcactgcaacctctacctactgagttcaactggttctcttgcctcagcctcccaagtagctgggactacaggcgcgtaccactacgcccggataattttttttgtatttttagtagagatagggtttcactgtgttagccaggatggtcttgatctcctgacctcgtggtctgcccgcctcggcctcccgaagtgctgggatcacagtgctgggatcgtgaggcaccgcgcccggcctcacacttcttttttatgggcatttcactttgtctgctcataagggctttgcgcatgttctctagactatattgctgagtcatttagtttctattttctatttcctacaggttttcaaaaatgtcatgtggtgttttccttgcctctcctgtaaccttgtttgacttggttttgggaaagacatttttatcagtgtttagtttaacatcttactcatcatgcttgagtctggactttaggaatgaaggtcgtatcggaaaataatttctccgtttggtgccagcattt

SEQ ID NO: 43836 - DNA, 707 bp, Homo sapiens
gtaaactctgaattttaattttggttcaccaaaaacctttcatttcctagctccgagaaaaaatctaaatttcttagcaatgccttcaaggtcctccatagtctggatgtggtttgcatgtcaatctgcttctcatgtccctgctcctccctataaatacactccaggcagacagctccatttattaatttacttttcaaacacaacaaatccctccctaccttttggcctttgcacttgtttttccctctgtgtgaagagacttcccttgggcacagaacgggtatttttttgtcctcctgccaagctcaactgagctatctttcccaaggtaaagtcacagcaaggtcatcttgcttaccctatttgagctggtcactatattctggattctaccaccctatttatttctttcagatgaatcatctccatgtttaatgatttaaaacacttacattatttatttgcttttagcattctcccccagtagaacgtactcatcatgagggcagggagtttgtctcatttggcaaacaaatcattggcaattagtaggtgccaaacaaatatttattcaacaaataattaaattgtatatttatacttaaagcaaagatgggatcacactattctctctctttagtaacttccttttctcagctaacattactgaataatttttccaaattatatatacataataatta

SEQ ID NO: 43837 - DNA, 1116 bp, Homo sapiens
ttcaagtttgaaacaatggctgtttgaagtagatatttgagtactgttggataattttaatagcgaataactcaaatcctcagaaaataaaaagtggttagaagaataagcttactcgagttgttgaaactaatttctctgccaccaccaactctttctgtgagataattgtgcaggtgaatgcatggagaattatttttgacactcttatcttagaccctcaccctaagcctggaatgtgtatcagaaatatggccaacacactgagacaggagataggtgaggtcatgttgtctgtacaggaaataatgatgcatcggaaactgaaagtattttcaaacgatagaacagctacccaggaagaaaagacatttgaaccttggctgacccatcctaacagaaatctgcaagagtagtggtgagtggaatgtgagaatgatagggactagtggaaggctttaaagagtgtgcagcagaggtcatcaagtttcccgagataggcagtacctacatagctctagccacataatacactggctaagtattttaagaattgcaaataataagaaagaaggcaacagcctctcgaaggcaacagcctctcaaaggcttggctccagaacgttttaggaaacattgctctcacatggcagggtacacattattagttattggactactctcagtgaaacactattatgcaaatttaggcacaagactaattcttgagcttcccagagctgaaagaaatgcttagatcattatctggaacttgagagccaacttggctgtgacagcagctctgagcattgttcagtgatgaacttgaaaagatctgtaattagaagactcaatgtcctaacataaaaagtatttctgagataactgccgaggatttagggcaacaaaaatgcccacgttgttgttttgcttctgaggaagatggttacttccctgtagcctgcacataggagactctactgctaatgatggaaaaagttgattctgaaaacctcacacaatgagagggactcaggtgaaggggctttgattttgcaaatgattgggctcagcagtgttaaggatctcttattacacagcccacaggaagctgaa

SEQ ID NO: 43838 - DNA, 700 bp, Homo sapiens
gctaacaggggtttcacacacagctggttcctaagttggtgtttgacaaacagctaactgaatcaaaatattcacagaatctacttgcagctggttctcaagtcagtatattacagacagctaattgactcaaaatatttgcagaatcatatttatgttggtttaatgtatgattaacagtcaatgggctaaattcttaacatcattaatattttaagaaactactgagtagacttagagggattcgaccacctgggctgtatgataaaataaaatttatttttgtactgggtatttcatgctttcttaaacaaactagcctggttttcccaggccttctgttagtgcctgaacttctgggttctattgagcaagggtgttgtaagaattactgcatgtacaacaatgctggcagctgccaagtgttcaacagtcatcaaaagaacaaataagatgcttattcatatttaaaaatggataccaaataacacagaccagatgaaagtggcactttatggaatgaagcacaacagtatcttggatgttttctccatttttggtcggctcattttagggaggcatgagctgagactaaagaagttcagaacaaagatgacaaaattattataaaccagtatgtattctgtatattttgtttcaaatctatgacattcagctaatatttctacagtgtcgatgg

SEQ ID NO: 43839 - DNA, 896 bp, Homo sapiens
cagtgaagttccagaactatctcaaactgtgatgactttgtgagcactttcatttttctgaaaccattccactgttttgttctcttgagataaatcatagtacctaagaacacaatgtatgcccagcaatgtatgatatgcttggcgaattgcatccctgccctccttgtctttcaaggtataaggatcaatagctgagaaggaattggaacaaggacaaacttgtgtatcagtgcaattaaagcattttccctgatttatgcatgggattgattatttctccagacagttcaaagcatctgctcatgcctaaaaattctcattgatttctagattgcctgtctggttatgtaatacttatactgactacaccaggctactttccagtttacttccagatacaattttagggctgatattaatctgtaacagcacatgggatttggattttggcaatcctgaagacagcctctctctctccacatcttgatggttgatgtaagccaaaggatactgaatcatacctcctgcaagctggcaattcctaactgattaacttaaaccctgcaattggcttctactcattggtttgatgaagccaatatttgctctccttaaggtcatgatcctgagcacactgagatcattaaggtgaagcagggagtgagatattttctgtacatgaccagtaatgagtctgtgctacaaaaacttttattttaacattatgaagaaaataatttttaagggcaaaccaataaaccaattggcaatacaattttattcagcccttaaatgaagaaaagaataatagatatttttagaatttctttcaatattaaacaatgactatagtgtcattaaagcatatgatagaaatacaattaatactgact

SEQ ID NO: 43840 - DNA, 1347 bp, Homo sapiens
agaaaaaaaaaaatcacagaaacgaggagaaaatacatttcctggctctgaagctgttaaacattctgagccaggaaacctccttcaccggggcggggcagggaaagtctggctctcctgggaccgactccctgctaagtcgccccaagttttccctccctctgtcttccattttccgccccagtctccaaacagggaagtcacaggagaatgccaacgcatacacctgaaaggtgtcagaattagacacggatgcgtgtttattttaaatgcccacgcacttaaaataggctgtacttgcagacaaactcaagggattccaaacgacgcctggaagttcatcttatagattgggggccaagcctgtaaaagaacaacagtaaaacagagccaacaggacgttgcttcgctccgaagggttcgcgcgtagcgcgctgagccggtgcccaggctggggcctggagccgcagccccgaaaaggcgcgctgcccctttaaaaggccgcgcatctccgggccggccttcctccccggggctccagctgtgattgacgctgggcggcgagaggaggcgcctggcgctaacaaaagtccggcccgcgggcgagctgcgccgggtcgctagtcttcactcgctccggggacccgcaacaagtggccgccgcgccctccccggggaagccgcgggcgcgcaggggcagccgaaggaggcggtcgagccgcggagcccaggggcctgcccggctcagcgcccaccggaggggatcggggcgggcggatggggacccggcggcggcggcgcggtgagcctctgggcggccccggggcgcgggctgtgcgcggcgctgcgcccgccggcccccagcgcggattgtaagtgctgcagctgtgcccggccccgcctggagccaccgggggtgccaggaggggacgcagcaccccctcccactggagtgcggggacctctccaggccggaggtcggccccggagcttgggggggatgtgcagctaacggtcccgtcgggcgggctttcctcgggccgagcgcgcaggacgtgcgccgcagctatggagtgtcccgggagacggcgggcatgacggctacaggatgggcgcgaacaatggcaaacagtacggcagtgagggtgagtgggccgcccgtcctcagactcccggatcgcgtccctcctcccctttccctcgccctcccgactgggaagggaggttctcgcccgcggccgtgacgcaccccatttggcaccctgtctgggtcaccaccttctcctttggcagtgagtgaccagtgagtaggtcaggcgccccgaggatgcttttccactgtggggg

SEQ ID NO: 43841 - DNA, 639 bp, Homo sapiens
ctacttaactctcttttcttcaaaagaaaacttaggggacaaaaatgattattaatagatatttggtaagcttggctattgccaagtttattccattttcaatcattttaataattatagctagcagttattgagcacttactaggtgccacttgctcccagagcaccttaagtcattcatgtaatgctaaagacagccaatgaggctggcactggtgattgatcccactttacagttacccacacagaagcttagatgccaactccctacccagggcacacagctggtgtgtgactgagtcacgccggatttccccgtgtttgctctggagaccatgcccctcctcaccctgcccatcaccctcattttggttgcagcccaaatctttcccaatctttgttttgtttgtgtgtttaaaggaattgcagtgactgagaagtggccccttccaaatgacagttttatgggctaggtgatcaaaaatgaaaggcatcttctgagggaaacttttaactcattttgttccctttccaaaagaaaaattaactgctcattaggaaacaatctgctgacaaattggcaggttatccagtgtctgtaataactttggcatataaaatgatgagcatattctttag

SEQ ID NO: 43842 - DNA, 1680 bp, Homo sapiens
ttattctgcataatcaaatctgtcatagaagttctctattgcattttcattttatctactgtatttttaactctagaattttgtttgcctcctttacataatttctatctcttctagttttgttcacatattgttttactgattttattgagttgtctatttgcgtcctatggaactagcattttatgaacacaaaaaatttaatgtaggcagttgcctttggaatcccaaagggtagttcttgcaacattgttatactggtaaatatttgacaactatctgtttaaaaagtcctaactgtagtgtttcctatttacaaagtataaattctcctaccagagtcaattttatgatactaacattccccttgttccctaactcgttggttttatgtgcaaactgaatcaagtaatattttccctctccttagaaagatatcatattgctatctatttctaaaaatgttaccttcacaggacaccttggattctgttcaattaaaaatatagttctttggaaattagttactattcacaaagttataaaattctggccctttaaccttattaaacttcctacattaacaaatcccagcagagtgaagaagactcattctttccttactgcaggacttcagttttctggagttagggaactagaggacttgcccattgagtggtcccttacagaggcagattccaagcagatcaagtagctcccattttccaaaacatctcaccaatccccaccaggaaatacgctttctggatattttgcttccaactgcatatccttgaaagggaaacaaagtatcctgttattattaactagtacctcacctctagagaatttcatgactcatcaatttcactgagaactttagacaacagcgtcctctgggaagaggaaatagaagagtgaatcatttgggagcagtggaaggtgggctcaggaatatgcctgcagcaagggacatggatgaacacaggtgtatgacatagaagcagtatgaagctcctctgaggaagaagaattatagaaaaaaaggaggatacagaaaatcagtgtcaccaatctaaatgagaccatcagcaggtgatcagcaggggcttggaaagatattaaacttcctccaaggtcacacaagtgacagattttggggacacaagctcaaatctagggctttcctctctctgtctctcctccctctctactaggcttgtcgaaacaatattttcccctgagattgtaagcttatgaatcatgcgaaaggattaaatcttactcatcttatgtttcctgacagcacatggcatacaggaggtgttaagagttgtttgtggtgtagaatttactttttcttaatcttgagcatcctactcctacttgcagctgtgcataacctgtcctgccagttttcataaacacacacacacacatatacacactcctcattagttccagcagaatgcccagttcttgattcatggtacacaatgaaccatcccaatttgtatttctattttttactgaccctttctgcatttttgattgctggtatagactattttgatgtgaaaatcctacaattgcatcaataggccaaaattagcctatgtacatacactgaggaactttaaaaatgctacgatgctattgctcaagcccagagatttattt

SEQ ID NO: 43843 - DNA, 2379 bp, Homo sapiens
gtgaggcacatctgatatattaatctaggggtggcaaactacagccagagaaccaaatctggccaaccgcctgttttggtttgttttactgccacacagccacgctcaactgtgtaggtattatctctcgatgctttggtgcttgctacaacagcagaggtgggaagctgctgcagagacagaattgcacacaaagcctaaacgatcacctctggccctttctagggaaaatgtcccaacccatgtgtcataagttcaagggagatgacctgaagggggctgggtttagagatgactaattccaggctccctcagagcagtggctctccaaaggtggtcatcagcattgcaaagccagtgtcatcagcattacctaaaagcttactaaatacacactatcctttcacaagaatattaattaggacaaaagtaatcaaatatcttcccagacagacataaccatgcagatatttaacaacagcatatacataaggcacgaaaaagccatttccactgaaaatgaataaaggatagttggctaggtagaaccctgtgtacggtttccaggaaagatttatatttacctaggtaaagccatttctttcagaatcttttgtgtaaaaagaccatgaaccagatactataaatattgtggaagtctgtatttgcttttaggatccagactttcaatttgcataagaaaattattttggttattttaagtccctatacctgccaaaataactggaaaataatttgcttgatacacagatatggaaaagtagttactttcagttgcttgttttatcatcatactcaagagatgacaaaaagaagctttcgattcaaagacatggtctttggatactagtgtggataaaaacattttccctaaacctgactgttttgacagcataagagttaacaaagctcttagaccacaggaaataggtgagatgtagttgatggataaaacacaagcttaaatggagggtctacaggaaattccagcattgttcactgtgatgttctatttgtaacgttaggtctggacgctccaggtttgcaaggtgataatgttggtcattagtacataagaattcaatatacttatattcttaagcaacatgtggaaacacatcctacagcacgttggccttttaaagcgtctttgaaatggcttcattactcaatgccaaggtttccaacagctggtaagaaggaactgaaaatagcattcagagctccccctaccctgtgccaatgacagtgaccacctgatattagcaccacgtatgatgggctaaggacagctacacttgaaggccctcatcaaggaaaagtattttctagaacacagggtgactgcccaataaataagggattggttatgtctaagtcatggtgaagcatgcgacctgtccatctagcttttgacacagcagtagccacttatagaccatccactcctttttttctttttttgtttttaggagacagcatattgttctatcacccaggctggagtgcagtggcgtgatcatgactcactgcagccttgtgactcttgacttcctgggctcaagtgatcctcctgccttagctgagactataggcacacaccatcacaccaggctaatgtccactccttcttaacaaacggccttacaatttctgacatccaattgaatgggcctttcataccaacttactccaaaagagctgaagagcaacgaaggaaacccaaaaaaaccttgccagaccacaatcttcaaaataaatgctcacagtgccctctagtggatactttttgtcattagctttgagatagcctgcttgattttactgaagtccaatctgagtaactagatttagtgtcccagcagcaggggagagactcttgttacccagtaaatggacagaagatgagttcaggaagccttcccagagggttgaatctaaataagttgaatcttacaagaaaagtaggaataaaagaggcaccacacatgtaaacacccagaggaagagaactgtatgtgggtggggtagaggaatagcactacacacctgagggaccagaagcgagagaaactcaaagttaccctaaaggcaatggctcccagtggaggaactacagagggtaaagaaaatctactggtgttttagaaagaatgttttggtggtcatgtggaaaccagattagagatgaccagacaggagggtataatggtgacacagataaatgaatacaaaaaaaaaaatactcaaaaatactcaaaagacatttaggagttactaagccatctggatgtgggagaggaagatctctctaagatctttctaaggctagccaaagccaaaaatgggcttggcttt

SEQ ID NO: 43844 - DNA, 461 bp, Homo sapiens
caagtagaaatatcaaggaggcagctggatatcttcagtttacagctgaggggaaggctatactagagatataaatgtgggggtcacgggcctacagaagatattgaaatctatgagactgggtaggattctgaatataaccacaggatgagagactgagtgctgggcattccaagcctactgctgatggcagctgcttaactatccatggtatttgctttgaccactctgattacaacatcagtcaaaaggtcataaacactgctgtctaaaaggaaacttgagagggataaatactgaaagaggatgcttcccaccaccagcagacattcattgtcttctctactgccacagcctctaatcctcccctctacctccacccagtcatgtccaccaactgcaagtctccagctgcaaaatgagaaatcagggagaaaatgcaaaaggaagacttaaaagac

SEQ ID NO: 43845 - DNA, 4096 bp, Homo sapiens
taagtgcaaaaccatcataactggaaacccactagaatcgcaaattacacggcagctggtatgacgatagcatgtcctcctgtgcatatgttaaaagcctcttcatccaaaacacagaaggcatcaattcattctccaaatatgcattaagcacttctttttccagacaaggttttaggccttggagaatgaattgagtgaactaaacagccaaacctgctggccagataaggcacttcagaaagcgtctaaaccaccttccctcatcatttttacttaaaagctctcaaacacacacacacacccatctcgagtataaatctggaaacttaagggtgggccaagttcctctttaccctccccgcccagacagggccatcaccgtctccatccaggtcctcttcctcctcctcgctgtcctcctcctgctgctttgccaacttcttcgcctgctgttcaaaccactggagccggggtggtttctcactcgggtctcggtcgtgggtcccacggccaccagtacccacggccacgacattcctggcctcctttgcaggcgctgggggcgccttcttgggagacatggacggctgggccttgatggcctgctggatggccgcgttcatggcatccttgtccacactgtccacgcccagtcctttctccaagttcttttcattcatcatctccactttccgattcactgcctgcacggccttcttctccagctcaacgtgacgccgggacttgaggtggttctcgtaggcgttgaaagaggcaaacttcttactgcaaacggtgcagtaggtggccgagcccttgctctcctcctccgcgacggcccgctgcgcccgcactcgctcctggaagccctcggcggtcactggggccatgctggccaccttccgccgcaggttgtagcggtgccagtccgtcttatagtgggcccgctgcatgtccgcgtcgcggaacgccacccggcaagttatgcaggtgtacgtcgccattgccaggcgagaaataagaaccgaccaagccaaacacctggtgatcagcgccgtggccccacaagaccctcagaccttaacccgcctcagcagccaggaagagccactcgacacgccgacttcctgattgtcactgaggaaacttccggcacacgtcggaagttattcacaactggacaggaaacccgcctctcaggctgtggccacgcctccgccgccgtgaggcccaggaagccgagggaacgctgtggctgaaagggacctgggtccgctcagtcagcccgaggtggctgttgattgagggaggtcgcgccctcccagttaccttccctggtggttgtgccgctcggtgtgacgcggtcaaggggacggctacgcgagaatgggggagtggggcgcccgaggctgctcctgggccctgggaagcccccgattaatgaatggtcgggtcagcgacgcgagggtcggggtttctctgaggaccgcgcgctgcacctgcggagccgggtgaatggatgtcgcgaaggcaagggctgcccttacccctcggggccgacctcggagccctcgcccgtggttgcaacgctttcccgggaaaccggagaagccaggccgggggctcggcctttctgaggcggcccttccggcggaggacaccggcggaatttgagtgcacagagtgcgcgagaggagctccctgtagacacacagtccaagccacgtaggtaattctaatagcagccacatttttaaagagtaaagagaaatcggtgaaactgcttttaatgtgtttaatttagcccatcctgtcatttcagcatgtaatcagtctaaaagaattaattagatcttttacgctctgtcgttggttctaagtcttggaaatccagtgtgtgttttagagttaacagcccatctcaatttggactagacccgtgccaggtgcccagttggctgtgtaccctcatgtatataggacagcaaagttctgtagaaaagaacttcaggccaggcgcggtggctcacgcccgtaatcccagcactttgcgaggccgaggcgggcggatcatctgaggtcaggggttcaagaccagcctggccaacatggcgaaacccagtctctgctaaaaaatacaaaaattagtcccggcgcagtggcgcagacctgtaatcccagctacttgggaggttgaggcaggagaatcgcttgaacccgggaggcggaggttgtggtgagccgagatcgcgccactgcactccagcctgggcaacagagcaagattccatctcaaaagaaaaagaaaacatgaacttcaaatgcttggggaggtcgtagatttcatccacacagcctggttgaaccagagtcagccttgttagagtcgaatgttgcatgctcagaatccaggctgccaagagaaaaccaaaagaagatggcgctttaaaaaaccttccagtgccttcccttgactcaatcaaattcaaacaccttactttctattctccgaggctctacccctccctctgaggtcctgccacacccccttctctaccctgctcaccctacttgagtcgcaatgacacatttgatgttcttctaacaagcactttagttggtactaagtcagaaagtcagaaatccattactcttctgcttggaacatccttttgctggcttgcttccttattttttggatctctgcccaaatgcctttgtaagagaggcttatccaaatccacttaccaaaaatagtgcctaccttcctaagtccttaccaggcataacttttctccagtactgtattagttatctactactctgtattaaattacccccaaatttagcatcaagctttatttcagtttctgtatgtcaggtatttgagtgactcagctgggtggttctgactaagatctcctaagaggttgcagtgaacatgctgtccagggctaaaatcatctgaagatctgactgtatttgactgtggctggagagtctcccttaaagatggttcatttacatagctgatagcaagaggttttggttccttgacaagtaggcctctccatagggctgcttgagtgcagcagagagccacatgaaattcatagacctagcattggaagtcacacagtcgtttccacaatgtgttgttacttttgcaggtcagccctatttaatgtgagaagggttaacataagggcatgaataccaggaagtgggaagtggggggcagggtggttttaggggatcattgggagatcagctaccactagcatttgttgtcactgatttcccaggcttagcactggaagtcctgcatcccaggaaatccctcaatcctgggcaaaccaggatgtctagtcacactgcatgttagtcatctgcgtctagatagaacataagctccatgacagcaagcactcctttgttgtataccctaatgctagaacagtgccagcagatcaactgttcagtatttgttaaacgaatcttttgcagtgcaaaagttaagtcagatggtgatttttatttctgaaaacttattttgagattatcagtatcttttaaaatagctgagccatctggatactcactttgagaaatgtagctagtattagttgttaactggaataagcaaagcagagtatattttcaagcttccctaaaaagtaaagcagaagatggctataaaagtaaagaacttctggttttacttttgcctattatcattcttatatggctcttccagcatctgttcttcaggtcactatttcctccctgcctcctctaatctattttcatgttcctcctatttcagcatcattgaactctccagtttctttacttttcttctttaaaggggtattgtttcctccgccatactaattttccaatgtactgttcttctgcagtctccaagataaccttactctttccccatatccccctctacagtaaatacaggtaatcagtaattttcctgtagtatttttttcatatgtcactttttctgttcaagaatagttgtctgatgcccataagataaagtttaaattccatttgtatctttcctttcctggctttc

SEQ ID NO: 43846 - DNA, 2919 bp, Homo sapiens
catttcattctacaagtatgtattaaaaatgcctgttctgtgaaaattctatgaagagagctggtgggagtgcctaggtgccaagaggaaaataaaagtcctgcttccagaaatgttaaaatgtcatgaaggggatacatacgagtaaatcaacccatgatctcaaaactgaacctgacatttacacttttctggaaatgttttcttaaccagctagttaacccatatcccactctaagcatttctgtaaatgtcatcttcaagtacttggtttactgtgtcattttatgtagaaagttgtttcattgttcaattaaatgtcaacataatgttgatgtactaggaaggaacttgtaagaaaatggaaactagaaaactagagaaaagtagcttttacagactctactacaactgattataattaccacacacacaaacatgccccatatacccatggctgaaaggggatgcttgtctttaatacaatgacaaaaatatattttggtgcccttgttcctagagagttaccagtttccactttctttggcaagaaaattgtccaactccttttcttgtttaataatgttctgtctacttcatatccaaatttcaatggccccaattagaattccaatgaaggcatctaactgactcatacaaaagttgttcacagcaatggggctaaaatgcagactttcactctgggcacaattatgctcatatgagcaggaattaattgtctgcttcctttctgtactcttgatctcccccttctcagagttagatattaatataaacagtgatacaattaatgtactccctgtaaagggaacccaagtaatcacattttcaacaataggaactgtggttttaaaaagttttacaatatcaaaatggtatattggtccaatgtttaaactgtggaaatgcttaacaaatctttaaaatgcaataggtttttaaaaatgttcaatagcttagatttccaacaactatcatctaatgttaaaaactcaacattaaaacattcaagtagattctacattatgtgctgggaaacacttttttaaaaaatttcaggccatcactttctgattcaagaaaagcacttattggcataagtttttaagaggacattaagttatttgcctctcttgagtgagttcgtgccaaagaaaattatgtttcctggaattaaaggactgcattcttcatatttttacattttaaactcctttttaaattagtcataatatttttaaaaagataactagccagtgaaacagactgaagaataagtacgtacgtatatatcacaattaccttttgcctggtccaaagtcttcaccttcaggcatttctgccctttaaaaataataacagtggcaaaggctgcagcacctgctaaccacggctaatgtggccaaacaatagtttcttttctactctaatgctgaatatcaggaggaaaaaaacccagtagagacgttctttcctttttggaaaaaaagtgctcctcccttactcagaaagttggtgtttacaaacttccaaagcgcctgcctcccttgaatgaagctaggagctgggttattatcactgcccccttctaaaaataaataggtcacctcttactcccagtactgtgacaggcggctggaagtgagccctgcccagctgccccgcattctctctccagtcctgtgagaaggtgtccccgctcagccagtaaccttcattggatgacttcacctaggcccgcctgccctttttcttcccccggcttttttttttttttttctggcatgactaggcacccacctaagggtggagtggccacaggaggttgaaacatcaccctgggctatcaaatctcctccttcaagtcacaggagggagttggagagcagacagcaaaacaggctgtacctgtgagggttgggggttttgtttggagaacgcctagccactcggcaaaaagatcccttactcaaaaaggtttaaaacaaaagccattatgcaatggggttttgagggatattgctttgcaagaaaatcttttcgggtcatctagatttctcaactcaccggaagcatgcacacgaatgttgagttcacgtgttcatctgggcaaaacgctttctccccaggacttccctgtccttaggggcagcctgacactggcacaggaaggattgtgggtctggatgttttcatagtttggcttgtcactgaagagagccatccctcatttgcttttttaaaagagtacgacaaaaatcccttcaaatcttgctctcaaaaaggccagaagaaatattactgagatttctttaggaatatatcctgaaagctttggacaaaaagttgaagccattttttttttcttgactaggaatgttagggatggcagaaagtaagatctgcttattaagaaacaatattattttcaaaatgtgttgccaggtgctgtggctcacgcctgtaatcctagcactgtgggaagctgaggtaggaggatcatttgagcccaggagttcaagaccagcctgggcaacacaatgagaccccatctctaccaaaaataaaattagccgggcctgatgggatgctcctgtggtcccagaaacttgggaggctggagtgagagaattgcttgagccccagaggtggaggctgcagtgagccaagatcgtgccactgcactccagcctgggtgacagagcaagaccctgtttctttaaaaagctaataataaaataaattttaaaaataaaaaaataaaaatctgtgtattctgttgttatgttatagctaatcctagcatgttatctatatttaatgtatattttaccatttgtatgtgtgaaagtgactttctaccacattaaagaaatgtcaaaacaaataatatctgct

SEQ ID NO: 43847 - DNA, 2124 bp, Homo sapiens
ggaactcctgaccttgtgatcctcctgccccagcctcccaaagtgctgggattacaggcgttagccaccgcgcccagccaatagtttttttaagaaaagttcattgactgctgctattaggatggtgcaaatgtaattgtggtttttgcagttaaaattaattaaattaatttaaaataatttttaagttgcgctatttagtggttgatgaccatttgaaaacatgatgcaaagtgtaaagtctgtgagaaacaatttgcccctcactggtggcttcactccaggaagggtgaggtaatggcaggtgggaaagaggagcaggaggtggcagggaattcagaggacaggagtagcctctggaaacacggagagggacagggggcagtttggtgacagcttaggaaggccagagaaataactgcaggaaacagggcagggctcagacctcacgcctcacccagggccactgacttgttctgcgttgagtcctgtgtttactgagtctcctttcattgcactgaacatggtctttataaattctggtttgtgactccctctcagaagtcctgtgggtcacctggaactggttttattcctgcttatttcctcattcctcttctcattaaaacataatcgctatgcctctgatatgaagccactttcttttgctatctctcttccttcccattcttctcccctcccatcctacctcccaaatccctcagaacttctctaaaaccctatgccccacagtttaaacacttgtaaaaaccaaattccctagggggttagtattgccgctggttcaagctgccctccacagaactcccctgttcctgaaggatgttcctgcatgctttcctatttaaagctctcttctaaggtgatacggcttgtgcatttcaggggcaaagttccttgacagagaatctttggttctgagaaatttagaacaaatcatcatagcagcaaaagagctctggctcaagtctcactgctcttagcaaacgtaaggaagtggaaattttcaaagtccacacaccatagagacagaggtctttgtggatagtagagacaggagtgaatcaacaaggttggccctcagctcaaaacaaaccttatctcctgagttgaaaagcacaatgcaacacaggagcaattacatataaccttctgtttaactatgggttctgttacacgtcgatcttccttattgcactctgctgatgtcaggtttaaaggatttcagtccttaaatagcaactgataagatgtttcttggttatccatttacccagtagtttttggagaagccaaattgaaagggagactttgcagcttgcagctctggaagtaaatcattatttccatattcgctttggggtgtgggacaggggaccagagcacctccactgggcactctttgccacgtaccatctgacggccttgcggtcttggctgcatgagcttcacctgctgacccagccttgaagggggatgagagattgcctcagacactgaaaggacttctcctccaagcaatggggcttgggaaatgtgtttctggaccaccaccctgtggtatctaggcattttccaagaggaaccagctcctggagaagcatttgctacaagaaaagctgagcaacaccctgatcttgatatgtggaaaaaaaaaaaaggccttgatttatgagatctcagaactgcttcttaggaagggcggattcctccagtaatctaatgggctttcatttcctcattgcctcagtcgctgtctggagataaactatgtgtttgagaggcacagtttatcacatgtcctctcagaaacatggggttatctccttcaggccacctcaggattccaaatgatgtagcaacttgaaggtgtccagtaagtggcttcacttctatcggggtatgagcaaaacaccttcaatgactagaaaaagtcatgagctttaaaaatagagtaaaacaaacccaaaacttgaatcttaaagactctgagaagagaaactggatccagtaagactttcatggtgttaatccccaatctcctgtctccacgataattcctcatgaggggtttcctccagcatccagccccctcttctatgg

SEQ ID NO: 43848 - DNA, 3672 bp, Homo sapiens
aacttaggatcagcttagctcagtcccttcattttactgtggcctgcagaagagaaatgatgtctgcaaggtcaaacactgaagtcaagcagggttcccaaccagaccaagacttccagagctgcagtgcagccctcagtcttggaagagactccgaaatctgactccccaccggaccccacctgccacagctaaatctgggagcagatggcgcctggctccgactctgaagaccaagccggtcgacatcagggggaaaaatgaagagctggctttggacaaaaggcgcccgtgatgtgactgctctaggcagctgcaggattagtccttgctcctggctccccttggagtcttgtttttagtgtggaagtagcttcaaattgggggctctttgacttctcaaacaaaatgaagataacagataataatgatgatcgctaaagtgaacggaatgcagcccacgtgtcagagactgcattaaatgctacacattcatgatctcatttaatcctccccaaagctctgcacgatacttctattactacacccattttaaagatgagcgcaggaaggcacagagatccgaactcaagtctgccttaaccacgatgtccctgcctctcagtgcaaccacagacctaccaagacaccatgtacctttccagtggggtcacagacataaccttagcatcaagaagaacaaatacattctttcattctttttttttttttttaattgagacggagtctcgctctgtcgcccaggctggagtgcagtggcacgatctcggctcactgcaagctccgcctcctgggttcacgccattctcctacctcagcctcccgagtggctgggactacaggcgcctgccacaatgcccggctaattttttgtatttttagtagaaacggggtttcaacatgttagccaggatggtctcgatctcctgacctcatgatctgcccacctgggcctcccagagtgctgggataaacacattcttattcaaaataaaactgaggctaggctgtcggaatctgttagactcactctgcattccaagatttttcaggtgactgaagtcatctctccagacataaagcccagacatcagtataaggcacctctaagagctctgccttgagaccatttccctgtgaagggccagagtgttccatttccaaatggggaggtacatccataaagggggccacccgagggaggaagaagggcctgcctttatggcctgttcagatgagcctggaggaaataaacaagttattttgcttctccactcatgtgctctgacccgaagccagcagggaaagtccttagaattcagtgactaatcagatgatgggccatgaaacacacccctgaatgtcatcagagtccaggcatttgcaccgggaatccagaaataagctgtcaccagagggacgtgtgccctctggaaataatttccagaacatgtttcataatcccgggcccggtcggtcggagcgagccaggagacaaggaaaggtcaaaatacagccgctgatcccaacttgcccagcctcatctcctcctgctcggcactctcctcccgcccagctccctgcacaagctgtcccatgcttgctcctgcaactgagcctcccagtcctttccaatcaaccaccaggaaagccaactgtcccggtaccggggccctgatgtgacttcactattgctaagggcagaactcacacctctgtcaggagacgctgtcatcacttcctcgacttgccttgaacgtgttttgagaaactgtcaaaaattaatgagtagtttattcaccagatgtttagatgtcaaataatgctgggacttaattctgcacttatcaaatataactgaattgaatgacatgttttaaaataacttttctttttaaatattgccttggtgtagaaaatggaaatgacatttttaagtgaacagataagaattcctcctgaaggatgcgcatgttaaaataatcctctaaaatataaagcttactatgattttatttatattcttgagtgctttctggttaggacaaagggtttggctactgataggaatacagacactcagtgagtagatttatcaaaagcagtacttttggaaccctttttgatggagatctaggaatccaaagtgaatttcttaatccaagcctggatccccccgctaaaaactaccaataaaacaggcttttatacagcagtttgtatttcctatggcaatgatctctatcctattgatgcagttgaaggacttgtaaattgcctaacagcaaataaattatccttattagccttgtttattgagcagaatcattgatcaagtcaataactgataaagcaatgagtgggctaatgtcacacaggaatacccaccttcggcaaatacagggcagggctaagtaacggattcctttccaccatgaattcagttattacagaaaggatcttaaaaactgagaatctcaaactctctgattctggaaattcacacacataccagtgaatgattcacttcaccactgtaagaaaatcaaatctgggaaagatgcagacttggtaatgagtaattgggaatgaacagatgattatataaaagggacaggaaggagcaagagaacactgtgtctattccatcctaacacgggtgctgggcactccacatgcattagctcacccatccccagaagaaccaaacaggaaacaacaggtcttcctcacaccagccacaggcctcccaaggacctgagcactgaaggcaacaagaagaggagatgcgagacatgtcatgaagacatgttcagtggctggctaatttctcccatgcatcttttccactatgtctatgttaaccatggggaccggggagtagaattgttgtctaatgggttattcaggccaagtagacggggaaaagcatggattcagtcaactgacaggtaaacaagtacttattacgcaccagcaccatcactatgcttgagattccagaaggaatcccaccttggtcgctgcactgccccagaccttactcatttcagaagatacaacaaataatcacactttctgtcatatttaatttgtactatggtctgaatgtttgtgtccctccaaaattcatatgttagaactgaatatccagtgtgataggaccaaaagacagggtctttggggaaatgattcaatcatgagggcagaactcacaactgactgtcagtgccttgatcttggatttcccagcctccagaacagtgagcaataaatttccattgtttgtaaattacccagtctaaggtattttgttactgcagcccaaatggaccaagacaattcactaaaacgaactgcctcgatttcacatttgactttgctcttagaaatacagatagaagataggtgcggtggctcacgcctgtaatctcagcactttgagaggcagaggcggcggatctcaaggtcaggagttcgagaccagcctggccaatatggtgaaaccctgtctctactaaaaatacaaaaattagctgggcatggtggcaggcacctgtaaccccagctactcaggaggctgaggcaggagaatcccttgaacccaggaggcaaaggttgcagtgagccaagatcatgccactgaactct

SEQ ID NO: 43849 - DNA, 1114 bp, Homo sapiens
gccaatgcactgggccaaaattttatattattgagataaatgtctgactttagaaaagagtaagtcattagaagcaacatgttgccccaaagatgctgtgatagtagaaataggagacacatgcttataacaggtggttagaaaacaggaataaaatagggtgctgattaaatacaaataaaaattggtgccagattccaattttgaaatattaatcagtgtgtacaaaataaatgtggtggccttcttcagtcatccctccccctcctaccttttttcctgctttgtcttaaaatcatcatttcaatgagcaaaacagaaatctatctaaatatcaccatggacttgttcccttcatggcctgatgaaccaatgaaaacttctgatgatgatgtaatacttacagctatttttattctggtggcacagactctctctttatgtagagcaaatagcaacagaatctctttagagttacttcaaaggtgaattccacagcttcaaagcccaaccatggacaactctcttgttatttctaccacctctctgatatcagagaccttttccccatgttctgacatcaacggaaatacaacaaaatcttgacacaatgcgagggaccgttctataggtccggcagggtctgccttctgcagagcaggtatttaataaacaatggaagtctacagctcaagacacccacagggaaggtggccccaaagtttaagcaggaatctaaaacagcagctttgtcagagaccgacagggtgactgtggaaagtgtcacctcctttctctactcacaaccaaagtgtttcataccattacaaatatcacaagaaattcaagggaagaatttcagagtcaggcccaagataagagctattttatccgaggaaaacatagatgactaatgaactcctgaacagaaaacaggggtatttggtttcttccaaataaaaataaaacctttggtacattccacattccctttcaaccatcttcccgcagagcctggaactgttggcgctcttaacttttgttgaaaaccatgagtattagcaacaatgggaatttaatttatggcccaaaaataaataacttatgtttcagt

SEQ ID NO: 43850 - DNA, 601 bp, Homo sapiens
catcagaggagaggaaaagagggtggtaggtaatagactcctttctctaaagagatgagaaattctggaagatatcaatcacagggaaatggtgggtagtaacaatcagagtctgctgcagtggaggaggggaataaccttactctaggagaagcacatcacgataatccagtgaattcagggaatgtgcccaggtcagcaaggcatggtggacaaacagataagacagtggggaggagcagcagggagtttgtattctgtttgcgttcttgtgcctaaagagtaggagaaaccaagggcatggctaggatggaaccaaggccatctgaggtcaaggcaaagagaaactgagcatgctctactgtgcacccttgcactggaattatgagaaaagccatgggtaaatcaagtcaggggcaccctagggcagtgcaatgtgctccttagctccacctagtgtataaattgaatacctgcccactcctattccaccttctacctgacctggtcacagcagggaaggggacttcgaggcagggcgggtgagtcaagttctgcagcccactccagctgagctaggtactaggccattcttgcattg

SEQ ID NO: 43851 - DNA, 1302 bp, Homo sapiens
cccctccccactgctcccagtctgaggccagagcgatcacttccagagctgggactgaggcttttacatctcttgggccaactgtattactttgcaagaacaaaacactacagacagggtggcttaaactacagaagtttattttctcacaatttgtgtgaaggctggaagtctaagatcaagctgtctgcaggtttggtttttcctgaggcctctcttcttggcttgcagatggctgccttctcactgcattctcatagggtctttcctctttgcatacatatccctggtgtctgcctctcataaggacaccagtcatattgaatcagggcccacccatgtgacctcatgtaaccttgactacctttaaaggtcctatccccaaatataatcaccttttcaggtgtgctgagggtcaggacttcagcatttgaatttgggggcagcacgattcagcccataacaccaagtgtgtggaccactcacctgccggccccaaggtcactcctgtgtcaaagttaacaagccgtgtgctgtgccctgtcagccccaccatgctgaggacatatccacatcctcccaaactccctgccagaaaggcaaacattcactcatgctgctacactcagtaaacaaagtgagatcaaggctgaaatatctgaacgagctgtaagaaactatgcagattagagccaacaggttatttaagatcagagaggccacagtatcctggtatataccgtgtcctggcctacttaggttaggacaataaattatatgctcaccctacttactaagctctaaatgaacacaggacacagagaagcaaccgtctaatttgtttcaaaatcctcaaatacaaaatctactgagcagtgaattagtaattttgtcatcctctgggggccacttatctgaaggtcaggatcaagtgccctttatcaatagagtgaagctgctctgcccagcaaagctgacccgggtcactccgtgcatgcacacagtaccgctgggctgtgccagcagcctccttacacagacattcctttagtatctagagccccacatccagtagttgtgcctagaaaacaccaccccctttgcttattcaacaacaaaatgttcaagaaaccatagaaaatccagacctggatgcggactgttgtcccagtttatttggatacattcaaggggcaaaacagtgttgacactcttggggattataatcccactgggtgcggcaaccctgaccacacagggagaaagatgttttcaaaacttgagtgtttttttttttttcaa

SEQ ID NO: 43852 - DNA, 1227 bp, Homo sapiens
ggagggtggagggtgggaggaaagagaagagcagaaaaaataactattgggtactaggctcagtacctgggtgatgaaataatctgtacaacaaagcccaaactttgatatgagttcacctatataacacacttgaacttaaaagtttttcaaaaaaaaagaaaaggaaaatgtggattctttgacaaaaggcgtttgcttcctaaagctcggcaaaggcacaacagtgaacccctgactcaccatcccatgcccagtggtcacactcagcaaggaaaactccacccagtctccttagcagcctgctgttaaattaggtcaccccactgctcccccggagtgatgtgttttcctttcagagcacgccttctgactcccacttgtatgctggtttgcttggccatttgtttcccatctgtctgtccttccctaccccatactacaagctctgtgagagaagggaccatctctcctgttcaccactgtcacccaagcactaggtctctgcatgccaatcacaggcactcaataaatacttttttgtttgctgttgctcattcagtatttgttgtacaaatgattcaattaatgtaattaattaaccatgcatgtaatcaatgtaatcattaatcataaattccttaaagcacattatcataataatgacagcttgccaaattgggggaaaaaaaaaactatggggaacattaaaatgtctataccatttttattaaagaccctttgggaagcatcagataacatgaatggcccttggatatctgcttagacaaatcttatttcttctctttcagaagacctggcctctgataaccaagagaagtaaatctagctctcctaatttgccccatactaaagtcatgttgcaatggtgtggctgaggtcaaagagaatggtgctctgctgactcatgtgtccctatcaccagaggagctgcagcagatgcacctccgtcaaatctaagcagccatgtttactgtgaaagccacaccaaatccgaatacaacgaatgtctggccttctttctagacacctggtagttccaacaaaaagccaaagatcatcactgacattctggggatggtagcccatgattggttctttggccaacacccactgtttttcaatgtcacaggcccacagcaaaatgtattagatcacagtctcacaatcttaagatacaacttgtctgtaccaggcaaaacctac

SEQ ID NO: 43853 - DNA, 973 bp, Homo sapiens
aaaggtagaagacatgcatggctgctgtctatggatgattagttgctgagggcattgagggtctatttaagtttgctatgtgcgcatggccatgaaatgttaggaaagtacatttttaccgtgataggatatacgttgactatttttttcccaaaaacataaaaagcattctttgtatttttatctttacataatacttcatatatatataatgaattatatatatacacacacgtacacaatatatacatatgtatatgaccatatacatacgcctatagtatatatatatatatatatatatatataaaattcattatgttttacaatgctgaagcttcaggttattctatgaatgaaaatatatatcactaaaatagattctgctaactaaattaccaaaatacataggcagccttggtagaaaccaacgtgacaaagagctggagtgagagaatggtgaccatttgaagactgagtatagaaataagctcaaatggaatttcctattgaatttagcagtggttcattgcttctgttcgtgtattgtttatgtgaaactggagctaaataaacctatccatgacctgcattatctgccaaatggattgaacatttactctctctgcctcaaaggcttgtcgtttcagtttagccttgcagatggcacatccatttccctgaaacagaaccatgatgtaggggcttgccaatatttcctgttagttaaagttcaccctcaaagtacacatgaccatgtttcactttctcagccaatattccacagcatcaatctgacatctctctgtttttccggtcactctagaaaaatctttgttatcaaccatttctcttaattgtactactgagaaaattatagtgtcaagaaacctacctctatctctgagaaattgactttacccaaaaacctaaagaatcattgtgaatgtgtttggcagtaagtatgagagga

SEQ ID NO: 43854 - DNA, 1598 bp, Homo sapiens
gggactataggcgcctgctaccacgcccagctaattgtttgtatttttagtagagacaggtttcaccatgctagccaggattacaggcatgagccaccatgcccagcccaaagttctacagttctaatcgctgaccccaggcaggaaagctggtaattaaagtagcctctacaatctggagtaagtttagggcaacaaaagggaaaatgtcctaggccttctatcagccactgacatgccgtttgatgtcccagatagtgcccaggatacaggttatgagggacaagtcccgtataagtatattgataccaatttgcataagaataagtctgggcacaccatgtgcaagggtcttcggattgcctccccatttgacttaggctcctagccaaaagattcttagactcagggttaggaaaaattctagaggatagggacttaagaaagtcatctctgaggacattaggacccaggaggcatggtcagagaaggcagagaatgcatgcatgggtgtctgcagagtagaggcttctcgctgtgccatgatctcgactgggtcagtgccaggagttcgggacaatagttttccgcctctagccagccctcagcttttcccaggaaaggtggaactggctccaggcacaccaatgcttccagcccagagggctgggggttgttagagagccctttcctggaaagcctcacacccgtgtcttaaatctggcagccatgcttgtcgcttttaagtggcccacagttgcccagtgttttcctccagttgttagcgagaagatagaacagaatagcaagtgaaaggggtccaatattactcactgctgtggagaaatcccggatgggcccctagaaatgagataagaagtatcctcccaattgaaggttttttctcaatccaagggttcctggtctcgtgggcttcaaggaatggagccatggaccgcagcagcaagtgttacagctcgattagagaaatgcatggacccaaagcgtgtgcagccgcacgatctattaaagtgaaagcaaaagtaaagtgaaagcgaaagtaaagcttccacgcagtggaaggggacccagaagggttgctgtttctagcttgagtgtcttatgcttatgttcccttatgacccctccccttttcctttttctgccctgttgaattagcttattttctatccacttgtgggttggtgggcctaactggttaaaaacatcagactgcagctagagcttaaactccctatatgattggttgaagtttcaaacccttagcttgcagctgtgactcattttggcttaggggaaagtccccttagggaagtccctattgacccaggaagtccagccaacttagccacctagtccctcactattagttctgtctctctagggaatcctcatacaaattttggtaccagaaatggttctagaggaacaaaatggtaagaatgcagttatttcattggttttggggtttctggagttggctgcttaatataattagaccccaaaatgctaaggactctatttctaattgtatggagaatactgacaatccttggcatgaactgcttagagagtta

SEQ ID NO: 43855 - DNA, 531 bp, Homo sapiens
atttttcttttttccagttgtgtgatcatagctcactgcagcctgggctcaagtaatcctcccatctcagcctcctaatcagctgagactacagtcatgcaccaccatactcagctgatttttaatttaatttaattttttttttttttgtatagatgagttcttgctctgatgcccaggctggtctcaaattccttgcctcaagcaatcctcccatttcggcctcccaaagtgctggaattacagacgtaagggagatggctgtactttagtcaggagtaggccaaggcagctttctggcacagcctgactcagcagatttggagcacaggcacacaactccgcacattaggtaaacacaccatgtgaggcgcattaggtgataacccacatgagctcatgcttggctcggagccactattgtctaaaaggtaaaactgctctgctgatgctgtacatacaacttgcgcccatgactcatgcccagacttgctggtgcccagagagagtaatagccatgtgtaaactgtc

SEQ ID NO: 43856 - DNA, 716 bp, Homo sapiens
attattgaaagaggcactttttatagaaattaacttttaaaattaaatcctctttcctactccaaattgttccacttaatgccagaaatatcttacataaaatatccactggtctactcacatgacagcaacttttattgcaaaaggatatgccagagtttgattcattattatgtcacagttatgactcatctcttagggtaacacaattgtcatgttagctgtgtggttttcaatttactcttgacttaagcaggaaataaaagaatgtccagctgagagattgccaggggtgttgaaatgagtcatatgcattagcaggcattatttactcataaatcccatatttattgggagcattttgcaattccagaaggtgatcataaagttatcttggctatgtgttggatcagtagcaaacaggaattgctattatgaaatcattacactgaagtgtgtctgatgcctgaaatagatcctcatattcaaaagaatatcaacgactaaggcacttaccaaactacttgatacaaatatggaaaatggctaactactctgtcaaaaatttatattgattttataggtacatttcacatgaatacttgattcttttagctgcttcagaatagcttgagctaattctacatcaatctcatatcatcagtgtagcatcctgtgttattccagtgacacttggtaagaaccagtgtatctcc

SEQ ID NO: 43857 - DNA, 808 bp, Homo sapiens
ctcacatcacccaaataccacatggtcaggtttttgctcatattcccttctaatacagaagtctttttttatttttcacctcactgtaagataccctccaccctccacatgccttttaccccttcatcctactttaagtctttctagcttgaattcatcactgctgaaagtgatttctaatttgtttgtttatctcctgacgtcctcagttgaatggaagctgagtatgagtgcaggcagtgtgtttgttgagttcactgccctatctccatagtggagtctggaaaacagtggctgcttccaaaatacctgttgaatgaagtagtgaaagttatggacattgagctttacttagataatgaatttcaggccagtaaaatggacaacaatgattcatccaccacaggagaaatgagtgtgtgtgtgtgtgtgtgtgtgtgtgtgtgtgtgtgtgtgtgttttatttgcagatatactttcaagattatctaccctatctaaatctattttaataaaagtattatataattttgcatatctcaattttaatccagttaagaagaataaaaattctaaataaacacaataaatacaaaaaataaataacatgactcattctctgtagatgtttcataatgaaaaaggcagatatgttcttattgctttcatgatagttgaacttacataactgaatgattactttcaaagattaatatgttttgatataataagataaaggactattattaaaccacgcctttttcaactgttttaaaaataaataagaatgacatacatttttctagat

SEQ ID NO: 43858 - DNA, 1533 bp, Homo sapiens
gtgtgtgtgtgtgtgtttgtgtgtgtgtgtatgtgggggagagactattctctccttccttgcttccctcttttcatctcttctcctgtcttttattttcttccttcctccctttctctctcctttccttccttccttcctacttttttcttcatgaatatatatagtgcttgtaccaaaactgtgcatggtgcttctggtagagcagaaaaggcatattctagttggaagctcaagacgacatcaagtaatgatttaaactgaatagctggagggatagttttgtactattttatatacaataatggagaatttcaaattctactaagaatagaattgagttcagttaactaataatctcaggttaaaaaaaaaaagtttccataatctttttttttctttatttagaagacagcattttgaacaacaattttttaaaaaaattggaacaatatgtcttttacacaaagtaatgaaatacgacgaataatagaaagtgaaagaaagtaataaaggaaatctgtttcgggtactttcacttgttcttctaaaggtgtctttttttcattgtgaaagtgtggtgtgagcttcattttctttcaaaagtgccgaactgcaatcaagagtaatttacataaaagacagcaggtaacaacattttgcagcatatttccctttcatacaggaagagaaagagagaaggagaagaaaagaaaatcatcaaagagtttatgaggtcatttctgaaacaaagtcgaacattaaaaaacagcccttggcttctgatagagaataacttaaagttatccaggttccatggaatgcatttaaggcaatatagcagatggggtattgagtaacatcttgagttaatttatttttgaagtgcacaatgactttttatgatataattgaattagagagtcagaaggaatatctttctcctgttattttattgttatcttggaaaaagtatcagaatattcgtgcaattattattatgatatgtaggatacacacttaaatcagcatcaaacatataatttttaaaaattttgtagttaattctgagaagaaagcataaagacaatgtatacactgctactctgatgtttctgagccaaccagcttgtccggcattgagtgaggttttagttgattgtatgctagatttttcattacatttgctactgtatttgtaactgaaatagaaaagcaactttaatttaagttcaaaaattaactacaggtaccaatagccatttcattagtaaaattaagagagaacgagaaagagagtatgtgtgtgtgtgtttggaaggtataattacagtgtcgagtgtctactttcagtttcattcttgagattaaaaaatttggaataataatgcaaataaagcaatttatactgacaataattttactcttgatttatcataatgtacatctttctacagttttgtttaaaaaatctttctattttgagaaaatcaaataatattaagcaattataacttaagaaatgcctttttt

SEQ ID NO: 43859 - DNA, 818 bp, Homo sapiens
gtaagttaaaaaaaatcacaagagtacatacatcttattaatatttttagttaaagtgcatgtgtttgtgtgtgtgtgtgtgtgtgtttatattttaatttccaacccctactaatttgaacctctatctagaggaatagtgatctctctgggtttgagattttgagtgcatatattttgaagagcatcttttaagacagattaactgaatgagctaatccagttagaacagtttgtattggttttgtagtgtcctcccatattaaagtaatgccaaatgacatgacaaggactatgaccttcctcagagactggagttaatcatttgtaattcattgagctgtagaaacaatcacataagagattgcataatatgtacattgggaaaaaagtagggaaacaggataacatcataagttatggaaataacataaattgttactaaatattttccatattaagcatttgatgaagcacagcgaaaaattaggcacttaataaaagcattgctaacagtggcatggcaattatgtgttcacattaactttcaaacactttagacctattataaattagtttttgatttgacctatatttaaagtgtaaaacatatttcgattaaagacaaattgtataaaatttaatgtaattatttacttctaagaacatcaggtgacaagacgtgactgagattattttattcttattgcaggggatgggaagcatgagaggatatctaccaaatcaattaaatctggtttttggcaaatagcaggatgcagactgggtagaatttgagcaaaatgtaatgttacttt

SEQ ID NO: 43860 - DNA, 1210 bp, Homo sapiens
agcaagactcaaaaacaaacaaacaaacaaacaaaaaaccagaaggttacaaatttgcagatatgttgaaaaaactcttatttaaaagaaagttagcagttaggcagttatgaaatcattaggaatgcagaaaatttctatgcaccagattaaaacattgagctaatacttcatagataattttaatttacatacactggagactatcccaaaatatacatttttttaaaaaagaccaattttaaagcaacataatgaaaccacctttgcaaatattatgacagtgaaagagtctagcatggcttactccatatcgcttctagcctcgcaagatggctttcctctcacattcctgggcattaagccaagctaaccatggcaggaatttagattatagtttccctttgaagcaaggatgatagtaggccctccctaaactgactcactccttgttcagggactgaaactgcctttgtaagactaatgaaaggccacatgttaggattactgggcaggtagagcagaatgcatgcacagcttgcctttacataattgcttaccacaccataggtcaaaaactttgtaacttccccacttgttcctatggataatatcaccattgtgaaacccaaggttggtattttgcaattttttttgaactgattacacactgactctgcctggacctgtgatttatgactcaatcctggacctgggattcataattcaatcaatctcctgaccttcacccacagtctgattcagggcataagcactgttttccacacccttatgatttcatcctcaaccaatcagtagcacccattccctagccccttgtctgacaaattatccattaaaaaacctaacctctgaattcttggggaggctaatttgaataacaaactctgtctttcacttggctagtgctgtgttaattaaactctctttgctgcaaaaacctgctgttctcagtgcattagcttttctgggcagtgggcaagataaaccagttgggctattacaataacataaagtaaatggtattttttgtataatttaagataattacaagtaatattattatctatcatttgttcatatataaagctgttgtgcatatctatcaaatttgtgatagtggttgtctcagtgtgattgaaggcaaatgctactagaaataggtggtcaaaaagtgtatcaactttaa

SEQ ID NO: 43861 - DNA, 518 bp, Homo sapiens
aaaggaaattaagcaaataaccaataaacatgtaaaaattcaggcgaccctaaatgctactaagacaaaaaagatcacatgtgaagaatgcattttcctgttggggccacagcggtatctcccatctgcacactcttctagaaccttgccactctctcctcaagaggaaaatttgaatccctctctgttgagtttaagctggtcatattacttatatacaagaaaatgtgatgatatttggtatctaatcagcatgggctgctataagcaaataccacaggcttgagcaacacaaaggtattagtcacagatcacacatctggaggctgggaagtccaagtttaaggtgccagcagatccagtgtccggtgaggccccacttcctggttggcaattgtccatcttttccttgtatcctcacatggctgagagcagggtgtgaaagctctctgtagccttgttttataagagcactaatcccattctggtgggctccaccctgatggctgaaaaacttc

SEQ ID NO: 43862 - DNA, 1271 bp, Homo sapiens
ttaaaccttggaaaaattgggatggaagctgaaacctattttaaaggtggtaccattacaaaaaatgggctaatggatgttgcatgtgtttgcgtgtgaatgtgcacgtgcaaaggtgttagctactgctaaatttttctaagtaaatacatgcagttatctttttacatctatgctgtgatgtttccattcaatgtaatgggcttatgatattataaaaacattatgaaatcttggagactaatatacaactttcaagttatgtccaatattcaagataagaaaaaccctctgtaataagaaaaaattttgatagtaatttggtaaataggttacatgttgaaacaaaataccttaaatattcatatagtttaactgtcagaagtataaaatcaactattttctatctcacctattctgaaatgtatgttttgttaacagataaatgatattattagttcagattccctcgaccttttatttttgtttcaaaaagaacaagattctatttgtattactgctgctgtctggtctgaaaaatgacaagacagctgctttcccatttgctagtcactgtccatttaataacagttggttttgtactttgtaccttgcaaaagtatctcagaatagtttaattattaactaatgcttgtgtagttactctatgtatggcatttcattaggacctaaagtttaatgtgccttatttttttctcataatgatggcacttatgctacaataacaaacaggttacctttagattgtatcactgagcatatgttagcagaagagtttaatttatacagcagaagggaaaatgtgaacaattaaattatgttccaatccatgctgtctcttttattagtaactctaattattgcttcatcatctggatagatggcattggactttttatacccccaactgggatgatatattgccattattaggtattaactacacaatttaaaataaaacaatgtgattatgatgggcttttattaatgtggcttagaaatatgatcacacatatattaacttgccttttatattttctaaagtttcaggtttcctgtctcaatcaaccaaaacatgtggtcaaaattttcaaggagctctttggctttatgtctttcttatgtatgcacagtataaattacattgctggaaaattagagtagtatttcccaatggatcattcatgagcgaagagtatataatgcaatccctactcctgaaacacacagatgcttatttatatggatgc

SEQ ID NO: 43863 - DNA, 698 bp, Homo sapiens
ccatagtggccaggctggtctcaaactcctgacctcagttgatccacctgcctcagcctcccacagtacttgtgtgcttcatccaagtctcatttgatggtgccccttagtttagccaactgttgttatcagattaactgaagactctgtcctcactgtctgctattctttgtggcatttgtcaaccaagagaggcaaaagatcagattgcaatgcagtaagacaaggcctttattgtggtatttggaattgcaatttgggagatagtgattcaactagaagtctaattgtattcttaagagagagaggggagaagagtatttttaagagaaaataaaaaggagggtgagggcgattgcagtttttttgaaagaattatcatttggcgagatggccagcttagttcatgagttcatagttcattgattgttgctgttcagatgttgcagcactggcaaaattccactgtttccagtgtgttcgggttactgtgatttgacccaggtcaatggttcaaggcgagttcctagattttttgcaagtttgcaggacatgcaggcaatccttcttagaacggcttcccaactccgttttagagctctgaaccagagtgatgccattttctatatcatattgcacatactcactctcatgacttgatgttccattatgtgatgtacacattttcctttccaggt

SEQ ID NO: 43864 - DNA, 2091 bp, Homo sapiens
ggacatctgcccagcaaatgcctgtccaagcttggactggtgccacccttgttattggttcttacagccaaaaataagtgtctcaagataattatgtatcctttccattttttccttaaaaatctatgtctttctttactttcctgaatatgcacatagtttacaatagcatgcatattcccattgcaatgcctaatcctgaaaaacatttatttatcttctggagagtctccctctctcttatttagattgacgtaatgatgcctcagaagtgcaactgaagttgactgaccttggacaaatcagcgtccactgggaatccagcacaatggtgactgagccctttgttctctctgtttccaagagtcacatttctgtcctgtgaatctcgtctagaattctcggactccttcctcttggtgagttttttgtttgtttgtttgtttttactatattctggatctaatttggttataagccacctttaatgaaagaccctgcatcccttttggggctataagtcttttctggcaagccctttctgataagcattcttttagcgagtactctggtttctacagaatttatatttagtttgtgaggacttcctatcatttcttgcataatcattttttggttcttgtgatcaaaacaaatatttagtttgatctgcatgcttggcttaatagtttagggaacagtctgattttggtttcattttggtttggttacacgtctgtaaaaaaatctggatcttttacaatttttactctttttgtttctgaacatcttccggaacaagagtaaacattttaaatgaagagtatgatatggctaataaaagtcaatacaaaaacagtgaccatctaaaacactggatcaaattcctgatatttcctaacagaatttatttatttatttattttgttcttgggatactaatgaaaaatcgaataggattctgaaattctgaagacattcaacaataaacttccttcagggattccagccactatattatgacccattcttatgtacagtctttaagtgatttatcaattactcagaaaaactgagttcaatgatcattttttgaactctctaagaaaattgcaactacctatcatattaaaatgttgagccttgtaagttctgtttgtctctcttttttttctttgccaactttcaattcactgacttttctgcaattatcaagataaactcactgcttttaacattccagtcaagatttttaaaatagtcttaaaggagtttcaaattaatggctttacaaattataacagctccatgacaatgagcaacatagccttcaaaaactgagtcatttcttttaatgtaaatttgggcttacctacctaacaatcacttacggtgatgcaacagttaaatttatataaaacaatctaaaaagaatagcaagctagataactgtttatagaaaagttaaactctcagattaaatgggacaaaatctggactcagagtaataatatatatctgtctagtgtataaattgctttgtttgccatgcaggggccagaaaaagcaaatttaaaaaaatggctaaaatgcttccccacgcatactagtcaaccaaacgagacaaataaaggaaagcttagttactaactcaaagctgcttgaaacttttattttccttatacagttcaccaagacctaactaaaatctaaacatttaaaaatttaatgctgaaatcatttgaaaatggaaaaagggtaaaaaaaaagattttgtttaaaaaaaacaaacaaactgatatacccaaaaatttggtccacagccttcataaaattatctgttgggacaaacaaatttgatctatgtgaataggtcctaatttatcaaaacaaaatttggatctaggtgtccttttataaactggttagtttgcattactacagtttattgtctcatgacaaaaattctaaaatgaaatccataagatctttctgtgtatgtgtgtgtgtgtgtctgtgtgtgtgtgcatacttagatgtgttttcctatgtaggcatattatactatacactgtgtctataagatgaaat

SEQ ID NO: 43865 - DNA, 739 bp, Homo sapiens
acacccataatacaactgtcacttactatctgctctaattcaacccagtcatgggatactagattaaaaatttgctcaatattatgatgtagtttagatttttgttttctccaaatctcatgttaaaatgttatccccagtgtgggaggtggggcctggtagaggtgttttggtcatggaggtggatcctttataaatggcttgctgctgtcttcctgattgagagggaattctcacaagatctggttatttaaaagtttgtggaacctgccccctctctctcatgctcctggtttcacaatgtgatgtgcctgctctcacttcaccttctaccttgagtaaaagttcactgagtcctcctcagaaacaaagcagatgtcagaaccatgcttgttcagtctgcaaaaccgtgagccaattaaacccgctttctttataaattacctagccttaggtatatctttacagaaaaacaaaaatggcctgaaagttatctattaactaactaactaaataaatatctggccagactcggtggctcatgtctgtaattccagcacttttggaggccaatgctggaggatccctctagcctaggagtttgaaaccagccctgtctctattattattatttttttaaattagctgggcatagtggcatgtctgtggtctcagcaactcaggaggctgaactgggagaactgcttgatcccaggaggttgaggctgcagtgagagct

SEQ ID NO: 43866 - DNA, 1146 bp, Homo sapiens
ttatcagaactatatcagttcccccaaatgtttctgatttgtgccactcgtgacgtgtgcttcaccctatctatccgctgctctggagactagaatttgagaagatggatctgagttgtagagctgtttctgaattgggtgtgggtgactacgtgactatctttccataatgacatgttctgggagaaagaatagccatgtgtattagtccatccttgcactgctataaagaaatacctggaactgggtaatatatgaagtaaagaggtttaattggctcatgcttccacagactatacagaaaacatggctagtgaggcctcaggaaacttacaatcatggcagaaggtgaggggaagcaggcatgtcttatatggccagagcaggaggaagagagtgaagggggaggtgctacacacgtttaaacaatcaggtttcgtgagaactcactgtcatgggaagagcaagggggaaatccaaaaccctgatctaatcaccttccatcaggcccctcctccaacactgaggattacaatttgacatgagatttgggcagccacacaaacttaaacgataccaccatgaaaaagataatgagcacaaaataatgttacagatggctacgtcataagaattgagcacatatacttgcccctttggggcagttttgaggtagactagctagtgacgcaaaatagactgagtcctaattctttcttggcacacagatttgactgggcttattcccaaaggcttaagcaatgagttggaagcagtctgactcagcagcttttattaacttccctaggtggtagggcaggattctgaagtactgcagataatttaagtaagatagattgaatagtgtccattcaaattagtgacaaagaaaaaaattatcatttgtgaccatgacaacagaagctacaaaggattgacaggaagggagccagatggcagtgcattgagaagtgtgaatgagaaatgaaggagcaatggctggggaagaaaacacttttaaaaaaagctacatggtaaagcaaagttaatgaaaatagcagttttcccaacttagaagaaatatgataacagtcattatcactatgttgtagaattacaagtaactataatttgttcatatttttc

SEQ ID NO: 43867 - DNA, 2290 bp, Homo sapiens
gtgaagttacctagattgaagacagaggtgggatttttgactctattgcaagtggagtttttgaaagtattattaaaaaatctgaactttaagcattgtgtccattgaaagattaaagggagtctccaggccattccagggaatgaggccgctaggtcctgtcagtgttttggagacagcatttactccttggcaataacggagggattgagcagaacatcctggggtgttatgggaagtgtccccgggagagcagaccagagaacagggtagcttgcaaggacaaagattataaaatctcagcttgaccaagccataaagctgcctgacttcaaggaccatatgagctcagatcctgaatctttcaacagtgattacgaggggctgaaacagctgtactgcctgcagttttcaggtaccataaaagtaaatatcacgtacacttctctttacctgaaaaaagtcaaactcattactttaaagttataccttgtattgaaatttcctaaaaagagtggttttcatgtctcccctggaggttatgtataagttaaatctaatatattgtaatatgtgataatgtaattgaggaacagaaagtaattgaaattcactaatgaattaatccttggaagactactataagatacagaggggatagatattgttttatctcaggaaaaactgaggcattgagtagctgcctatctaaagccatttaaaaaagaagttgaaagctataaattgtagatgattttatattgtacctgacctagctctgaaaaaaaaaaaatcaaaagaggcagattcatgctttccaggcatgcccggggaatgatggaggattctctttttatgttaatccattctctttgagtcaaaagctgacagtgcacagacaacaaagggactgctaagtctgctgtccaaaaatactcaccacaatttgtcaggcttcacattatacatggctttttacacatcgctggcctctaaacataaaagatcctgttggtttccctaattaaatagagtgagatcaaaggttcaccaatgtctatctgactgtctcacggtattccagaactgaaagcaaataagaagtgtatgaaaaatgtatcagaagttccagagattgagctctctttttggtttctttacctttagaaaaataaaaataaagccaaggcagcctctgaatgttgctcatatttcttttgttggtgtttttccttaactagataattgttttgtcctcacagttggggaagactgaagttcagaatatagagataccagacatttcatctgtgtagaaaagatgacattgcattagggtccagaaatgctataatgaatattttctaggtacaaaaaagaccctgacacacgctttttcataagccaataatatataatagaagaagatgcattaaaataaaatatggctggtcttcagtgactaaactcctactttagaattgtgaatccatccatagattgttcacaatggagttactgtttacaggaaattccaatgtcaaagagatgatctaatcctgattcctttggggtgagtcaatattgattattctcattaggggaacaataagtaatggatttggaaaaggccttctcttttaggactattatgctttggctgaaaaaaactttgaaaaaaattcttaaatatctaaggaaaatgtgctaggatgtactcactacatctttctccctccaaacatatttaattattccaagattcataaagataaaaataaaataaatttgaaatattaaataaataacttttatctagtagatgttttgtatctgatatggtctcttatatgactctaaacatacttcaaagaccttcacatgggttttctatgtaacataaaataggctaaccaaaagtttaaatgacaaataattatcaatgaaaggttaccaggaaaaaaaaagtaaatgcttgcatactttactaagcaacaaaaattactttcttcaatatgctctttattaaaatgtaataaaaatctatcctgagaaccagatggtagatgacatgataaattaaagccctacataagcgcaaatagaaaaaaaaataacttgctgctgacataaatgacatttacaatatcacatgttttttctaatgaatatgagatgatcttgatattgcaaaagacctttattccagaaatgaaacagctagaggagaaaaaagtgaggcagcaacttgcagttctatagaaatagcaaatgctatctatgacctata

SEQ ID NO: 43868 - DNA, 1011 bp, Homo sapiens
ctcttctgaaattgaaaagttgattgcaattcatacataaataaaaatatacataaattgccaagaggatctttcttaaaaaagctggataagaaggaggggagcaagatagctgaatagaagcctccaacaatcatccccactgcaggaacaccaaactaaacaactattcaaacaaaatggcaccttcataagaatcaaaaatcagttgatcacagtacctagttttaaaatcatattaaggaaaaaatacactgaacgaggtaggaaagactgttctgaatcacctacaccaccttttccccatcccccagcagcagctgtatggcacaaagattctctgcacttgggagaagagtacagtgattgcaggactttgcactggaactcaatactgcctggcacatggggcagaactcagccagcactcatggagggagcatctagaccagctccaggaagaggcaaattgtccatcccaacagtagaaacctgggctccagcaagccctgccaccacaggctaaagctctctagggttctaagtaaacttgaaaggcagcctaggccacaaggactggaattcctgggcaagccctagagttgtgctgggcccagagccagaggaattgggctgcgcatgaactactgagatactggctgggacagctgagggagtgcttgcatcaccccaccacccctcccccaacccaaggcagccagctcgcagctctgagagacactccttcaatctgcacgaggagaagagagggaagagtacagaagattttgctttgaaacttggataccagctcagccacagtagaatagggcatcaggcagactgctaagaccaccattcgaggccccagctcccaggtgacatttccagatacaccctggagcaggagagaagccattgccctgaaaagaaggacccagtcctggaagaatttatgatctgttgactagggccatgaataaacagcaatggtagccaggtaatactcac

SEQ ID NO: 43869 - DNA, 720 bp, Homo sapiens
ggagacactgtctctattaaaaaataaaaataaaaaatttaaatactaaaataatacagatggtgtttggaaataacaggttacaaggaagaattagttcagaaagtcaaataacaaaccccattatctgcttgaagatataacatatttctactgtaaagatacattcattgtttggattttacattctagatatccagagaaatatcactgtggaaaaatagattacgttttaattctttttctgccccaaatttggtttattttactagtcaatttacacacaccatctatgttgatttattccatcagttagtcaatatttactctgtgcctggtaagtccagcagagagaatagcaggtgctttgaagggaaagtacattacacaaacatcgaggatatgtgtggacagagaagctagcaaagggaagcaaataggagataagaataagagatatcagggaaacaaaattggactttgactctaaataaggagagaagctattgggctaatataacagaaggaaaaattcatgtttcaggtgtatctctggctgcaatgtggaaaatagtgacaaaggagggatgaagaaaaaaaagaaatgtggaagcaagtttggctttaattgaacaagagaaataatggtggtgtggtccagagtaataccaacaggagcagtggaaaggagacagatttagggtatactttgaaggcagg

SEQ ID NO: 43870 - DNA, 2003 bp, Homo sapiens
cccacagaaaaaaaccaaccctgctgacacatgaaatatggtctgggactttatgcctccagaattgtgagaatagtaagccacccagtcaatgctacattgtaaagacagccccaataaactaatatggaagcaatccaatgaagctgaaactgtccaggtatcatcaaaattattctaaaattaaaacagtacggttgaattcagaaaatggctctctttctgatgcagcatgttgtctaaatacaaaagaatagccagggacctgatgattactattttcttgcttttgatatagttcatgtataagattaatgttttctacataatatgatgcaaaaattttaaataaaattttaaaactaagagaggaaaatgaatggaaacaaagagtcctaggacagagagctgcgaggagtatcaaaaaaaagtctggaaacataatttctgaataggcctttcaagtagcatgcccaagcactgtctgtacagttgtagctggtgatgttaggttatcattagtctcatcttgatacttccgagtctacctaacatctagggccatgttgtttattaatttaagaggtcagtggactgctacaaagaataactgtcctagaagttgatatgaatcacaattttctttccctcacgttgattttggcttagcttttatccatcatcttctaaattaggagtttaaaaattggggttatgagaggcaggattaggaaagggttcccagaatgactcttctcttcaaaagaccaaaaacccaaaatgtgtctcctttcccattatttgccttgttcccaaataaactacctaacaagaaaaaaaagggggtttaaaagaagacatctcccacacagctggttatatattgataaataaatccaatttttttcacatgccagaatgtgaccactgggaatcttcccagtaaaacattaaccaactctgtccttattgaatcaagacaatgaataacaaaagaggactttgactctaatctgaagccataaaacaaactggatgaggcatgataattcaacaggaaagagattactgacccttcatagactggcagctctttcaattaagatgagtcctaagagaaaaggtaaggttcttacaggtcaggcagcaggctttcttgctaaaattaaagttgagtattagtccactgagtttataaggaaaacaaagcaaatataaataagaaagaatagaattttcagagtggtgtagtagagtgtcacaaaatcagacagacttatatattagctaaattctaacacccttaaattgtcaggctatagaaaattaacattttaagccccaattccattcatataaatgggataataatatttacctcccagagagattgtgaagacaaaacaacatagcatatgtaaagcatttagtacaatgcctggtacttggaagacacagtaactattacatttttatgtcttcctttctgcctttcccatgaatatatttacagcattgcctgaaccctcaactaatttttatcaaggaatgtgaaggcaagacactcttttaagttttttgatatgttttccaaacttaaaagaccaaagtgatctggcaaatatttctaacatactttgttcttcccactttaccttcgttctttcttctcttatttgctacagtagttgtctagagtagaagatctgtgtcattctagtgactatgtgagaaaggatgaaagaaaaaaaagaaacactaatggtaatacttgaatcattagtatgaattttataagaaatatgagaaatatgcttaatagtcaactaaataacaaaatcaaaaacaaactagattgaaattatttttagtttgtcttagtgagcttgggctgctataacagaatgccacagactgggtgacttaaaagtacactaattccatcatggaggtccccaccatccttttgacctaatccaactttaattacttcctaaaagcct

SEQ ID NO: 43871 - DNA, 1172 bp, Homo sapiens
agccccggagactccagccccgtttaaatcctgacactcggaaactctcttctaacacttgcaaggtaccccttttacctataaaaggctctcgggccgcgagatcgccgtcagagcaaagccaggctactaccgcaggtaccaagacagtggcaccgcccgcgcctccggaacaggaaaccgagggaattaaaaagcaaacctgagaaagctgggccaagggagggaaaactcttcagcccaccgcagggccttgtgcgcggtgattggcgcgtcaacgaaagcgatggacgtctagaccaatcgtcagcaaaagaccctttggagcccgcgccccctccccctacgtcctccaatccgaaaacgcaaccgggtgagggagcgcttccgcccggagagagctggccgggatgaggcgccggctttcccgggtcttctccagctgccaccgctttactgcaaaactgacgggcgcaaaaacatgagtgactccgcgggagggcgcgctggtctccggcgttaccccaagctcccagtgtgggtggtggaggatcatcaggaggtgagcggacggcaacagggctctggggcagaatcagcggaagccctgacgctcagagggccaagcagagggcgcaaccttagcatcggaggccagagagttaaccagagttaaactgccctattccgttgctgtggagaggaccccaaaacagctaactaggaagaatgagaactgacatttatgggcgcttcctacgagtcggggcaacttatttacctcggtttgcccccaaatcccagaaccaaacaaaaggtggcatcgggattcgaaaccggacagtctggctgcagagccctgtgttcttaacctgcagttaactctggcttccaagtatctcctggaatcgccaccacagccctgctgtttagatgggaggctttatgcttggaacgtgggctctgatctgaaatggggacagtaatcgtaggactcacagggctcttaggagtattattgtgtgcatactgtgtttaaaaatcttttttttttcttttttgagacggagtctctctctgttacccagactggagtgcagtggcgcgatctcggctcactgcaacctccgcctcctgggttcgagcgattcttctgtctcagcctcctgagt

SEQ ID NO: 43872 - DNA, 742 bp, Homo sapiens
ccactgtgccttcagtcacaaattctagatgatgcttagtttaacttgctcctggaagtgagacaatttattccttgtattttacttaaagcctaatggtatgccaggctgctttcccctttattgacacaaaagatctattataatattttatctaaaaagtatgccccgctttaaaaagctgtggctaacattttggtgcactgtatccagtaaaactatctgtcaaacagtgtgtcctctttcaagctagtggtgttttgtttttgttttttaaccaggaatcaatagatgggacacagaggctgggaaactccaaaaattgattgcaaaatgtttggcatgcatgcagtttttctgggaaaaaagctattgttcccataaatactcaaacactatgccttcctctgcttctaaatcaatgagcactcctctatcaagttttcctcagccgatgacctgtgtaccttttatttcattattttggcttatatacttttcattcattagctgtcattacagaggaatctcaagagagaggaaagatacacaaatgtgatcagctctttttaatgttaagaaccatggctgaatataaatatattgaaggaaaacatgggtgaaggatgagaaactagaaaaagcttttttttttttttccgcaaaatgggaataaaatatgtaacaaagatacccttcctgacagtcttattggctggccttacagtactttatgtaagag

SEQ ID NO: 43873 - DNA, 934 bp, Homo sapiens
aaaagaaactccacattttcttactattttaatcaatatatttcagtatatatcaggctttttaaaaaaatcttcccatgaataatgacagttatggataacaacagaaaaacatccatgaatctgccatgatactaataaatatagaaggaatagaaaacttatagaagcactgttttgaaagcttcatagtcatacttgatttaagcaataatagtcaatgatgccaaaaccatggggtacaaatatattggagagcgggatatttacatagtctcaaactgtttcttcacagattactcattaatgactgaaaaaaattccagtggagaaatctggcaaattccatccctaatcaagagatcaaagttatcaccgattataagacacattgacccttagtgcctctgaatgcactgagaaggaaatcattcttgtactttttctgccaaaaaaaaaaatgcgtaatctgaatctaagcatgaggaaactatcagacagatcctaattgaaggtttggattggcctggtttcttccaagatatcagtgccatgaaagaccaaggaagattcgggagctgtttcagattaaaggagactaaagacatacaacaactagatcctggattgccaaaaacaattttcgtaataaaacatcactatgcaaagaagttgatccatggcagcctgctacaggtccacagcaagatgtgcttgcaccaaaatgtaaacattgtgtcaccatgcacactattacatagttcagctgacattttttccttagcatgatgattttgatgaagccgtatgctaatttgcattgtggagttaagttcttatctcatcacaggctggcattaaactttctgtgagctagtcccagactacagacacactttgagtagtacttgcaaaggacactattagaaaagta

SEQ ID NO: 43874 - DNA, 594 bp, Homo sapiens
acagccgaggagagcccgccccgagtcctggagagggaggactgccttgggttgcgagtttcacagctcagtctgactttggcctcacgtgctgctagccagcttcagaagctagaccttgtcttgaatgttcaggtgccagatgggtgtcactgctgttttcatcccccaagtagcaactagttaccattctcctaactcctatgtgtggagtttgtttgcagagagtcctcaaagcagagctagtcatctcggaaatacctctcgccacctaactgtggacataaactagtcaagggagccacctgctggtgagagaagagttacattggtgtagtcccgccgttgccctgaaatatggtggacccctgaacaacatgagggttggggcactgaccttcgagcagtggaaaatccacatataacttttaactctcccaaaaacttaactactaacaacctactgttgaccggaaaccttactgataacataaacagtcaattaacacaagttttgtcagttatatgtattatatactgtcttcttacaacaacgtaagttagagataatagaacgttattaagaaaatccta

SEQ ID NO: 43875 - DNA, 3263 bp, Homo sapiens
aagactttttttttttttttgcccaccttcctgaatttggaaaactttcttaaaatcaggcctgggcgcggtggctcaagcttgtaatttcagcactttgggaggccgaggcaggcggatcactaggtcaagagatcgagaccatcctggccaacatggtgaaaccccgtctctactaaaggtatgaaaattagctgggcatggcggcgcacgtctgtagtcccggctactcgggaggctgaggcaggaaaatcgcttgaacccgggaggcggagtttgcagtgagtggagatcgcgccactgcactccagcctgggcgacaaactgaggctccgtctcaaaaacaaaacaaaacaaaaacacaaaattagccgggcatggtggcgcatgcctgcctcaggaggctgaggcaggagaatcgcttgaacccgggaggcggagatttcggtaagccgagatcgcggcattgcactccagcctgggcaacaagagcgaaactccgtctccacataaataaataatcatttttgtaggcaaatataacaaatacagcaaaacgtcatagaatctagaaagagtatatatgcatatgtatctatcactttttcaacttttctgtgtgtgaaaattttggacactgaagtgaaaataaacgctttcaaagtcagaatacaaagaattatctattgcaacttcaacccacctgaagctttgaggcctctgatcaactcacaaacctacatttcaagcactcgatgaaaaagccctttcttaagacggcaagactttgagattcatcaactgataaaatataaaagcgatactaaaaataatctctcacctaatgtaagttcacctagaaagtcatttaccaggaggtttcatgagaaacttaacttaactttactcagtaaaagagcttttccctctattaccacttcgcctacgtttttcgtaattcccaacagtaagctttaactgaagaagaagaaaaaaaaaacatccccagcaagcagatccgggcacccctcccaggtcctaaagcctgcaaaaacccaaagagttcgtggcgctggtggctccagctgttagtttcccgggcagtctccgggttggatttgcaccctggggtctacacgggttaaaaacgcggaaaaaaggcgacgaagaaatacaaactgccagggtgtcgaaatgaaaggagcgactgtgaaaggggtaaggaaaaatccaagccatctctacggggaggatccagaaagcaccagccgcgccagggggtcaaccaactccgacaccgctcggcgtcagctgggcgccaccaggcgcggacttcggagcgagggcaggtgcgcgggccggaagcctcgggcgctcacctggcacctacctggagctcacctggcgcccgggccccgcgccgccgccccccgcccagcccgccgcgcccgcacctcgcggtccttgaggcccagcaggagcacttcctccatcagggtcagccgcgtttccttggagtcgcccttgtcgtcgtcgtcctgctcgtcgcggcggctctgcgcgtcgtcctcgctgctgccggcgccgccgcccgccgcccgctccttgtcggcggcgttgcgggaggcctcggtgcgccgctgcaccaggccggagctgcgctgggtcagcgaggtcatggctcccgccgaggcgccgagccgggccgagagggtcgcaggaccgaccgggtcgccctcctcctccccgcgcggcctccgatccgggtttccgtgttaaatccggacgccggggcgacgtccgtcggcagcagggccgggggcagtcatgaggaaacaggtcagggcgaagcgggctggccgggcgtcggcggggcaggagaggagcgccttcctgcctgtggccgcagtccccgaaacaccccgagctccaaggcggaggcggcggcggcgcctttccaatatggcggccccggctgacgtcaccggaggatgtggcagagtcggcgcgggagagctgggccgggaggcgccggaagcggcggccggggatccgctgccactgcagcctacacccttcccggccctcggtgcttgtcttttctttggcgttcctgcgccccctgacccgcggtcctgcagtcctgctcccgtgacgtgccctccctccttccgttccccgtttccccttcactacccagggctggagcctgaacctggcggggccccccgtgaatggaagagcctgggccacgcgaaggtggaccccactcagcctccagccgtgccctccacgccccagacaccgccgtcttcggaggcgactccgcggtcgtgtggacggggtcccatttggactccggggtctgcaggatcggcaggaaggactttgctctctgctgctgggcggggaggggtacgctatctgccgggactccctaaccctttagaaggagcaagtgcgtccaaatggtttgaaagtggacctttattgttttccaggagtaagaagatagaacagttgaccagttttgtttgtaaaacttctttccttgcctcggacttgtgctataaagtgaccagggcgtagtgagtacagttagtaccgcacacgttagcacgctcgaccttaacgatctttttatagagacaataaacctgcagcgtttcatgccacgtctttgtacgcatcggatgtctctccgtgtagttactaggtgaaatcctcttggcgtgcgcaaattaggttaaaaaaatagctgtcaaacctgagacaggagttggaggagtagagggtggcgcttgttaagtgaaacatttaaccaggaatggtattgtgtgccatcctgtattaaacaatgtatggacagagtggaacaacagcaaagcaaaaaataaaaattttttaaaaaaagtgatcatgggctgtggctaaagagtgctttagatggattcttctcttccacaaatccattatccagaactgctgctgcctaccatcccatgccctggaaagtgacagtgctaaatgaagggaagagagggtccagggggcacaccaagtagaccttccctttttcccacctgtcttggtgaaggtcgatttcacctcaaccaatttctcccattcacaccctcttttttttttttttttttttttttttgagacggagtcttgctctgttgcccaggctggggtgcagtggcacaatctcggctcactgcaagctctgcctcccgggttcacgccattctcctgcctca

SEQ ID NO: 43876 - DNA, 716 bp, Homo sapiens
agccactgcacccggccttaaatttactgtttcaaaatatcagctgttgatatttaattcactatttaaattgtacaaatagtttttagtatactcacaaacttgtgcgaccatcaccataatcaattttagaacattttcatcattccctccccaaaaatgcctacccgctggcattcatctcccattgcccctcacctcggtcctccagcagtaggcaaacattaatctactttctgtctctgtcgatttgcctgtttccctgctctgtgggtgtgggttcctcttttcttctccatgcacacatttaatctatttcctcacttaccgccacctctgctcactgtggcccggtgccaatccaaacatctccctctccaactgttaccatactttatttagctttgttcccataaatgctctacgtcagtaatgagtggctctctgccagctgcccatggccactgtccctagccaccgtggaatttcctaagcagttttctgctcctaaagaagccagcacggctcactctgtgcctctgctttacctgccacagggcagaggagcgcctctcaaggtatatcaccaggacagcagactttctggtctcccctcatctcctgctcaactttaaaagatacgatcgttttattactttgcatttatatagccccctttctggaagctcttcagcccccaatggcactttttacaa

SEQ ID NO: 43877 - DNA, 2784 bp, Homo sapiens
ctgggaatatccaacaattgtattttggtgaaatatattatttttggtgcattcatactgggaagtattacagttgcctaatgatgaccatcaccattaatatctcaaggtggttaactctaagtgatagaacaacaagtgatttttaatatgttcttagcttttattttctgaatttttcatagtgattatatattgcttttatattcagaagaaatggcaagggatacttctactttattttggaacaaatgaaaaatacaatcttaacctgacagaataccaacaattcaatcatgagcaatgttttttgggggtcaatgagttcctcatttaaaatgcaagaggtgtgcccatgtctttctaagtcctattctatctttaaaaaaaattgggactccttggaagaatggctggatacggggctggggcaggaaaagcacaaggttagccaggaacacaggaacattctgatatgccagaaagtaagaaagtgagaaggaaggaaggaagaagcaaggaagggagggagggagggaggggaggggaggggagtggagttgggaggggggaaggagggaaggggaggggaggggaggagaaggaaggggaagggaaggaaaatatcgggacatgtcaaaaggacaagagctagtttgaaggagaaggagagcccgctggccaagtctgggataattttgagctaaaaataaatcaggacagtaaaggattacaacttattgaataaaacattaatcatcaggccaggcgcggtgactcacacctgtaatcccagcactttgggaggccgaggcgggtggatcacgaggtcaggagttcaagactaacctgaccagcaccgtgaaatcccatctctgctaaaaaaaatacaaaaaaattagccgggcgtggtgacacatgcctgtaatcccagctacttcggaggctgaggcagaagaatcgcttgaacccaggaggcagaggttgcactgagccgagaacgcgccactgcactccagcctggcaacagagcgagactccgtctcaaaaaaaaaaaaaaaaaattaatcatcaattcaggcagctgataagtaggtaaataaatagatggaggtagtaagggagggctttccttatagtgagatgtacattagattgatacatgtggagggagggatggagttgaaaaatcactgttttgctatcatcaaagcaaaaaattgggcaagaaatagcattgattgctaaatctagggagataaagtctgatgaaagacaggatatttagtcagtcctaacgtggctctccacagattacttattagttgcaaaagaaaaatagtaacttatcagtgaagaaactggacaatactgggatcaggtgactaaaattaacccagggacagattgacacactgtgcctccaggtaccctgaaaagaatataacatcacttttttcatagtttggcaggggaccaaaaacctgaattaagtcacgaggaaacaccaggcaagcccaactgaagaacattctataaaacaaccgatttgtgttctttaaatatatcaatgtcatgaaagagaaagaaattctgaagaaccattccagattaaagaagattagagaaacatgaccccttcaggcatatatgtgatccttggttgaaacttggactggggggatgctgtaaagaactttattggtataattgacaaaattggaatatggattatagagtaggtgaaagtacgtatcaaggttaaattttctgatttgataattgtatttggattatgtaagaaactatatttgttcttaggaactacacattgaagtattaagagtataataaaggcatgatctttataacctcaaatggtttggaaaaaataaatacagagggagggaagaagagagaataattaaacaaatgtggcaaaatgtaaaaaagttggttaatctggactgggcgcggtggctcatgcctgtaatcccagcactttaggaggtcaatgcaggtagatcacgaggtcaggagattgagaccatcctggctaacatggtgaaaccccgtctctactaaaaatacaaaaacaaagttagccaggcgtggtggcgagcacctgtagtcccagctattcgggaggctgaggtgagagagtggtgtgaacccttgaggcagagcttgcagtgagcggagattgtgccactgcactccagcctgggcgacagagcgagactccatctcaaaaaaaaaaaaaaaaaaaatttggttaatctgaatcatggctatatgagagttctctattatttttgcaacttttctttacgtttggaattattcaaaatcatgcccggcctaaaatttaatttttatttgctcccaaccatttgattttgccctccaaagagcagctacacttatgactaagactttttgttttatttcatgaacaccaatgttagttcaagagaaatcattccagtagatgagatcagttgttgggtggaaatgtgtgtttagaaatactgatgatactttagggaaatatccacccagcattgcaccaagtccacacatggtccaaatagaactagggaagaaatcctaatctgaattttttaacctcttatataatgaacatttcatggtataatttatggttttccaaccacatttcagcttgtatgactaagtaaagcctgccagtttattatccagaatacaaagttaggtgtgcaaaaacataatcttgtgtgtctataattagactttatttat

SEQ ID NO: 43878 - DNA, 908 bp, Homo sapiens
aaatgctgatttacaatgttatacacaatttataagattttaaagattttttttctaattttgataaagttccatgttgttgtgaagactattgctttgtaaatagtgtggggggtacgtgtgtgtgtgtggacagtacatgtactcttctgtacacacacgcacatgcacaccacacatgattaccatggaagccgccatgtcagtgcgccatgattctgcccgtgtgcaggtgactgcctcagggctgtgtacttatcccagctgagacactctcaatccttactctggagatttagatctgaaagtcccagggttataaatttttaagtcaggggctttaggatgcacattttccctcacttggaccagagaaaactgatccagagagaaagtggggaggaaacagagtaaacaaactgagaggagcccctgagatggagaaagaacgtaggcagcatttgcatttctggttccagtaactggggaggccctgctatttcctgtcattgagtttctgagatagaacaggatccttatgacaacttccccctttggttaaagcacaatcaatttgggtttctctctttcgcaaccaaagggaaaaaaatcaatagctaactcacaagttcattgtagggaaaaagttcaattaaaaaatatataaagaggccgagtgtggtggcacatgccagtaatcccagcactttgggaggctgaggcgagtggatcacttgaggtcaggagtttgagaccagcctggccaacatggagaaccccatctctactaaaaatacaaaaattagctgggtgtggtggcaggtgcctgtagtcccagctactcaggaagctgcaacagaagaatagcttgaaaccgggagtcagaggttgcagtgggctgagattaa

SEQ ID NO: 43879 - DNA, 633 bp, Homo sapiens
aaaaaaaaaaaaaaaaaaaaagatatacaatgctaccatctaccatcactccagaacattcccttgtgcaccttcccagtccacccctgccccacccccaccaatctctactgcttccccccaccccacccccatcagctggggagagaggagaggtcttttccatcctctcctggaggctactgcagtagcattccaagcagagtcctcagggtcagtccagggatgaaatgccatccatctgcattcttttccttcccaggaatggcatgcacttgtgccctttcagtgctggggatgagtaagcacaacattcactgggccccagacttctgcgaagacaatttgaaaagtcctccattcaggatttcataaaaacattcaggtccagacagccctttatgaaactggctagcaaaatggaagtttttaaaaaacaagtccaaaaagcttactgtgtgtgaacctacagattatatattgaaaaaagcttactgtgcatattttcatatagtaacacactttatatcctttaattgctaagggcagacagtgtaataggggatttaaaaagaaaagaacctgggtctgaaccacaaaacaggctgagatgtctgttttcagacataaagc

SEQ ID NO: 43880 - DNA, 723 bp, Homo sapiens
accctgtttcacactggacggagaacattccactctttactccccaagtccctccatgccctcacctggacatcaaggaacaagcaaaatcaagagtgagagacagctaagtccaccaaaagtacaagagctaaacaaatgtggaaaataagacgagaagctgctaaactctacggtcacaactactacttgggaatttaatacaaacaccaaagaagcaaaacatctgaaaagcacgtggcatccatgagagcttattaaattccaggggtgtctcagagctagctttctggacatagtgtgctggccagataggaaagggggatggggacaagcagcagagtgggaagcctcctctgtaggtaggaaaggtcaaagaaatatgagccttgtttctcagaacatacaaagtgctatgtctcaatctagttaagtattaaaacgaattagaaacaaatcctactctcataagccatcttaccctgtgctcgctcacttaacctctctgaaagcaaaaacaaagcctttttctatctttcatggtttaaatgtactcagatctcttccagcaatttttattccagagtaacagaattctaattttacagatccccacaaaaagcagagaggtaataatatttaatttcagggttaaaaactcttttcttttaatcaccctatccccaccctattttttcttcagcattttatcatcacctggga

SEQ ID NO: 43881 - DNA, 2414 bp, Homo sapiens
agtctctgcagaacttcccccaggccaccaggccgctcaacacattgctccacctgatatctggtcttcttacccaaaggcttcaaggtttcttgtcgcccccgtcccaactgtgatttagctagtgcaacctgaaattctccaccccttcagctcagtcctttcccacctgccaactcctggagcttaggctgtctgtccctatctcccaaggaaaagagatgattagaaaagctaggtctgaggagagaaatgaaatccattattggaagggggagccttaggttcctcccgtaacacaacagacgttgtcctcgctgtctctgaggtcccctgccactctggcacagggcagtttctctggtgccaatccagctctcatgagaatgtgcatgcagccaccagggggcacaacacactgaagaaaaaccaatttctggccaagctgttctggggctcagggcaattctggttaaactggcagaagaggctcagccagaaaggggaaactccaccctgggcctgcggcccctaaaagggcaaagtggccattctgagtcgttcagcagccaacatcgtctctgctggccgtggctcacccaggtccccagtcctctttagaatggaaccaactctgacaccagaaagggccaggctttctgaagccctccagatcaggcaggataaggatggcatggagaaggcagtgacacacatcgacttagacttaccatcactgctctctcctttgtggactctgtgggggagaaattctgggcctggagacagagctaggaaatgtcagttaaataattcatcagttagggaactttgggattatcaactaaaatgactttctgacatttgtggctcatagcataggtcagcaaactggccacccctccggccaaatctggcctggcgcctgttctcgtaaacactggaacacagctatgcctacttgttcacctactaaggctccttttttttttttcaagtaaaggaataaagaatggctactccaagggcagagcagactaaggcttcttttgtactacaacagtagaggggtagttgtgacagagactttgcagcccttgacagagttttgcaacctgtggtttacaggcacagctcattaagaaaagtcttactatttattataataaatgaactggtatcggccaagtaaaacccacacaatcaatgttccttttactctactaacacacacacacacacaaacacacacacacacacacacacacaggcaggacaagaggcacgattccatggagtatgaccagggtggcagcatccacagtgacatctggcaaatggccctgttgtaccagggcaaaggtgatttgctgaaagcaaaggattctaatggcccttgacaatttgaccatcacaagtctcaactctgcagactgcttcgaggggtagaaaatgctggcagacagaatccgtaagtaccttttatcattacatgcacggggtctgggcagctgaagggggtttagacatgtggacatcttactttgaagcgcattcctttccgttggcctttgtccagttttggcttttccacataaagagggtttttgagcaatgtctgggctttgggttcaaactgcaccgaccaatcccacacggtgagcagattcaaaggcttgctttgtgtatcctggccttctctaccctgccaaaacaagcacaggtcatgctgttttccagggagggctgaggaaggcaaacacatacttctggacacaggcaccaggaagcatgctcctgctctgccctgagaatgaataatcatgggcatttaaggctgaggctacctgtggttattcactacaagcttttggtgtgggaggagggcaagaacaaggacacttcctttccagcagtctacacgccagccgctgtgctgggtgcttccacagcctcgcgaggcaactgttgtttttccaattttacatttgaggaaaccaaggctcagaaaactgaactgcccaaggtcacaaagctggtgagtcacaaggctgagctctgaaagcagggctgttgctcctacttcactgggggatttggtaatcctcccagctcaagcaaagcctgtagccctcaggaggctgctcagaagcactgagattatctaattgggggcacagtccaggaagggccaaaagggttaagatggaaggaaaaggctagcttccctgatctgctggtccccattctcttcacagaggagttccaggcatcaggcaaaatcggaggacatctggtctaactgtctttcaaatggacagctttgaattttgcttaattccccagcttcaacacttgcttccagttccaatatttaccatgtgaccacgagtgagttacttatcctttttttg

SEQ ID NO: 43882 - DNA, 693 bp, Homo sapiens
ccttcagagcttcgtttcaaaagggaaataagcttaggaatataaaataaggtagaatgtattatataactgaagaaagaaatttcaaggcacaacaaaaacaaggcaaggagaaagaagtcacacgagtgaccaacagtggcaggtgaggctgtttaggctttcttctgctttggcaataggttaaggtgttcaggcttttttcaggttacagtggggggttttgtttgtttttcaggaacaaaaggagattacaactgatcttggggcaaagtaatctgccagtggaagctagaatggagaagaaagacagactggttggacgggtgagtacagttgtggactttgagtcctgcataaaggcctggctaagtgcttgagagtggctaaggtccagcccttgctttgctgaccaagccattggcctgggctcaaagataaacctggaggaaagaccttttataattcggcttcccagagggagcacctttttgccattcatctgccaggtataaaccatgtgttggatatgctagcagtggcgtagaccgagagttagagatcggcatgacaatccaggtgatattgtgcactacacttagaaaatcacaaaggggaactggttcgggatttctggggaaggtgatggaatcagcacatattgggtgtctagcatcaacaggacctccatgt

SEQ ID NO: 43883 - DNA, 549 bp, Homo sapiens
agccaagatcatgccaatgcactctgcactccagcccaggcgacagagcaagactccgtataaaaaaaaaaaaaaaattagggaagagggaagaaaaataagtccacacaatgaaactagcaaaatgtcaaaggccaaatgttaataatgaaaaaagtcaataactaagtgttctcattacattggaattttaaatataaccaaatcattcgcaaatgtataaaggaacaaggaaaagaaacttttagagatagcaaaaaattttctaagaaagagttaccacacaaggaactttcctggcatgacaacatggcaacaatcacaacaaaatactccccttttattaataccttagctgggaaagatttatgcactcttaagattaatgattaagcactttctgaagccatccaagtggctctgacgaaacttctgaataacaacaataatggcccacatctcttaaaggttaactacatctaagtatcctgtgctaggggctttacatgcataatggcatttgatattaataaatgttcatacatgtct

SEQ ID NO: 43884 - DNA, 1755 bp, Homo sapiens
ctcctactacaccgtataatttacttaattatctataattcaccccgtttctcctttccccctcaaataagctccaggaatgcagagatctctgtcctgttcactgatgtctatcacaagcacttagtgcctgacacacagtaggagctcgagaagtattttctgaatgaatgaacaaatttcttgacctgaagattcagaagagtaagaagtgggtggaaaggatgatggtgaggggatgaggagaaagaagcgacagcggagaattcccaagggagagacaagcagagactggctgaggccaggccgacccccttttctccccgcagcgctgacgggaggcggacgtaggtgcagggcatcccgccagccgcacccgaggcactcagacgcaggcagcggaggccggcgggcttctgggctcactgagaaagtccagaggcaggacggacccacgcgggctccgagcaggccccgttgggggctccgacccacggccctacccctcccagcagtgcccacaaccccaggtcctctccagaatccccaggggcgttccgggccgcaatcccttctcggctcgggcccctccaccagcctccagcgctcgggccctgcgctcaggcacctgcctgcctgcgccggggtccccattccggcccgcgcggaggccccagcgcgctcctgcggcctcagcccgcctggctgccccgtcgcccggcacaagggcaggaagcgctccgcggcgctccccgctgcaaggaaggggctcccggcgcccctcgccccggccgcccctgcccgacgccccgcctgcgcggcgccccctcacctcagggcgtacgtacgacacgaaggagggcttgggggccttggtgccgccgccaccgccgactactcctttccccagcataccgccgccctgggaagcagcgacgcgcggacgcagaggcggcggctcgggctccagctggggcagcagcggcggccaccagcactagcggctggggctccgcccatccccaaggccgcgaccgccgcgatgccgcccgcatccggctccgccgctgacaccgctcgccccgcccaggcccgtgggccccgcccatcccgtgcgcgggcccagagagccgggagaccgcaactggaggccacgcccccccatcacgtcaggagagtttgacccgccgagattcaccaccttcctgcggcagagcccgccctcatgctttctctgattggcccgaggcgctgccggccgaaccccgctcccaacccattcttgagtgcacttggagagatgtttcctccaaccaatccagagagcgttctctccggactttccaacgattggatggcgaggataaaaccgtcgtccaatgatcctgcagtcaccaagttgtcgttagcaggggttcacggcagtcgttttcttccgtttgcttgtgtctttggaataaaacgtccaaaaatgggatgtatggaatcttgctataggagttcccaacttacagcgatgacgttcaaggttttttattttattattatttacttttgagacggagttttgctcttgtcgcccaggctggagtgcaatggcgcgatctctgctcattgcaacctccgtctcccaggttcaagcgattctcttgcctcagcctcctgagtagctgggattacaggcgcccgccactatatccagctaattttgtgtgtgtgtgtgtgtgtgtgtgtgtgtgtcgttctgtcgcccag

SEQ ID NO: 43885 - DNA, 1950 bp, Homo sapiens
tcaagagcaaaagagactgaactcgggtcttctggctcccaatgatgccctttccattaaacaccgtgcctcctgaagtaaatcaaatgaaaaaaactgcctgggtttaaccaacatctaacatacataaaaagcatatcacgcaggagccgtgtgcgcttatggcctgaatcaaaagtctcagattgactcaaaagtaacaatttaacaatccactgttgtgtttgtctttggtaagatgtataatgaactacagacttcagaaatgagagcttcccttaaagcagggatttcatccggtgcattacaatgactcagtacaatctcacttgcatcttcttccctccccaccattccccgcaggggaaagacccccgcaaggagaatgacaggcccacctggggcctaaactccatagctcaaacaaggctgggcactcatttatcagcactagaaacttcgcacatcttttccagtctaagaactacacaatttacaggtggttggtatgtgaatctctctccttgcaggaaaaactaaaggaacccgatgaacacagtgacacccgcagtttgtcagcaggactcgctagcgatggagcgtctggggaagaagccccacggcggaggaaaaggtacccgagacaacgacacgttatctgggctccgggggttgaagcaccaggcgacgacgcagagaggcgtcgcacgagaagccagtggacctgcgacacggcactccccgtgaggtcccttcagccaccctctccatcccccaagtgggaagaagatgggaggtgggggctggacgcgcggaggcggggactggggggcctgccgggcggcggtggcggctccgctcggcggccgcaggaggccattttagttaaggggccgctgaagggccctgaggcctccacgtccctacacctccgccgtctctacctcccccctactgggggccgctccccgccgcgggccgggccgggccgggcaaggcggggcggggcggggcggggcgggagaggccgccgggctgggccgggccaggcctgcagcgggccggggctctgggatggctggggacgggcgcgggggcgtcgcatcgacaggatccggaccgaggggagagcaaggggcgaacagagagaaggcaggatgccgttacctatattgggccgcagccgccgccgccgccgccccgctgtgggtgaatccaaagtagttgccggtcgccattttggcatcttcccccagccggctgggcactgcggcgggcacgaagagtcgggtcccatggcgggacaagagacacagaggagccgagacgccgagggagggcagggagagaaagagagaggcgccgtgagagcagccctggcggggcccaggccgcggccgcgccgcctccccctcccgcctcgcactccctcactcactcgcacgcccgggtggcggccgccgcctcctccccggagcctgccccaacccccgcggctccccgctgcccggggccagggagggggccgggcagaggcctcgcgggccacattagactcaccataggtgaaagaaactacagggcatatgggaatcatgggctcgggctgctgctgctgaactctgaactctcacccgctgcctccctcctctgccccgctcctcctcagcggagaacagaccgccgcctccgaccgcactgcgcaggcgcgcctgtgctcggcatcctgggagctgtagtccccgccgtcttcgcggctcccccgggcgcgtgccggggcctcggcggtgcgggcgcggggaagcccgcgggggaagaggggcctggccttctccgaagtggtggtgacgccgcgcggccgcggggcgacgggggcgtgtgccagaagcgcctcgcctgtcctctggggagtcggggagcgtgaccagagagagtgacgtctgttcgcct

SEQ ID NO: 43886 - DNA, 1371 bp, Homo sapiens
cgactcacggcagcctcgacctcctgggctcaagtgatgtagttgggactacaggcacacactaccacacctggctaatttttgtatttttagtagagacgagtctcactatgttgccaaggctggtcttgaactgctgaacccaagtgaccctcccacctctgcatcccaaagtgtctagtttcagaacttactttattcagaggtgtagctatctttgggaccaaaactgtgagcactgaaccagcgactggcttgagaagaaagcatttccaaggcaaataataatccaagctgaaaacagtcctcttagtgcaccagaagggaccttttggcaagtggcatcttgccagaaaattaactcaaaacaaatccctaacagctcagagatggtggaggggaatttcagaaacagtcagcagggcagggccatgcaactgcttacaggaattgcctcactcacactttgatgttgattctctgcagagcttccgctgcttcaaaacggcgtgcaggagtcagagacattacatcaggaagatactgcagagatattctactccatctcattcattgtacaggtgaggaatccaagggtcagagattttaaggaatttgtccaaaatcacagagtggagaactgtgagtagaactcagatcgcttgttgcctaattcaggtgttttcaaccccttataaataagccagggaggtgtggcacccacatgatttgctttctggctgatgtatctctattcctaacgcagagctcaggcatcaatcggtaaacatgaggaagagatagatgcggctctatctatctagtgtatgggagcagcatgtgacattgtgatgagatgtgtcagcacaggcacaatttaaagcagtgccatggcaaccggcattcactctggctccagatagcaccgtgaactacagggtgtagttgaaaatggcttctcacctagggagtggaatgttccagcctctgtttcctgcagtgagtgactctaaaatctaccaagcaatgtagcaacgagactggttcagattatttaccaagggttgggggttttcagcgtaactcacaggagaaataaacttggcagccttgggaatccccaagaattactgtgactatctgcagagcagtagggttttgctttctcttagagcaatgcattctttcagtgtcttcccggagaactaatacttcaaagaggtgccctgggcacgaggggaaggtaatggagaagggcaccaccatttgtttcttatatattgcagaatctgctgctaccctccccacaaattctttttttttttttttttgagacagggtctcattctgtcacccaggctggagtacagt

SEQ ID NO: 43887 - DNA, 826 bp, Homo sapiens
acaggaatgatgagttactgttctgtgacatgtcattttgaagaatactattgcctttcttctcattcagagttaacaggaattctatgatgggaaagttactttgatgaactcagctgaagcactgataactccccagagctgtggttctcagtcagggactatttctgtttccagggaacatttggcaatatattgggacatttttttggttgtcacagttagggcagagatatcactgacatacagtgggttgaggccaagagtgttgccaaacatactacaatgcaaagcagagtccccactgccaaagacttatctgaccccaaatgtaatgttgtcagggtcgatgaaccctgcacaagagcaaatcatcagtctttcaaaccggcccctcttcccaacccttgtagggaacatgagcttaaaggttaactttcaaacattcctggattcattttttctcctgcattttcagattgttttctttttttctctgggacagtctcatcaggagaagttacatgttttctagtcataataagaaaaagcattcctgtttagactttgatggttagtccatttagtgttgccataacagaacgcttaaggctgggtaatttgtagagaaaaaaaggtttacttggttcatgattctgatggctggaaagtccaagattggacatctgcatctggtaagggcctcaggctgcctccactcatggtggaaggcaaaggggagcaggtgtttgcaaagatcacatggtgagagaggaagcaatggagagaaggtgatatggtttggatgtgtattcctgcccaaatc

SEQ ID NO: 43888 - DNA, 1818 bp, Homo sapiens
ctcagcctcccaagtagctgggattacaggcacacaccaccatgcccggctaatttttatatttttttagtggagatggggtttcactatgttgggcaggctggtctggaactcctgatcttgtgatccacccacctcggcctcccaaagtgctgggattacaggcatgagccactgcgcctgtccaaaaagttttttaaaaaggtctggggtgggccagccaactggttacacagttgtctgggatcccatggaatatttaacctgacctctgatgggaacaggaaactgagacccagggaggtaaaatgacttgcccttgccctgttatggtcaatatcactgtaggtctctggacccagctctttagcaacctttccatgcctctatgcagctccccatgtatcagttctctgagagaatgcagcttgggcatctgtaactcttaggttgaattcaggcagtttaccacttctccttggctcataatgtctaggacagccttgaataggttcagaaatcatgtggcaacaaaatccccccttgatatcatggtatatgggttatgtttggtatttgcaaagcaaacaactgggatcaaattccagcactgctacttagccgctgtgtgacactggtatctttgtgtcctaagactgtaataaattgtcacaagcttcgtagtttaaatcaacagaaatttggccaggcatggtggctcatgcctgtaattccagcactttgggaggctgaggtaggtggatcacttgaggtcaggagtttgagaccagcctggccaacatggtaaaaccctgtctctactaaaaatgcaaaaattagccaagtgtggtggcagacgcctgtaatcccagctacttgtgaggctgacaggagaactgactgcttgaacctaggaggcagagattgcagtgaggcgagatcatgccactgaactccagcctgggcgactagaacaagattctgtctcaaaaaatcaatcaatcaatcaacagaaatttattatcttaaagttctggagggtagaagtcgaaaatcaaggcaacgggagggccatgctcctcctgaaagctttagggaagagtcctcccttgcctctgcctagtttctggtgcctgcccgcaatccttggtgttcctcggcttgtaagatgcatccaagtgtctttctgctttctctggtaaagacacaggtcactgtatttgaagcccatcctaatttagtatgactttgtcataatgtgattacatctgcaaagaccctattttcaaatgtagtcacaatcacaggtactggggttaggacttgggtagattttttgaggggggttacaattcaaccaactaactcaggtaactcccttcaccaatctgagtacagtttcttcctttctataatggaataaaacacctctctcccaggcttaatgtgaatacaatgagatgacatgcataagtgcccggaatataggaggtgctctgaagatgctgccaactcccccttggatttctttgttcctaaagtcaagctcagtgatcgcacatagtagataagtttggcagttgattgattttctaaatcagaagtgtaaatgcccagtggactttgcaccaaaggacccagagatctggctatgcattctctaagtgtcttttcacaaggcaagactctcccagtccctcttggagaatcacttttgagacacatttactagttctacctgctttctccttaaatcaccatggatagcagcatcctttctgcacatctcgggttctgcttggatttagcattaactcc

SEQ ID NO: 43889 - DNA, 2151 bp, Homo sapiens
tgctttggaacatgcttgttaggatgagtaatgtaaattgcctcctgcagcgtctgacacgtagtgggtgcttgataaatctttgttaatagatatgcctttatattgattcttagctgtaggaagtattcattcaaatacatattcaaataatcttttagctatattcctgcttgtatatggattcctcttgccttctgtgaactcccttacatctccaggacttcaatacaggaataaggagtactccaaagatttcttgcactttctggaattaaacgctgtgactttagcttccttcctttggattttaggaggcagaggcatgtattgaggtgggtgaagtggggtaggaagaccatttctgggaaaatgggccagagtattgatctttttcattatgaccccttcgcttcattagagtaaacatttattgaacaaacgcaaagcttggcgcttgtcactcatgttttattggcgttttccttttttttaatttttttttaagctatctcctacaggaaggatattagctctttcattctctcaagggtcagatgtaatcttccaacatctgactttcgcgtcacccatttaggaagagacgcggtccctttaaggccctggaaagggtctaagtgttggtttctgtggggaggccacgccccatcacgtgaccgcagccccagcgcggcggggccggcgtctcctggctgccgtcacttccggttctctgtcagtcgcgagcgaacgaccaagagggtgttcgactgctagagccgagcgaagcgtgagtgcgcgggaccccctacccctactcctcggggcccccaccctcccagccgggccgtgagctgccttcggccctccactcctctcgccggcaatggccgcgggaaatggcggctctgccttacctcccccttcccctcggcgtccccggcccccttctccgtttctgactccacgcctgacgcgctgtgggcccttccgcggtagactcctgtccccggggagccgagtcgaggcggcgggcgctgcggcccggggcggtagattgagggcggccggggagtgaggagtcgcggggagagagtcgcggcgtccccgggacaatgcggcggcggcctgcctaggtggggcgcgtgcggttacctactcttcccccgcccctcgccctgagcggggcgctctggagactgggagagcggatgcgggcgggagggggccgggggaagaacggctgatgtgcagggggagggaacgcttcgagagaagaaaatggcgcttggtgcaaatcccgccccttcccacgccgtcttctccgcacttcgccgcctcccacgccccctccgaccaacctgtctcccctcgcccgagcggctgctagccacggggttctagcggcttgctggggccgcgcgaccccttccctggtcttgtgcttgtcaccttcctgttataccgaagtcgtgtgcccttcagtcctggttcattttcacctcgtttttttctgatctttccctcaatcagcaaaggctgaagatttcgtttctctttttaaagttgcgttttgtataaattctacaatagtggtttcagtatcagttacttgaattacaagctgcttctccccccacccccacattggaacaggctcattaaggtaaatatatatttgttaaaagtttagaggctggttttagttaccgttacctttcttctccagtggacttctttgggttgagtaccaggtggttctttgaaaaattcttaggcccccaggcagtttttgataacagacggtagttatgatcgacagtttcaaagtgaaaaattatgttcaatttaattacctttttaaaaaatatctttttgtcgtattaattagcataaaaaacttaactaaattgattttagagatgaggttgcaaaatggagcagaaacaggaaaaacggataaaacgtggtcatgaacattgcttttcccttctgaatttacccttgaagacattaccagttaaaatcagattgagctttttgaatttaatggctaggattggggtggcccacttctttttccttgacctcctattttggaacatatgcaatgtcagtgctaatgcaagtttcatctagagagctagatta

SEQ ID NO: 43890 - DNA, 742 bp, Homo sapiens
atgtgtttatatgctttcatattttcttcaagtcacttctggattggtaattcacgtaccagagtggccgatgccatatttcttgtttattcttttttttcaatttcatggccttccagcagttttctgggaatactttctgccagttcttgtttacttctctgtttatatgcgtcggtattggaatgctagaacgttaaagtacaaaatatagaaaatataaaatttctgttcatacttttacatcttaaactggaaagacatatctcacattttttaaccatttatgtgttaggtgatatgctaagttcattattcatgttacttaatcatttacaacaactctttggcgtatagatgccattttactggtgaggaaactaaggcttacaaggtgatgtagttcttttttaagggtcatacacttagtgaaagtgaggctggaattttaaccctgatagggtgaccctagagtgcagttacccgggtatactctctgaggagtcctgtatgaatcacgtcctgggaatttttccaaagtgaaatgaatgcttctggaagaactcagcacaattggcttgaattcctgtggaaattttgggcaaatattggaaccagctggaaatatagtaatggggtatcacatgccaaatctggacctgaccattttagcctgatagttgacgggtattagtaagatgtgtcttcaaacccttatttattctcattggttacaataggt

SEQ ID NO: 43891 - DNA, 1564 bp, Homo sapiens
cagaaagcaagttatttagatgactcaatgaaaacaagaaatggaaactcatgcttcttgattaaatgtggcttattcacagggggatgaggcaaggagaggagagaaaggggagaaaagcatgcatgtgcacatcagtgcaagcacatgagtctaaaaggcagatgggattgcctggaaagggaaaacctcaaggtgaatgcatcagaatggcctgatgattacagaaaagttctaacacgatgcctaatgaatctacagtacctctctgggaaagactcagaggactttgtgaggttatgaaattaatttgtattaagtgtgtataacactctaaaacacattccaacctcaatgatctctcttctgctattaatttattccagctcttactaaactatccatgggaatcctcccatcccccgtttaacaattctttgaatcctcaggcttagctaattcttatttgatctgcaaggtggcggtgtgtaacagtcagtagatgccactgtctaatagtgaaggtgtccactcaacaagcttgtaggtcagaagcttcaggttccctttgatggattagctccctgcttggtcggctgtgtaaggtctcaagtctgtgcatagtatttacttaagtcagtgatgtagccacctctccatttcagagatgacgttagtgatgtgatttgccctgggtctgtgatcattgctttcaccggcctctggctgcagcacattgcctcatgcactaagaagccacagttgcccttcaaggctgattcaatggcatttcatggtatctaaccctggcccactgccctctggacttagatcttcaggttgtgtccaaaatcttagctcggaagatggagacaggatcaggtaccacatggtcttgagtgtaggagccagtctgaatgtgtcctgtcacttgatagcagacagacactcttcatcagctactcaggactccaggcgccaggaagtaagttgaggtcagggagtttgttttatctactgatttggaaaaatatttagcctccctggaacagagatgtacattccgtgtgcctgaagccatgaaatttggcaagtctcatatcagatacctaaaactgttatgcaactcagtctaatttacattgtaaggctgccagagggaactagatttctcccttggtctaaacgtcccctctgacaattctaagggcccaacaattgatatcaatcaatcaacaataataataataataatagtaataatgatataccttgcccatatttgacctacagttcaaggcccatagctttggataatcagaagttagaatttggctcagagggacatgtgagtgacttatgcaatactttggccattttacaaatgaagacaaaggtgtctgacagtgtgaattagaatgaaaacatctcccaagctagcgtttcttccacaatgggctcttgctgcagaaaagaaaagctatctttcttgtcatttttcaccaaagaggccattgcatgtctgataatttttcttcaaaattgtttctttttatatttaaat

SEQ ID NO: 43892 - DNA, 1238 bp, Homo sapiens
tcctgacttgaggtcatgtgcccaatcttgggccagtcactagggtggaggggcgggtggggtgttctcgtcagctcagcttacataccattattgtggccaggagagcagtgaactatgatggccacttccactatatcagcatggtcataatagggtgaccattatgtgatagggggcacttctttgaaagaaagaaggtatgttttccagaagaggtggccaaggacactggtattctgaactgtcacacacctggggattttagaaaccaatgggatatgtgtgtggagctgccagcatggttcctggcgttgcaataggctgttgattcatcgtggctcctcttctattcaggttgcaaaagagaaagattttaatgtgcaaatgcttaactaagcaggcaaaataaacagctaggaaggctgctttgtaaaacaagtcccacagttaaaaaaagacagccaggtcaaggtctaggtctgacaggtcaggccaagctggcagacaaacaaaacaagatcagggaatggggtagcaagatccaaatttatcataaagcatagacttgttcaaggaacaggccagggtcaacatcagaggtccaatttgagtgagacggtgtgggcagaggtccaaccaggcagaccggccagcccacagcaaggtctggaggggcccactcgggctggagtgcaggatcccagcagggtagaggttagggagccatcctcagaggcagaacagggagacagagaacagtgcctcagattccaagataaggaagcaagtgtgaccaaattaagttaggagttgtctgtggagccacatgatgccagagagaatttcttccaagccctagaagagaaatttaatatgaacaacacatcgatttacttccaccagctatacccacatatcctaaagtcagcagtgaccacttgcaggaatgggttgctgaatcccagagaggggcacacgtgggtacttgccatgctgacagcttcagttcagaagggcagtcctcctcaggcctgtctttgtttcctcggcctctagctttgtgttagccagctctgtgcgcaggatcggtgaggaatgctgcctcctcgtctgtgatgatccacgaggtggatcctcacccaccttcactgttgtagtgtctactactactgctgtgaaaaaatcgccacacaccagtggctcaaaacagtgcacgtttattatctcaccgttct

SEQ ID NO: 43893 - DNA, 1156 bp, Homo sapiens
gtagctggggttacaggcgcgtgccaccacgcccaactaatttttgtatttttagtagagatggggtttcaccatgttggccaggctggtctcaaactcctgacctcaggtgatcctcccacctcggcctcccaaagtgctgggattgcaggcctgagtcaccatgtccagacttgttttttaagacttggcattccacctggcacatcacaggcaagtgatgaatgacatccaaggaatgttgagttgtaacaagtgatcttgactaatattatgccccacaacgtttgaacacctgctgagctaaaactggaaaaagtgttgattcctctctgctgacttttagtctgttgagtggcttgtccctttgtgtgtgggaactagtcaccactggcctttagtaataaaacgtggagcaaagaccctcttctggaatggacaggtgtgagctaggcgatgtgtctgactgtgcccacaggggccattgctgtagacaccatgtgtcatcttttctttagcagaggtttttctaggtccagatccaggctatgctgttctgtacatcactggacactggggcaatgggtgtccttgctcccagattaggagtgcagaccccaagagtctggagacacactcaggtcacaatcttttctttccttatgctggagggcagactgggccaaagaactctgcttggagcaaagggatctggatgagattatggctgaccacacatggtgttattaaagactgagtaacccgcttggcaaacatatgaacatagaaatgtgttctgatgtctttggggaataagaacaattctacagtcctgtgggtggagggaggagttttccctgaagggagtggagaatccagccaccagccatcctgaaaagaggctagatttggaggaggaggtcgggacataggaggtgggcctcagcttaagctggaagaagagctttctcctttctctgaggcctcaggttatgtaggccgggctgcctgccagaaacctcctgctgcggtggggtgccctgggccacgaggccttaagacagatgggaacggacctagaacaaggtgcagtttttttttttttttttgagacagagtctcgctctgtctcccaggctggagtgcagtggtgcga

SEQ ID NO: 43894 - DNA, 1230 bp, Homo sapiens
aactacagagtgagaccctgtctcaaaacaaacaaacaaatgaaaacccccaaaaccccaagaaacgaatgtcaaagtgaaaagaactttagagatgctctagtttagtttcctaatagtgctatgttggttttcggatgggacaattctttgttgtatgggactgtcctcccatcacagggcatttagcaatggtcagttctcttagttttttttgatgatcaaaaacatcccgcacatttccaaaggcccctgggaaaggagaaaatattgttccttttgagaatcactaacaccttcattttcactagaaggcaggcctaagaggtcacatgacttgccaaaatgacagagtaaattaaagagctagaaaaagaaacccaggcctccactcctgcaggtgagtcttattatcttctattgagttagaaagtgaagacaatgacatgcttgatgcttcctgtaagacactcccttcacccccaactttacactaacagagggttaatccatagatttcttgatatttccaatattttctaattttttttcacataaggcagtataaaaggtgagattgaaaagtgagaagtgatgcagaaatctctaaaaatttttgtgttatcacccaactcttccttcactttgaactgtgcaaacactttaacttgcccaaccctacattctttgagtatgaccaacttcatcaggggagttttcatacaaagatatacaatgttggcaggacattttatcctaaatgtattactgttaaaggcaaattctttgaatatctgactgtagaagttaaggataattacagtttgtgtaaaatgaaactaaacatcgggaaccactcttcataaaccaagtatattaactagttctcttaatctacttaatgggaataattttgacctgttgaactagcacacacaagactgctttttcttatgggggtgacatgagaactattctctcctgaaatattatcagtgctgttttttcatgtttccaatacacttgtaaacaaggaataactataagttattgattgataataatgatagggagtgattctaccagtaaatctctctcatcataatatacatggacaccagataattcataatatgctaatattaaactttttgagattattttagaaaaatacatgtaaaatttaaaccttctttcagagttatctttatctcacatatgaaagcattt

SEQ ID NO: 43895 - DNA, 1478 bp, Homo sapiens
tgagagttaggaatgggataaaggttaggaaaggtgtgagggccagaaattgtgtaagggtcaggaataaagtgagaggcagggaagagtcatattacttatatatcaatggcatcttatcattctgcacatcaaaaggttcacagcatctacacagttttgtcaagttatgaatcattcttagttggggatgggcttgatatgatgcattgagatttgtcacccatttcattcccttctgtgttcctcttacatcacagtgtttgggaaggctaaaaatgaaactcttcagattcccttgctattagggtactcgatgcatcttacttcctcttgagacatttggaaagcagaaagggaggaagacctttatccttgtggcagtggcagctgatgtgggcatgagtttttgaaggacccacagtcatgatttacaattcagccaccatcttggagaggaagggacagctgtgacattggcagtaaggctggatgttgtggaagtaggttcctcatcttgaaattgcagacatggtggtgtgaccttgaggtcaaaagtctagctgagatctccaattctgctcctccagtctttccaatcatttttttaaaaagctgtagtgtaaatagtacattttaaacggtataatcaccctataacttttatttctgttttttaaaaatagtgtgcacctataattataattaagttaatttagtgcagactgggaaatataacaaaaattaagcacattctctgggactggtataatattaactctggaaatttggcacccatccccacctgctagaatttgctggcatggaaacacattcctactcctggcacagtgcctaatgcaaaacaggagctcagttcatgagcactgaacagataaataccagtagaagtaataaacagaagttttataccaaaataatgtataaaaatgagctttaagaaaaataggagtcatgtaaggaagtttgggaggggtataaagggagtttaatattttaatacaaagcaacttccaattatttttaagcatctaaatctttgtattaaggcccttcctgtttgaaataactatggtggtttccattttctacaatcttgaacgacacagaggacagacaactaatctgaagtaaggaacgacagaaaggctgacaaatttactaggttttataacttcaatttttcaatgcttgattatcccacaagagggctgatccacggcattgcaacagcattggctactgatttgaaaactctttgatacctgcatgggtagaatatggaggaccccataaacattgtttcccattcagggtggggtggaggagaaatttgattttagaatctctggacccctaggcttttttttttttttttcacactgggggtgagatggggatcttagaaaagaatcacgagatcaatttgcacattccttcatggaaaccagataaat

SEQ ID NO: 43896 - DNA, 1998 bp, Homo sapiens
gagcactaaatctcaatttccagtgtgtgtggattaccctgtttgtggaattaaattttatacagatgtctcttttgctcctggttagtggctctaattaaataaatggaaattctcgcaggaattagaagctcctacttaacagtgaagatttcgggatcacagtgcataatctgaatataaatgacccagaagctgaaacattacccataatcacattgacggttccagaaagagcgataaggagagtgctgttaagggaggcgagcgctgacgccagaagttgccatatccccagaaaccccagtttgccttttcaccgtcgcaagtgagaaccagagcgcgttaaaggcctcggagtaaaaaacgcagcgtctgggactgcggcacccgggttgagtcgggtgcaagtttctgccgaaagagggcgtcggtctgagactaaaagaaatttgtggacacggacgcctagtcaaatgaaagaccattttaacacattttcaatgtatttaaatgtgcgggacttaattgtcagaattctcccgcccagtgtagcccgttcacattgcaaatgacttggctgcagtaggcacagaaggtccagttccattttgacccgccccgccgcgcggcggactcccgcgatgctcctctggtcacggacttctccagagccgcttccctccggtctccaccgctgctgtggctatggccagtgggaggactgggtctccgaggcaggacctttcttggagtcgcggaaccccagcacagtgcctcgagcgctccagagaaggagcggttggatctttgagcactcaggttggaggggagcgtgtgtcgtacccgggggacctaccgggaacgttttgggaaagacagtccctttatttaggtacctggtttagcaaacaaagccccgaggacgctttggggatgctttccaagctttgtgacacctccagaagttgaaccattccctcgcctttgggagcaacaagtttcactttcctgctctcagtgcgctgacagagggtccgtgagctgggacactgtgacctcggcaccgctgcgattccagcgcaaacctgcgtggcccagggggagggggctggcgcggggctgaggaaggcggggtgtaggtgacgcccgggccagccgggcacaccaggtccgcgatggagccatctgcactgggaccttggtccttgttccctgaccttgcgccgagggaccaggaaggtcaggtgctcgccccgcgtcggtgcttcaggagggaatgtggccagaacgagaaaggtgagagcaagcggcacctaaggatttttgcaccgaaaccacaatttctagaaccatccctttcccccagtcctggtttttttttttttttgcacggtgtgtgtgtgtatatgtgtgtgtgtgtgtgtgtgtgtatgtgtgcgtgcgcgcgcgcatttctctactttaaagcacgtttccttttttgaagccaggagctggagagcgtggaaagggagaggcggtgatcgcacaggcacgcggcgtggtgggggctcttgccggtgcagacgtgggcgatttcagctttaaggaaaaggcagagggcctgcggggagtggtggttagggacaggggcgcgatgggtagtgaaggggtgcagggaggagccctgatgtaagaatgttaatgagagactcccccagcccagcccccacatctccccacccccacccaccccacccgctggaaacacaagcccggcctcggcgcgccatgtgtggtaacacgctcagccgctgccacgctatttaaacgcgggctatggatccaggaaccggcgcgaatcaatgagatcaaatgcgagggagatgcaccgtcaattacaaacacttggacaagtctaactttttttttcttctacaaaaacgctttcaaaagcaaccttagcaacgcccaaataagaagccacctctaagcaaaatagtatatgtataaacg

SEQ ID NO: 43897 - DNA, 2830 bp, Homo sapiens
agatcttttattacctggtggagctgctgatgtgtttagctgctatgtgaggtaggacgctcatccttcacgtctggcttatttagagatatctttggtgagttcacaacttagcagaaatcctgattcacttgacctgagtcaagctgttgttagctgttggtttaaagaccaggttgagatgagggacaattagcttgttgtcttacgtactgttttgtcctttctcttccatcttctgccctctcattccctctccaggtgcagtttctgttcctccctcaccctgatgatgggttggaggtcaactcagtcacagcaactgaaggacattgtcagtcttagtcttgtgtcatttgtctctcacagcatacatgctcacttgtagagccacccaagtattggccaattaaaaacacaaactggagcacaaaactgttttatcatatttgctggctgaacaaatgtgtcaataggataaatgttataactgggcaagccagctttagactcttaaaaacttgcccactcaacgttttcttgagttttgaccccatccactgaccaagatctctttttcctgttcggaggttggtcagactctctgtcataggataataacagtacccatctatgaatgttttgtaaggtgcaacagaactcaagctatgtttacataactcctagcatatagtaggtgttcaataaaagttggctattacaattattgcccagcagtgaagagaactgcttgactttgtttaatttagcattttgtaaacctgcttaaccaaaatacttctatttctagaaccattcattaacatttcaaggaaggctactgttctgtggaatacagcttgggaaactctaaattaagaattggacaaaattaaactgttggagttggggttctggatcttagcttagtcctcaccacaccttgaaattgcttaaataaaaacagggaagtttcattttagggtataaagcagaaatgaaaaaaaaaagccatccatataaaaacctgtatttttgttcatctcttctttgtaaacacatctctaggtgactcaaaaagttcaagggaagctgtccgaagttctcaggacaagtttaagagggtatcatgaagtcagagaaattagaattacatgctccttctgattttggacgatcagaagtaatgaggccagaaattgggcccctcctctttccctgcctccacctccgtttgacctgatcacccctcttcctgtttgtattgctgcccggcacagttgcagggtgagtgggatgcctgctcctgatcctgctcctcttcccgcccttctcctgttgggttttggtttatgcctttgcctacctcaacttcgtgccttgacaggacacagacctcagggaagagaggcctgcatgtgtcccgagcagtcttgtgggggttgggtcaccagcctttcagaggcatgtctggctggcactggtgaatcatcagggcctaggacaaacatcactcacttggtcatctgaaggccaggaacgattgtgtcattatgtatgtgcatttctcaactaagccttcaagagggtgatgggacgagaagcatctgtatatgacgcatgtgtgacacatccaaagggcaaatatatcatatgaccatattccctgcatgagccttgggagaattttcaaaagtcattctcacttacttgtgctccatacccaccaattccaaaaactgatgcctacagagatctccttgttgcttcccatgaacaagaccagctttccttgctgaggtgtgcttatgcctctggattccgtgtgccagctgtgtgaccctctgttgtccctgtcattacaggaggtgaatgagggccctaactctacctaatgatcttcctaagactgcttttgtttaatgatccagtctgttctaggtcatgagagagaaaacagtctgcaggcagccacacctcaggaaggtccaagttaatttgccagcccagtgcattgctaccagttcagagctgagtccacgatggggacagttatttggaaaacttaggtcagatcccaccctaagtaagttctaacttcagtcgggggagcaagaagtatgccagagggttcagagatgcttccactatgcacagagttgtagatgaagaccccagctctctccctgtggtgcttcctgtcagtcacctgccctttgcattttcccagagttccactgggataaaggcgcagattttcagcttaactttcctcaaggctaaaatacgtcatcaagtgaccaagtgagaattccatgaagacaggcccactatagaacaggaattggggtctctgtcagtaagaaagagacctccctctgtttggtgctgaggaggctgtgaggctacttggtttatggcagttgctgctgtgaccctaaattgtacacttattttaatgatttaaaaggaaattgaacaaaaatcgatattctatttttaaagtctaggtactgtattatatttgtaaagtgttcatcaaatgcagaatgtcctttaaccctcgtgctatgcacacagcactcccagactacttccttctgctatctaccacctccagtggtccaggagggctggaccagtttcaattcaggtcagagaaggtggtccagccattgttcactatgatgagggacaagcctatgatgggcccatctcttctcttacctactttccatccaaatttccctttctctcatctccccttcaaccaaaatgggtggttagaaggcatgtcttttgcaagagagtcttgagaaatgctgcctgg

SEQ ID NO: 43898 - DNA, 589 bp, Homo sapiens
tataatttccagtcttttttcctgagtttcgtcctactgaatagactcagaagtgagaaatctttgtcctctgaatgtaatttcaagctttggaaactaattccattttgttgagttcagcaaatatttattgactgtctctacatgcaaggagctgactaagtggaataaaaagattaacaagatgtattcatattgactttttaaagaggccattaactggttcagaaggagatgccaaatagaattatagaaaatattctgaacaattgcaacatcattggaataggtgtgtagtctcccaagaggacaaattgaggggacaaattacacagtacacatagttgtgcaattcctggaatgttacaaaatgaacgtggtccacatcatgtgctgaataaaactattgcagccaccacagctcggaactaaaactagcctaatgcaatggtaaaaaataggtaaggtgacgctgctcccagtttgtctgggacagtcctgctttatgcctgtcatcttgataaaattagtaacattgccccctttcctctccgaagaggactggccaggaggaccaattcatgatctc

SEQ ID NO: 43899 - DNA, 2971 bp, Homo sapiens
attctagataagattttgtttgtttttaaagtatctaattgctttaaaaaagtttgacatccactggcttataggctaaatttcaaaccttgagtatgatacataaaatcttttactatctgtctcaacttaatattacagtctcatttgtttccacttcttccttgtgacttcagcgatgccaaactactcactgacattagctgagatctagattctcttctctttctgatgtctgaacaaaatcagggttttgttagtgtacaaaaccaggacatcagagggaagtggagattgcctttcggggtaagcaacaagcagtacttgacacaacatgtaaacaaacaaacaaaaaagaatgggatagaaagttaaaattacacatacacacaaacacacacaatcaattcttgttattcatggtaattgtgttctataaaatcatcatgaacactgaattagcaaatattaaactattgctccttgggaaaataaaaggctaggctcttgcaagcttctggtcacattttcacccatcaatcaatatgcaatcttgtttcacatgtgtttctgtttaaagatatcttgtttaatacatattttcaattcattaacattgaactcacagctgacaagactataactcatgcctaaacaaaacttgtctaatgctcatattttctccataaggcacattgcagcctttttgcactaaggaacactagataacacttcagcccagtgcttgggagtcttttaagcagtgaaatcactaacaaaatagcacaaaaacataaaaaaacatggcattaaatagacttgaaaagcacatttgtttacagatgagagctgaagcaagaatgcacagtatcaccttattcagcttcagctggtgacatgcacatagggtgactcaaaattttcactgttctgtgcatgttcacaatgactaagaaaacactttaagtattgactatgaggttactaataagttttagctaataggtgaatttgcaaatatgaaatccatgaataatgaggatcaactgtaaatttttcttgcttcctttttaaaccacatttatttcctcaatagattatggcattgactaccacaccactttcctgcttcttgcaatagcatgaatacgtttccagattttcttggagttgggcatggttttgtgattggctttttgccaaaggaatggacttagaggtaacgtgcaccctttccagacctgatgcataaagccctcccacataagagcctctgtgctgtttcccccttttcactgcctaggatgaagacaagccacagggaaatcttgggagagtcctatgttgaatttgccagagccctagtatggaagaaaccatagaaaagaaaccattatccctaaaccatcatcatttggaggtgagatgcccaacatgaggaagaaatacatttttgtgttgaaccattgagacttggagatttatttgtaaatagcagctagagctacctaaataatacactaaacaactaccattccagttggtataaaagggcatctatcatactttggatatatctctactgcctaattctctggaggatgtaccttaattttctgatggggtatcattttactcacctatctctggtcagctttagcatcaaggtcaaaataataacaaagaaggctgggttactgactacacagtcaacatgttcctccatgcaaagattcatagtgttgttaattactttctaaattgcactagaaaacttagtttctggattattttattaattcataggaatgtatggaactgttagggatatatggttatttctctatctgttacagtagatagatagtttggcctgaaagagactccacagggaaacccaagctgagttcaataggtcaagctacatcaaatacacgtaaacccaggaagtgaagggagaagttacacattttaactctcataacatttccggaatgtccttagcttctggcttggtattctccttttacttaatctcctctctctttcagcattctcttcacagaaagtgtaatttaagaacctgttggaaactagcaaattaaaatagctccaaaaatgttttttcccctgcaaggatagcactttaggggaaagaattaaagttaccctgaaggcttccctcatgggagtgctctgcgttccagactagttactcaacctttggtcatggactgagagcctccctgtctcttggccagctttcagctctcaggacagtttttctgcatccacaaacatttactgagaaattgtgtttcaagccccgtcttaggtactacactgagaattcaaagatgacaaaatctctctgttctgaagaactagatacctgaataatatattagacaatgcaataagtactaaaatagaaatgtgtacagaattctatcagagcagagaagacagagtgataaattctgtgcaggtgagagcagtgaaataagggtaggtaaggctccacagtgaaggagacatttaagccagcccctagggtttatgggattttgacatgcagaagcaggagaagggttctgagtggaggctgtagtctctacaaaggccctagagatatgaaaaaacaaatccaccataatgtgctcaaggaatagtgagaggagttcagaataactggagtatagtaggaggcatgaaggggaaaactagagataaaattttaaaaggtagaaatgagtctgccaaaaagccctttgacataacttgtacagtggcgagtggggaggacgggatgcaatttatcatcccttactgctttttgaggaggatggaatcagtaatttaaagggtcttatgttttttcctaaataaggtgatgagtgtgggtatgcatgtttagtatatctggtctattacaagatatataagaaagttgatataggtacgggacata

SEQ ID NO: 43900 - DNA, 1534 bp, Homo sapiens
tttgtccactgtcacacacacacacacacacacacacacacacacacaattttgagttagaacttagcatctaagaaacaaataacctacgaaaaatcaccaaatttcccattttctaacatatcaagataaaagaataaaaaccaagtcaatatggaagagggtttcacctgcttagcactcactaaatgatgcttacttatcctctggctcctagatttgttacagcagaggtcaacaaaactgcttgctctgattcaacttagaaatctgataaacaggtattaggtaacaggaaacacaaaagcaaagatatactcactactttcaagtttatttgggagacaagtacacgctgagaactggatcaaacgggtgaacacagtgatgtggaagcaaaaagtagaaagtgatttagtttatctgagttaggagtagggaaagtggaatcatggaaagttctcagaatagatagcatttaagctagaccttacctttcaagatgagtaatatttcacccagaggagagagaaggcaaggacatttcaaataatgaagacagtaagagaaaaaatatagaaatacaaaattacatgatatattcacagaatcccaaatgaagagccagtgtatatttatgacagtgctatatgggaaaagacagtggaatttttctgggaagtattcagttcatcattagaatcatcaatgtgttatgtaatttatctctgacctgtccttatgcaccaatgaacctggcaaaaggcagaattgagacacggagcaaaactggagcaagaggcacctctggatgcactgagtgcactactgggaccaagacaactcagtgagtgaccctggtaggaggcctggagtggcaacagaggggagaaaacacagaaagaaagcaaaatggatcttaggggttcatggagggtaacacaagcagtcccttggccacttgccctactaaaaatagaagcatcactagagacatttgacaaaatgccaatgaccctgacctcagaattgagggaagaatccttcagttagaaatgtttggagtcaagggtgaataatttggttctgatgagaggcaatataatttagtagtaagagtttaggctctttaaaaaaaaaagagtttaggctctggaaattgactgcttgttttcaggctaccacttcctgttggaccttggacaagctactgaatctgtatttaccttggtttcttcatttccaaaatgaggaaaataatagtgtctacctcatagaattgctatttagagagttaattaatatatgtaaagtgcctagaactttaaatattggtgtacaggcagagaaactaaaccctagggaatattttcaaatgtgttggaagtgctgaaggctaacaggggaccatgaaggaatctagagattaacaagtgctagaagtctctaccaccccataggactggaagacaaagaaaagaagtagtttttttgtttgtttgtttgttttgttttgtttcagatggagtctcac

SEQ ID NO: 43901 - DNA, 1212 bp, Homo sapiens
ttatcttttatatgaatggcatcattttagaaggaaataggtagccgtggaagtgctgggattttacaaaactaaaaattatacattaacactaattttccactcaaagttccaaagcgcacacacacacacacacacacaccacacacacacatacacacacactttggtcctgaacaaatgtgttgccatctgcaggactcaaaagctagcaggtccaagcataaagcatattcccttcctaaccctcatatacactccactaaaaatgaccaatgctcttcttttacaaatttgaaccatataaacaaattgaggctgtatgtgagctgagcttagcatggctgagcaagttctatgttctaaaactctccagggttggcttgtgctatttttcatgacacagattaggacaactgagtgagcccgtctagtagggcagtgatggtaggcccggactcactttgcttctgacctttgtttgatctggcctgctgccttccttaaaatcatctattcgtttatgctttttcctaatcctcttttgttggggcaaccaaaaagttttagcccagggaatctataaaattcaaatatacatttcaaataatgtttcaattttttaattcaaaagataatcaccctaggtaaaggagttctggaatttctgatttgaaaataagtaaatgtcttgtttgtttcctagcactctgtctcataacaggtctctgctgccaatagagaatgatcacatcagaaccaaatccatctatcctcaagtaacagacattggcagacactctacattctgggactgtttgtcagcctttggctggtagtatttaaattctgattcaaactggctgctccagagataagatttacaattccacaatcattcagatgggctctgattcctctaatatagacaggcagacagatagacagacagacagggaaaaggaacagaatggtagagcaatgagtgagaaagagggtttaaaatttaatggaaaaacacacacacagacacatgcatgcacgtatgcagagagtacatatatatctcttccatttattcaagccaccataagttatccaggttgcactgtctcagaatgaggtcacagagtaatgtagattctacagctgcagcagaaatttagtttgactatttttttcttaaaaaactatttgtggaatttatcccaa

SEQ ID NO: 43902 - DNA, 738 bp, Homo sapiens
gagattatctgacttgtccaacagcctgaatgtatcctttgtggtcctggcaggaaatagatggcacatctcaaggatttgactgaaaatagttgaagagtaaagctaagggggccaaaaagaaaaaaaaaaaaaaaaaagatggtaaagcactcagggactaaaagcaggaagcaggactacacgccgaggcctgaagaagaggaaacaatgttcccggagcctggtgaaagctgccaccacgagaggatctgtgtggcaggagctgtggcctcggacagtgaacacaggtactgccagaattgtgacaaagcaggcataaagccagcgaagaaatactctgatcctgccctcttgtcaccttccagtcccctgccagtacctccaatgtgccaaaataaagcagaagccggagagtaaggatttcagatgaggcaaccaaaagaggtcagcttcccgggcacagaactggtcaaaatagggtggaatgaatctgacggatgtggtggacatagaggggagcagcatgccaagcagacatatctactttcctgtctacaaatcccatgctcttttccctataggcactactgagatacagagtaaactatcattgtttgaaaaaactaggaaggagacttcagtcttattgagatatgtatttctgcaggttaggctgaagcctctgcatgtcccgatgcctgatggagatggaggaatcctttctacccagacaga

SEQ ID NO: 43903 - DNA, 2866 bp, Homo sapiens
tccttgtgatgtgtctaaactttatcctttgctttggcagagatggcgtggggatttaggggagtgggaccttgaggcttcttcagttcagatgtcaaaacgccattatttgggggtatgtttctgcgcctccaacactgtttaacagggaggcttgtttcatccagtaagggagtcaagaaatggttccccgaagaaaacgattcttgaaatctgacaataaatgaggtgtcaaacaggcaaaaagtgtgtcggaatgagcacggatgagggtagggtggaaaaatcttggtacttagtctgtgggaagacctgaggaaaaaaagccactacagtttatagttcagtgtatggtgggcgaacgagatgaagccgaaaacttggacaatcagggattgtccaagagcaagggaaagccaccaaagatttttcagcagattgccgtgatcatatttgtatttgaagactacaacgatgctgtatgaaaaatggatgcacaaagccgaattgggaagctattgttcctggaaagtataaccctgaaggcggagagttgtagagaacagaactgatgtttaaaaagaaaaatccacaaaacgtggtggtggagcacgtacctgaagttatgcctattgcgcttctgatttcaaataagtaattgttttaaattgcctactaacataaaaaagcccagtcgattccaaacactggcacccaggcgtgagaatccatggttatttccttgggtgagctttattgtatttttgcgggcgctatggaaatgctcctccaggcagtacagatcagcagcggctcgtagtgaagaacgttcaaggaagagtttgtcccggatcaacaggacatggggcttgggaagcctggactgccatgaggaaggtcgattcaccactacagacagggagcctgaggcctgggtggtgccgacaagtcggcagtcacgccaggtcaggaagcgccgaagccgcgggaaaccctggactccatcccgggatttgtccccgtgtcgaagatggtatccaggtcgccgaaaacttcccggaagtttagaccaagacctacttattatctacggtgtccgggaaggtccatgattgttccacataaagtcagaagggaggaaaggcgcacgcgcattggggacttgactctggaaagcgtccagaccaaggtcagcggagagtaggcatgtagcttctgcagttgctcctcctcaccctccgcgacctgatttcctagaagggctctgtcacccgaaaagattttccactggcttagaggagggagggcccgccttcccccgttatccattggctgctcgttccgccgcaagttgggggcggggttagggcgcctttcgattgcatcagctggtccagccgaggccaagtcccgggcgctagcccacctcccacccgcctcttggctcctctcctctaggccgtcgctttcgggttctctcatcgcttcgtcgttcgccaatgtttgaggagaaggccagcagtccttcagggaagatgggaggcgaggagaagccggtgagcaaacttggtgggacccagagaccagcctgggactctagtgggtgcagacgctacgctcgcggcgggagcggggggcaggaagcaggaagcggccgggaccgcgtgggtcggagaagtgggggatggtgggactcctggaaagtcggaaccccctttgggaaccatccattcataaattagggtggggccttgcagttcatctgtgggtccattctctttacagatgaggaaacagaccttgagtgagcgacttgttcagagcctcacatctacagtagttagacgcggagacagaatcagaatcttaggcttgaggcttccaaacttgcgtttatggcttactgtaagcgggaaacacattgcagagccttatttaatcaatctcctaagatcctgcgggggtaaagagctccattttaaggaaaggaaaaccgagtgcccgagatctgacccagcttgtccaagtttgggtggttaagtatacattttgcccggcactgatctgggcggtgcatgtgggaagatgaatagggcccagttccccgactttgagggcctcacaggctgatgtgtaagagacaggaaaacagccctagtgctttgtgatcaaccttgtggtattacagaagaggaagtttaggaaggcactttagaatttagtttggaagaatgatttcaccaggtaaacaggcaggacggggcttcccacgtaaaggtagggaaggcagtgaaaaggggcacgcaggtgaattgtctttcgggttgtttgcaagagatatgccagaagggttaaaggaacagtaatcagaaggatcttaggcaacaaggatgtttgaaacttgtattctatacatgaaggatcttaagcaggaagattgtatttgtaaaagtcacgctggcattgggatagaaggttaggccacatgcagaaggctgttgtaatagtccaagtgagaagtggtgacgtcttcagctaagggatcctctatcccaagtctgtgacaggacagttcacttaaaagccaaatttttttcttgattgtccactcgagattgaatggagaaactgcatacgggcacattctaactatgtaaatttaattctagatgataaatggtgactatacgtagatttttttcacataaaatgatatttttactgttttgtaacttttttttttttttttttttttgcttaatagaatgtggtcaacaactttccatgtccataaatattctcctgtgctattcttaattggacgtgatatgtatggttaacacatatgtaatttttccttcctgta

SEQ ID NO: 43904 - DNA, 580 bp, Homo sapiens
agaactgagatgttgatgaatgacactccacaccaaaagagggagtgacaaggtcagaacatcaggtggccagccccacaggagtgcctgggactggggaatccagagggtcagcgactctcaaaaatgcccctatccctccatgctctcttccctcgggtggcagggacttcacatgagtctagctttgcttcccacttagcaatagacatagcattgccatttgctgccacgtcttctatcccaagagccagagagctcatttgtgaacatcggcattcggtctatttggtcactctgcattccaacacccctgtgatgagctttgtactttatcgattctcagtaccttggttaagtgaatgttttgtttgtgtgtttttgtcaggcgcaggaagggccagttaaagatcttcctagactctgtgtgtgtctgcttttagagcctccacctcatgtcccatcaaatatattcaaatgcatttcttgtctcaagtgaaacgtaacttttgctataaaaaacatttgaaattatttttttccattccagttttaaaaaatgtttatgggtacatagtag

SEQ ID NO: 43905 - DNA, 806 bp, Homo sapiens
aacctttgatactgttaaaagaaaaactttagacgaattaatttaagagtttaactgagcaacgaatgactcatgaattgggcagtctgtggaaccagactaggttcagagcgactagtgtagccctggggccaaagaggacttatggacggaaaatgatgtacagaaaacagaagtgaggtacagaaacagccggattggttacaagtgggcctttgccttgtttgaacatggtttgaacagctggccgcctgtgattagttgaagtacggctgctgtgattggctgagacttgctgcttgttacaaaagcaggttacagtctgtttacacatccagttaggtcacagctcattatgtaagagaaacctttaggtggaacttaaaatacgtaagggggcagctttatgctacagttaatttaacaacgctgtgctcatcatgtgggctcagattgagtgtaaatacagcaaaacgcactccatattccagagttatcttaactacagtttccaaggaaacagcactacaataaggcagcctccagctcttcacaggcaggcccaggtctggaattctgctgctaaacactgtgaaaactttcggcccattagaaggtatctgccttcccctaatcagcttctgcaattgcctgtgtcacaaggggtcctagtgatgaagtaatgactatgatttactgattcttttagccttgtgtaattagcaaacacttactagcccctaatggaaatatgaacccagaagaaagattacaacattttcacataccctaaaaccttactatct

SEQ ID NO: 43906 - DNA, 2857 bp, Homo sapiens
atagaccaggcaatgctttggatttctacttgaacaaagttattctggcagctgtctgagaatccactggagtgataccagccccaaacaccagtttttaaaaggctgtcacaccagtgtcaaggcagttgcagcaggtatggagagaaatagtccgagtgggctaaggagcaaaatgactgtattgatgatcattgaaattggatgtgaaaggaagactggagtccatgatgaagtacaagtttgagattcaggcattcactgaaataaataatacagaaggtggagatgctgttttagaaggaagaaggaaaggctcattttgggatttgtggaagctgcctggcgggcagccttgacggcgatgcccaggacctgtgtatgccagcgtctgccgctctgaaagggggaagtctacaaaaaggtgaaaatgatgggaatgggtaactgggcttcagggagcagatgctgagacttagaacgccagcatttcaggcagggaggagcgttagcctgggcccgtggatggcttgagggtacagcactccaaaacggtagccgaatgaccgcctatatgcagttttccaggaagggaatcctatggctttcattagattctcacagggttcaagaccctcaattaattaagaaaggcaaatacggaacgtttcttagaaaaaaaaggaggaatttgggaaggagtcagagaggcaaaaggagaaaccgggcaacagcagtatctcagaacccaagttttggacaatccagtttgggaagaatgatcactaacaataccctaggaggcaaaaatctggaaggctggggccgacaagggttcttgcggcaacagggcaaaggtgtggcgggtgcagcctcgatcgaacggccaggcccctcccctccgcgggaacttcccgagagcagcccgcggggcccgggctcaccgcggcggaagggctccagcagcacatccgaccgcttgcacagacgccgcagcacggcggctccccgcggctgcttcaggtccagcactagcgagcgcttgccccggcccaagcggctcacgtcgtagcgggagccgggccggtccacgcgtaccacacgcgccccgaagtcagccaggaccatagcacagaacgggcccggggccaggccggacagctccacgaccgagatgccctgcagtgccatggcgcttcccagtgccccgctgaaggaaactgagcagcccttagccccagcccagcagcctgcaagaagccctcccaatccccggcgccacgcccccagccgcggcgccgcgccccaaaggcaccacccccgtccctcttttgcgggcctgcgcaagcccgcggagtctgcgcactgggcgcttccccacccccggcctcccgggaccgccagtgccaaatgcagtaggttgctttcctttttgtgcaacctaaattcctgagtcttaaattgcagggactgacctttggagctcctgcctgttaccgtcctctctggacgcttttattgtaccagggcgatccccagcccaactgtaccattcgagtccctactcctgccttgctctagggaaataaaataacgtaaacacgtaagaacaatgcgaaagcgttttcttccctaggctgcagattgtcttcttcaccgcccctgcttagctagctagctagctgggaatttaatccagaaacggcttgcgatacctcctagatgcactcgttttgagttacaaactccgcggattacatgtctttttaaaaaagtttagactacactaggaaaattattttagtatcagaagaatatcaggggtgtagtactcatcagagctaaatgagagcgctttaaaaatgttagtttgtcttccgccatttctacagaaagctgcaatttcaggttttcaacctaataggtgatatttaagaaaaaaaaaaagcaatcgcaaatagccccactgcttttacaaatcattttttctcttctaggtatagcctgtcaggtggcctaatgtaatttttgacatctctaggaattttaatagaaccagaaatgggtgccagagatatgcctgcactaatcttaagtggggatttatgtatttctcaagcaagtgattaaagcaaaactaggcacgattgaaatcaagatcttttaggcaagaaagtcatgatgagttttagaattattttaggactctgtggctttctcttcatagaaatagaaaaaaaaattgtataaaaccacaaaaggtcctgaatagccaaagcaacactgaacaaaaagaacaaagcaggaagcaacacactaccagaattcaaattatactaccaaggtgtagtaaccaaaacagcattctattggcataaaatagacacaaagaccaatggaacagaataaagaaccccaaaataaatccatatatttacagccagctgattatcaataaaaacaccaagaacatatattaaggacattctattcaataagtagtgctggaaaaactggaaatccatatgcagaagaatgaaactagacccctatccctcaccatacacaaaaatcaactcagaatggattaaaaaacttaagacatacaacccaaaactataaaactactataagaaaacagataaaacacttcaggacattgacctaggcacagattttatgactaagacttcaaaagcataggcaacaaaaacaaaaaataggcaaatgggactatattaaactaaaaatcttctgcacaacagaagaaacaacagaataaacaacttattgaatagaagaaaatattttgcaaattattcatccaacaagtgactaatatgcagactatacaaga

SEQ ID NO: 43907 - DNA, 1087 bp, Homo sapiens
taatgtaatctgtggcatagatagcatttaacagaatagttgtaagaaaattatgacataaaccttcagagcagaaaatcacacaagaacatttaaagatgattttcatgacattaaagtgtgatgaaagattgcttctatcatttcatatctcagttcatttctgacttaaactgagtagaaaaaataaatcaaggtgcacttaaaagcatttgtgaaaatctgacagggccactgcctccatcagaagttgcttccttttaattctggataccatatagagaaatgagtagaattgaaaaacaaaaaccaaataaatatccacgttctgcaacgctaggagactggaagaaaatcaatgaacttcaaaaatacctgtaagtgctgccaaatgcccctgagggtggacagagtcatgtggagataacacgaggttgggccaggctctgaggaggccaggtggcagcaggtgtcacacagtgccaggagaaatgcactccctgatagtgagggccacgtggaagagcaatgctgaaaacaagtccctgtgaacagggctgagcggaagcaaggctgtgtttggggtgatggttgctagatacagtgtaggatgtggaaagaggacctgcagtggccaatctcaaaatctgccagcaaaaaaaaaaaaaaaaagaaaagaaaagaaaagaaagaaaaaaaaagtctcctgaaggcaagggaaccaggaagtataaggctggcttcagaagctttcatggacccggtgcagtctggagaggtagtggaagtgtgaccaagaaaaacgcacattagggccatacttaaaagaatccgttagtcccctggcagcaggggagggagcctttgagttatccagtctagaaactgccctggtcctttcttcaccaagaaactagagcatacggctggtctaggaaaattaaactcattcaaccctcagttaattttttaaagtagaaaagaaaagcaaaaatgaccctaatggattaacaatactctccaagaaaaaatgttgtcatgtagtagatgaaaaatgtagccatgaatttatactaataaagcaaat

SEQ ID NO: 43908 - DNA, 2258 bp, Homo sapiens
atacctgccttccttttgttcctgctctaaaactttttaataaactttcattcctgctctaaaacttgcgttggtctctccttccgccttatgaccctcaatggaattgaggagccaagaattgaggttgttgcagacccgtgtggattcacttttggtaacagcacctccctcagggctcagaggaactttgtaatttacttctacattccccaactccctgctaccctacgtggaagggtgtgtaagcatgcataccacattgggctattgggaaatcatccccatgcggtatgtgtgtttctcctattgatctgcctttggacagttaattttcagagaatcttcagaggatgaaacaagagaagatttcccacttttccactacagtcgtctcgcatttttttccagctctacaatgcaaagatactaaagtattttccaaagcctcaaataataatttagaaacattttgtttttagtatctaggcacaagaattcagctccaggagatgaagttgctcaatgctagagccaactaggattggaagtgcaagaccaagctacttgagggcactttgagggcacagagctgccaccagaacagtgagagacttctggttactactagtcgagcacctcgtgagaacccttcagcagcattgcattacacgttccttcctctggccttgtctttcaaagttcagttgaatggagcaatgcttttgcattgttgagtcttttgttggaactcttagaacaagttggaagggatgtgttaattcagaagttttctcctaggtaagggaaaattacatgtaggtagttgctatttatgacctccttgtttatcatcccctttcccaaaagcaggacaaatttgtatgcaaaaggcaggtaaatttgcagcatgcgagaaagagtttgtctctaagaaatgctccatcaattttgcagatggaggcctaggggtagggatgcagaactgagctctactactagtaagtgacttctaggaaggagagtcatagctcctttttttaaacctcctgccccaaaaaaagggaaaagaaagaagaggaagggaagtgggaggagggagaaatgggtatccgggagaaggaggggagattgacaaaggtgaatgaaaaagaggctacagagaagaaaataccaggaaaaaagagcccaggtctgcccaccccagatctctggccattgtactccaccatgaacccacagctggagcatctttccagaccatatatctgattacctcactgtcctgctatgaacaaacaaaacctagctagcaaagcaaaatctaagctcctaaaccagctagcagaatccttcttggcactaaagtcgtgtaatgtcccgtcgtccccccaacccccacccctgcatccccaacccaggagcttcagccacagccaactcctcacaggctttccagtctctgttgcagcacttttttttttttaatttgctgtggatagtcattcttttaataccatcttttaagatccagctcaaaaactatcagtactttgacacttttgcccaattgcctttcatgtactgactttatttaacacatggcatttaattaaacttaatttaattaacaaaaatttatctctactacagcccttcaggatggtttggacatgggagctcaggcatatttatctttatatatccctggccccccttttaaagtttggtacaaagtagaagcacaagaaatacacgggaactgaatgaataagaggaaaattgaattacgatcaaagaagagggacaggggaagtagggaaagaaggaagaacatagcacaatcctaaatgcaaactgtggtttccatagccgttggtagaggagttgtagtgaaaacttccagaatgtcagtaactctaaatatcctcaatatctcctgttggtggtttgtttgaaaatacttcaggaacctagaaggtagagtgaaggagaaatgtgatttgaatttcagtggcctgctgggtgttggttgtcaggacataatgaccaaagacaacctttaacttccttctgcttcctctgggggaatcacactgtcatggccaggaaagataccatctgttggccaagaaggataccatgtgtgaaatggaaagtccagatcaagtcttggacacaagtgaaaatatcttcaccacaaaacaaaaacaaacaaaaacccacacacaaattagtgctaatcattaccctttagc

SEQ ID NO: 43909 - DNA, 1958 bp, Homo sapiens
tgttccctcctcagggaggcccagagaaaatgtcacagggagaccacaaagcaagcagtggctctgaaatctaggtcacccaattcacaggttttccaagagctgtctctggctctcaccatcatgcatcccccacgaagtgggccatactgctaagtaactataaatcagcctctgactttctaccgcattgagactttccattcgtgttttcaatcctgtcatctattctagtggttctcaaccctggctgcatattaaaccaaggagcttctaaaaatattaatgcctggactctatcccagaccaattgagtcagaatctgtactggggcctgggcagtttttaaaagcttccctcagatgattctaaggtgcatccagggttaggaatcactgatccatcctctcattgactcaaaaggaataaataataatatccataatttgttaagcacttaccatgtgctagccaagtactactttgctttatctcactgacttctgttggcaaacctatgatcccatcttatagatgaggtgatagaagcttgcagaggtaaagtgacttgtcttgtgttatgcagctggaaagaactggactccatctgtctttccagagtgagttctcctgccttgctatagagaaagatctacagagaaggattctgcaaagaaggatctctccttctctctgccattggcccattattgatctctcccaagaaatcaataatgggtcaatggcagagagaagaaggtcagtctgagagctgccagggagcctgccttcaagaattggggtcagaaagtattatgggttggattatgtacccccaaaagaaacttaagtcctaatccctagtacctgcaaatatgacctatttaaaaatagggattgttaaagtaaatgaaaatagacaccaggcctgaagaatcccttagcagacaaagccaattaggtttcataagtggccttaaccttgcttggtttgcaaacataggcaaaacttaacttcagcaactttttgtaaatgcctatattaaagaaaaacacaatgtaagttaaatgactcagaagctttccaatgggagagaccaaataaggcaattgtacaactgtaaccaatcaactattttatttgctttatatctgtgtttgtcctgtagaagcctccccaccccttgtgctcccttggtagagctcctgaacctcttctggtttagactcatgcctgagtcatgaattgctgtttgctcaaactctttaaaactgtattgtgcctcagtttacttttgaataggtctttaaaggtgatcaacttaagatgaggtcattagggtgggccctgacccaaaatgactgtgtctttataaaaagggagaacttagacacagaggcagacatgcacacaggagaacactatgtgaaaatgaaagcagggatgagggtaatgcatttacaagccaaggaataccaaagattgccagcagaccaccagaaggtaggtgagaagcgtggaacagatgattctctcacaacccttagggggaaccaaccctgctaacaccttgatctcagacgttgagactccaaaactgtgacacaataaatttcactgtttaagtcatctcatttgtagcattttgctatgtcagtcttagcaaacaaatagggagaacatgtatgaaaacttttcaaaacaacaacaaaaacactccagacccagtagaggtctggagtctacacatgtactatcttgtacacgcagagatgacagtctgaaaagatttagtaaattacttaagttcatgggcagtaagtagaaaactgggccagagagaagagtccctcatctttcaatataggtatcttttacttccctccagtaatttctcattaaatgcattttaaacattggtttattattaaatcttacttggttatcatttcatata

SEQ ID NO: 43910 - DNA, 424 bp, Homo sapiens
caaacttttatgctctgcttctcttgtaaaactgaatgcctttagcagcccccaagtcacctattgaatgctttgctgtttagaaatttcttctaccagataccctaaatcatctctctcaagttcaaagttccacaggtctctagggcagggcaaaaatgccaccagtctctttgctaatacataacaatattcacctttgctccagttcaggggtgaatcctagagctgggctgggttcctgagtatttcataacaacccagttgccccatcaaggtgcagtcccataaacaacagttattatgcaaaattgtttcagagagggtgtaggtaaccttttgaatcaggagtgagatggagtttttgcctactagagtctttgtccttcttttcctttgtaggaatatgccctaattattgatc

SEQ ID NO: 43911 - DNA, 6051 bp, Homo sapiens
aaaggaaattcacattagagaactgaattcatttgccaacaagaggtctcatccaaaactaaactatatttaataacaacaacaaacattaggacaatttgcaatttagaaagaactaaaacttaggttcaagttctggggtttgctagtaatccatcctgagaggtcaagggagttcatcatggctctttgacttagtttcctcttctgcaaaatgaggagtttgaaaggggtggctttataattatttgttagcaacacccaatttttccccagaactttaatattaaaaagcagatgtaaatataaaatatatgtttatatatataaacaacctcaaatacatattggattataaaataatgaaacaaggctgtttgtgtatcttattttagttgtcatgtatcacaaaatatcctgattgatccaaaagggtgtttgcaaagccttccttcctctctctctctctttctattttttcagtgattgccttgccaaataagggcactcattaactagagcagaacaggtttgaatctgaggtcatcaaaaccaaaatgaatccaaaaaaaacctagctaatcaggcagcatatagtaatgcatttgggtgtgtcagtaaatttgaatatgcattttaatagcactttttatcacaggctaaaatgtatttttaatgacattggaataaaacatttgaacagccatccaagcccctctgtggagccctggtgttcacagagcactctttgaaatccactgggctgcatgttgtctaaggcaggggtctccaacccctgggccatgaaccagtactggtcccttccctattaagaatcagcagcacagcaggaggtgaacggcgggcagctgacattactccctgagctctgcctcctgtcagatcagtggaggcatcagattctgatagaagcacaaactctattgtgagctgtgcacgtgagggatctaggctgtgcactccttatgagaatctaatgcctgatgatttgtcactgtctcccatcatccccagagaggaccatctagttgcaggaaaacaagctcagctcccactgattctaaatgtaatgtgcctgaatcatcctgaaaccatcactcctccccaacctctccaacctccccaaccgcaaccccttccaaattgtcttccacaaaactggtccctagtgccaaaaaggctgggggctgctgttctaaggtgtcttgtggtctgactgtctgtgatcactgccttttccctgcaacctcacctcccacccccaccccttcattcactctagaaatatttattgagtcctcctgtgaatcaggcgcagtttaggcccttgagacacttcagtgaagctacccaaatatgtacacaagccctgcacaggaacttttattttttatttatttattttgttttgttttgttttttgagatggagtttcactcttgtcacccaggctagagtgcagtggggcattcctggctcactgcattcaacctctcaggttgaagtgattctccttcctcagcctcccacgtagctgggattacaggcacctgccaccatacctgggtaatgtttttgtgtgtgtttttagtagagatggggtttcaccatgttggccaggctggtctcaaattcctgacctcaggtgatccacctgcctcggcctcccaaagtgctgggattacaggcatgagccactgcacctggccaccctgcacaggaactttacccttgcagctgttttcgtttacagctttgaaaacaattctagttgatactgtatcagatacagcccaattctttcctgagtgactgggtttcccactcagttaccagttcctggacattaacagaagatggcagacaattcatcaactggctgacaggcagctgctcaagacaagaggtctgtttgtacactttcctctctcatatgttagctaaactgaaagaacaactaagcaagcaaggttgcctagccaagcaagatcctcaccagatccaaacacttctttgagttttgggaaggcttatgggttaaattaagccattaacatttggtccatcttgtgtctgtattttgtatttcttcaagatgctttaaataaggttgtagatttttagaaaatatggttcctttttcagaaaaactcgggatccttccaaaatgctctcaaagcctgaccaactggtgggtagcctttgtaaacctggagaataatggattgttggagaagcctgttttattaagtctctttccctttggaagcaaacctcagaagccccatccaactaatggtgggatatttaattattccagattcttccagaatgtcactggggactcagattatgtcatttgggttctgtgatgcgacttttaacggggttgtctcccaagaacaggagtaaatactcagaataaaaagctcgagaatccgtgcccagtaggtggcgctgctcttccttctgttgggattcgattcagacccgctgggaacaaaatcatctgttagaaagagtatgcaggaggttggagtaggcaaacgtatcggaggcagaaaggcaaacaattttgtcagctctcctgacatacagaagataatcaaagcaggcaaagcaaaccaccccaaaattcacagactatttggcttatatctttaaagtataaaaacatcctgtactgaatttaatttaatcaacaatgatagaatgtttagaacgatgtaatcaactgcttgctattttcctgaagtctccaaagagagtgacttccaagagtacagatgttccttgacttatgcggctacgtcttgtaaacccatcgtgagccgaaattatcataagtagagaatgcatttaatactcctaacctactgaacaccatagcttagcctagcctaccacaaacgtgctgagaacacttccattagcctacagttgggtgaaatcatgtaacacctaagcctattttatcatgaagtgttgaatatctcgtgtaatttattgaacacagtacactgtagagcacagtatcagttgtctgtcctcatgactttgttgctgactggagctgctgctcactacccctgcctggcatcatgagagagcattgtactatattatcaccagccctggaaaagatcaaagttcaaattctgaagtatagtttctactgaacacatattttttctgcaccatcgtaaatcttaggtcaaaccatggtcagttgtggaccttctgtatatgtctttgacctcattgccccaggggcacccaaatcccaggaatggccttccaagggtaccttaaataaaagttaaagggatgaacaagggtggttgcccagaccagaggagcgctctgaaagcagtaacatttaatgctcgaatgcctctacaagagtcgtcatgaggttgcacaaaaacatgtggacatttgcactgagaacgctctctttcccaaggcaactccgatctttgaggaaatccaatggaccctgcacctttctagttctgccatttgaggccttgtgaaacaagcctgactcggcttctcggtgaccagtccttcaaatatttgcccacagctcttatgtttccctctaagtcttttctcctccaaaataaacaccatggttgtttcaacatttccgtagtgtactagcacagttctattaatacttcagttgcaagttacagaaacaggctctggtgagctttacctgagatgtctcatagaatcaaaagaggaattaaacatctccaacctgagaaggaagttgctgggattcagagcaggagtcagcgtcctcctactgcagtcctgccattcacgtaactcattggtgactttcatgtcaatttcaacttcctattgagattctgaagacctacctgggattagccaaccctgggcaggggcctgcgtcacataacatagacatggctaccaagtctcaatacagaaaagtgagatcacataggttatttcttgttattctgatctctcctctgagcaggggctatttattagtgtttcctttactgtgtggggccaagtactgagggtgactctgaccacgcagagcagagcaggaccatcatcctcctgttctggactctatacttttattattacggccaaagatagtgagcattttttttttttttttttgattcacatgactcctcttgcctgttgttatgtcacatctctttcatcttgtacttcactcgtttggtctggtgactctaaatgccagaccatatccctaagaattgtcattggaaacatctgagatgctgttccagcctgccaaaagcttttggatcttcattttatcacccatcataggataaatgtatgccaatactacttttgtctatttatttagcaaagtttcattgtattttgttttgtaagaaactgagtttagcaggagagataatagagtcactgagctacgcagagaaatcatagaaaatgtgtaagcgatctagtcattctacttctaggaatttatcatcagaaattgtcggggacataagcaggtttgaatgcttacatttttgcctcattattatttataacaaaaaaaatgaagcccatttactgccaaacagtaagggaatgtttacataaattttgatatattaatttaataaaatatattgccaccaataaaaatgttgttgacacatacatcctcaagacatcagaaaatattataaaatacatatgcaatttatttaagtttagaagaaactaaaacaaaaatcaataatgttttgatttttgtctttttatttttttatttgccccaccttggagaaactaatgcctttttatttttaataaaacataaactgaagcaaatataccaaaatgttatctgtgggttatctctggatgatggagctttggtgatgttgttgtcatctttatacctttctctatttttttaactttataataaatatgtatttcttctcttatagaaaatctttttaaaagaaagcttatttcatgatcattcacagaacttcactattgataaattctttgcatttttatgctatgggactttttttttttttaagctgtgataaagcccagagtttccttggcttctcctactcgtgtgcagatagcagagccacccccgccccaccaccaccctgtgttactagaccttcctgttgagccagtcctccaccttggaactgacagctctgaagcttgatatcttcaccctcctgtccatcaacagctcctcacagttttggtcattgctgtcctctacctcgggctcagccttgcccatgttctgagtttatcaggccagcagcagaaagaacatcagcatgtcagcctcagacctagtgtgacctgacatcatgtcacacgcccatctcctgggttctgtgttctgggaagaaccctgggtgtcatggagattttaagtaaaagggtttctgtgcttggcaaccacagaactgagcttctgcctcgatttccctatcatcatcaccttacttccatattaagattagcccttggggccccagcctatttggctgttgtcttgtcatcccacccaggtcttgctagtgatacctttatcccctcacctttcacgccctacctgggctcctcatgatcccccagagccaatagtgtctgccacccggggtttctccttgtctgtgctccttgctgggctgggtgtctggcttctctccctttcccagtgtttatttttcccatgtgagtgtcctcctcctttgctgcctgcctgtgtcatcaaggactcaggatgcctcatgctccaactaaggcgccctgtgacattgcacatgttaaacatgtgcaaaacaggaggagttggggagaagtattggggggaggggattatctttaaaatgtattttttcaagccaggtacggtggctcatgcctgtaatcccagcactttgggaggctgaggcaggtagatcacttgaggtcagaagttcgagaccagcctgt

SEQ ID NO: 43912 - DNA, 1850 bp, Homo sapiens
tatgtaatactcgcataatctctgctatgcacagagcactgctctaagcactttacaaatataaacagttaatcccctccacaaccctatgaagtaggtgatattaatatctctatttttacagatgaggaaactgaggcaccagacattaaaataactttcccgggatcacacagctgggaagcgcttaaatccaggtagtctagctccagcactcaggccctcaaatgctacagttaggctgcctttcaagcagataaatgctaatcaatagactatccagaaatgaagactgtgctcggcactctgaaagaaagccaggaaagagcaaggggatttttcacattggttgagagtcagggtagacttctctgcagaaggaacagaaaggaggaagattgctccaagcagggaaaattgcaaaagtaaaggcccttgagtaaacaaatcttagtgaattcaaggaccttcgaaagaggttagagtcatcagagggcaaagggcacatgaagagatgaggttgcaagggaaaagggtacgcagtgtcaggccagactcaattttgtttggtggttctcaaagtaaagtggaaaaaagggccgatctttaggaaaacagccataggaaatagaatgatcaagtaggggagcttcatgttttcattttgagaagggcccctgatatgatgtggctctgcttccccaccgaaatctcatctcaaattgtaatccccatatgttgacggagggacctggtgggaagtgattggatcatgggggtgattttccccatgctggtctcgtgatagtgagtgagttctcaccagagctggtggttttaaagtgtggtacttcctgtctctcctgctgccttgtgaagaaagtacttgcttcccctttgccttccaccatgattgtaagttttctgaaacctccccagccatgcagagctatgagtcaattaaccctcttttgtttataaatgactcagtctcaggcagctttttatagcagtgtgagaatggactaatacaaccccatagcacatttcacaaatgtctaatcctcacaaccaccctggaaggaaacagatcagatagatttaacccctttgcgatatcccacccaccttcctaatgcctgtcccctctcctgtgtttctgctggtataatctcagttttgttctgggaaacctatgtctagccccacacaaatacccctgtcctagcctgccctgtagccaggggtggccttgtacactgccttggcagaagagacatcagtgcaaatctgctgggagtctggggagcccttcgcttttcctaataggcataaacttgggtccatgggctcatcaccacctcccctttcttcctatctggagaaggacaggatgtctacagctgtaaaagccatcatgcaactgtggtgggacaagtataggagaaaggccaagagatgctctgagaagctgaccctgaaccaatgccggcagccacccacagctagacttcttgctatgacttcgtttcagcatttttaagttttagggcttgcattctctacctaaatgaagcatctgtttttatttatttatttattttttatttttccaagacagagtttcactcttgtttcccaggctggagtgcaatggcacgatcttggctcacggcaacctccacctcccaggttcaggtgattctcctgccgcagcctcctgagtagctgagattacaggagtgcaccaccacgcccggctaattttcacatttttagtagagacggggtttcaccatgttggtcaggctggtctcgaactcctgacttcaggtgatccacccgcccca

SEQ ID NO: 43913 - DNA, 4210 bp, Homo sapiens
cctcccaaagtgctgggattacaggcatgagccaccacgtccagccaaaacacctatttcgctacaagcaaactaaggatgaggaaatatcagacttgcaaaaacatcacagagcggatttaagaccaggtacacctgactccacatccagcgctctatctactatattacaaataaattcttgtttgccttagggatttctatgcatgttcaaactttccgggcattacactcaccaatcccggaaactgtgttgcacagagccccttctggacaggcatgatttgggtcagtgaacccatcctcctctggttaccagagccaatagggtcaatgcaccgtctagctgaaagccagtgatattgtctgctccaaaagatgtgctggccaaataaaagtctctcttgcagggatttgaattacgtcattctgggagattaagaaaggagacaatgggacccaaagtaggaaggtaaggactggtgagagcagctcacaagatcttgtgagaggcgaagttatgagtaagcagaaaattgagcaagcagaagttatgacagaaaacacccaaaagatgggctcaatgaagcagtgggccacgggcgggcaggggagcagtccaccccagtgcaggcatgacccagagagactttaaaagcaataatgaaacccacaccaaattgatctgcttttattaacaccaagcactggcaaatctaaacgatatcagtaaagcaaccttttgttggtctaagtttcaaactattgtggcagttaatgttgaattttaataatgtgtatgcaagctttaaatagcctgctcttcatatcttatattttaagaaacaccgtatgccacatggaagttaattcagagaacatccagttagcatttagtccaaatacagctacacacagactcagctacacatatttgtttcaagtgtaagtcttcaacagcttcgaactgttgaaactctcttgggatatagctcatttctccaaaaccctatggtatggcacatgtgtacatttaaacaataaactcaaaatagactatgacagtgccaagtttgtaaagaggaagaaacataccttgagttatttcagttctgtcattgcacatgcccagtggagtttttaacttaagtctagagctgtgatgtgcaatctttttctttaataagtgcaaaattaaattcattcatgttatgttttactgaatttgaataatacctgtacatttaaatgcattttttttttgagacagagtttcactcttgttgcccaggctggagtgcaatggcacgatctcagctcactgcaacatctgcctcccgggttcaagtgattctcctgcctcagcctcctgagtagctgggattaccagcatgtgcccccatacccggctaattttgtatttttagtagagacagggtttctccatgttggtcagtctggtctccaactcccgacctcaggtgatccgcccacctcggcctcccacagtgctgggattacaggcgtgagccaccatgcccggccaatgcattctttctaggttgtgaattggtttaaagctaaggattaaatcaagatcaaagtaattatttctgaatagtattgaaaataaattttttgcatagagtagggtggttgtatattatctgacctgtgtgtcaaatgcccccagtgtcccgattgctggaacttttctgttcaccctccagttttgctttccagccttcttcaacctcctgtctgaccaaggtggttgatctctgaggacacactaccgacagcctcaattctgtcttctcattgggtttggccagtggagagcggtcagaggaagtcaggaactggaagaggggagaaagatgttgggttaattatttccaccatctgcatgaaccatctgcctccccactgagacacccaattggcagtgcctctacagaaggccattgctcccttaggtggctttctcccctttggctgtctcctctctggttccctgtaattgtgtccacttcttttcatctcaagcttagactgcctatcagtcagggtcccagaaaaacagtggcactctgaaattaggaggatgtgaggagagtctaataaagaaacaaattacagagatgggaactggctgttgggaacccacagaaaatggtgccgtgtgctgggactaaaagcagcaaaaccgtgttgccaccccgtggtcttaagaggaagaaaggaggagctccaaggaaaaacacagcagacccatcgctgggaatcaggtcagtgtgtgtcccatcctcactcccctccttctctccacctcttagccatgctcacagccagaagctagagtgcgaggcagcctgttgtgcatcacacagacaacagctggggacactgcgaaggtgggaagggtggagagtaaatccaaagagggaaacggaaggaatccagcatgggtgattagggctacccactgcccctaacccaaggaccgtcatggtgccagtgactgagttactgcttctcaccttcacacccactcaactgttctctgctgtataatgctggggctgggcttctgctttgccaactgacttcctctcggcttctgccaacatggattctagaagaaaactggaagcgtgggaaggaaggagagatttgctccttcccacttgctttttgtgggtttcctgtttgcctccaggtcccaccagcctcaccttaggcccgcatctttctccagcagaggcagttcattccagtagcagcagttgaatccggtgtgcagttttcccagcacgcacagaactagcttcattgtgccttcttggagaccccagcagcagccaaccaacacccactcctcagccagtcacagccccgtggagccccactccaagcttggggacagcagcagcagctgaatggcagcctccttctcagatgtctgcatctctgctctatgggagccctcacaagtttcaataatgtcatcctcttctctttgtttccccagccccaggaacgataggttctttctgctgtggcattgccgcaattacttggtgttctctttggggcacaaaatgaaagaatcctgggtctctgaatcgtgatacagaggaaagctacccaccaacccaggacacatttaccgaactgttatatgagcaagaaagacattttgattgtgtaaaatcaccaaaatatggatcctattttttacaacaatgaactgcacctattatgcctgaagaacattttaaaacatgtttctagactccatccaaaaccagaatcttccagcactgtctagtaatctatcattttaaaatgttattcttcctggtttggaaaccacagtctaaattgccctgagcgtatacttattaacattcaccaggtagcaactacccaaagcatagttgtggtacttagaaggaattcatctatagctcaagaattaacttcgtagtttttaactgctcttttttttagaaatgtcacaaaaagactgagttcagagaagatcagcatgaagtgagctgtggaagttttgctattcccaaaagaaaagggctttcagatatcctgattgtctgccagcattgactgcctctgaaaaatcagtgtctttgccaactatgtgacagacactgggcagatttacaggatgagagacaattgctggggctcctttctattctgttaaaaagccctgacccagagaactcaggactttctggcgcaaaatggtctgatacagattttgttgctgtctcagattcacgcacttgctttggttcgtatggctattttcaggtgacagcagtaattaaggcatgtacttggtgataggcatcttcttgcatgggtcaccccacagggtttgattcccaggccaactggcaagatttctgaaagcaagtgacagcttgtaagaggggtgaaggaaaaggcagagctggccgggtggctgtgtcctatgacaaaggattacagttaatggtgctgaggtctggcaagcaccacgaccctgcctggctcccaagctgctctgtctaaatgatcattgttgattatgtgtctatacctaggcaagagagtgggacagcatgacagaaagcagcttcttgacaggctccagaaaatttcctttataagggctttacctttaatagagaactcgaga

SEQ ID NO: 43914 - DNA, 424 bp, Homo sapiens
agcccactattctgtatgccacagaatcagaggccgattcttgctgacttcatttatggatctagctcatggaaagagtaattcgcacttcttttttttacaaatatttcaccagagagaagaaaccaaagcttcacatgctcgactttccagttttcctctttcttcaggggatttttaggtcaattcaacttaacaaatatttattcaactataagctggacacttacgttgagcaatgagttagataaacaaattaggccatcttatctctatctcctaaaacggcaagggaatgcaattggtacctgtgccctgttaaactcttttggaaattgtaaggtgctaaataaaagcagggtggccttatggattttatctggctgatattgcagctgcctaataaggtactatttgcatctta

SEQ ID NO: 43915 - DNA, 1182 bp, Homo sapiens
ttatcagcttatgaatggacaaacaaaatctgtaatgtccgtacaatgctatattatattagctatttgttgcctccagaccgtcactcaagtcatttcactcacctgagacttcctcactttcctttctccttttcacttcgttcttcaacatctagccctgaactcatcttcaagaccattattatacccactttgtgtctctaagcatttatagatggtatttttatcatcatcatcattattactttaattcatgcccactgaccccagtcaccatcttcaatgcacgtgcacagcaatggtctcccctcagagtgaattcctccagattttccacctggctgaaaagaaggggctcttctttgcaaacaacatggtatctttatggtaggagggatgcaggtgatagcctcaaggagacgtgtcacttgtccctccaggaagcactttggccatcatggatcccaccatcctccagccatatccgaattcatgacagacacatattttagatattgttctcagttttctgacacactatctgaaaagtgtcttactaattagcgctgcctgttggatctatttgtcatctcctcaaacaggcttacactgctcaaaatagcagtggagtggctttgtactgcatcaactttgctaagctgggactgtttcctaggtttccattctatgtatggttccagggttagcactaaatactggaaaaattctcacaagatttaatgaagacagaacatccccatgcattccagctgacttcattggccctagtttgtccttggagttctcatttgtccttgctcacctccaccaacccccacagttgtgtcatgactatccctttaataaatcccttgttctgaacaagtgttggcaagggtgcagacaaaagagaacctttgtacactgttggtgggaatgtagaatggtggagccaagacggaaaatattatggaggttcctgaagaagttagaaatagaactaccatatatgacttagctatccctcatctgggcatatacccaaaggaaatgaaatcaccagctcatgaagatatttgcactctcatgttccttgcagcattattcacaatagccaaggtatgaaaacaacacctgcccaccatccaaggagcaactgacatcacagacctggtatat

SEQ ID NO: 43916 - DNA, 1319 bp, Homo sapiens
cacccggccattgcctacactctttatccagagtttatttggtgattttcacctcatttttgtgctcagtcttaagatctgattaatgccaaaaataaataatctaatttcaaaataatataagttcatattacgtatagacatgtttgtgcacatatgcatatgatgagcttcacgtatacaactattcatacatttatatttttatcattcatatatgcatgcatgtgtgtaagaggacttggcctttcttatttaaaactgatcatatattaatatatataagaaggacagagaatggaaggccatacacctccatgttagcagtagttatctcacaagggtagaattacttcctttgctgatttctcttctattctttttttgtctgtgattttcatgttttctgcaataatcaaatattacttttataaatagaaaaaacccataatgtaatggttttggaaaagtgtatttgactttagtaacaaagtagtctgttctaacaaaaaagcaaggtaaaattggtcttagggcctgacagctcaggtgacccttaactcactgcttaattggcactgacttggccaacatcacctcagtgttttctcatctgaagcagagaagatatttgctaagccctattcagggctgttgaggaatcaaatgagaaggttatccgaaagcactttgtgattagactgcatatataaaaacatgctgacttcactgtgacagttgcattttccgtgaactggctgtgcacctcctgttatagggagttcccaggagccgggtcatgcccgagccttcctgtggaactccccgaagaacttggtccctcatttgggaacagcaacaatcaagaagacctgccaatgtcagaactggaagagtaccagattcccagatttagttccaacagtcaagagtcaaggtttgtttcatcggatatcctgaccatggaattccacaggaactagggtggttgaatcaataataggacactcaggtacatttgaatttcagatacaggtacataacaaataatttttagtatgagtatgtcccaaatattgcacagaattcatgtacatcaaaaaacatttgttgtttatctgaaattcaaatttaactgagtttcctgtctgtatttttttgttaaatctagtcatcctaatggaaacttttaccccctctcactagtttggttggttggttggttggttggttggttggtttttacttattaacttcagcttcttaatgagaatttaggttttacaaatacagtcgtcctttggtgtgcatgggagatt

SEQ ID NO: 43917 - DNA, 4802 bp, Homo sapiens
caatagatattaaccattagtagtcttttcagagcttctggtggtccttgggataaagtccatcctctgtaatatgatttataaaatatggctcctggtggggtgtggtggctcatgcctgtaatcccagcactttgggagaccgaggcaggtggatcacctgaggccaggagttcaagaccagcctggccaacatggtgaaatcccgtctctactgaaaatacaaaaattagccgagcatggtggtgcacacctgtagtcccagctacttaggaggctgagacaggaaaatctcttgaacgtgggaggcagaggttgcagtgagctgagatcacaccactgcactccagcctgggcactgggcaacagaatgagactctgtcttaaaaaaaaaaaaaaaattctggcttctggtttcccttccagtctcatgtctccctctctgtctcatacagattccccagccctatataaagtctttcactgttccctctactaactctggcataatacctattccactttattataattacttatctccatccatcttctctgctaaagctgtggggtccccagaacttgttcatagcttactcacactaaatcctcagtaaatgtatacaaatagaaggaaggaaaaaggaaaggggaggaaacaagagagggacaggtagtagtaagaagtacaatgacctagagatcctggcaaaatagtgggtcaacaatctagaccagtgagtcaggggtaaaggcatagacaaaagctacttgttgctaggaggcaatgggtcagaaatctagatggaaaacagtacaaggctgtacaaacaaaggaaccaaaggtaaacatgaaacagaagtttccagccccaccaggagctcttattcacctcctgctgactcgggaagctgttccaccatccatcacgcaaggtaagaaaggcgaatggcagcacctggctggaaaaggagtgaggggaagtatgggtggctgattgtgacggaaacacaaggctgtacagcactggccatgttccttgagtcaaaatgatccaggtggctttcaaaaatcttagtacatgagaaataccccatggcccactctcttatttcccctttcaccatggaaactcgccaagctgagtttcttgactgggctacctgcacgaccaaaccaaacaggcacctaatctctaatcttactgctgggctctgtctcagaccagatgagcagagttcaggctggatatcccacaggaggaaggctgaatacccctctcctcaccaaagttggttaaggtctgggtgagttatgtctcatgttcctgttgtgaaatggaatgaacaaacaggggatgtgattcatgtctgtagacacgtagtattcctgagagctaatcaggaaatgccatttcatgtctggtcttataaagcctcttcaaaaatttgatagaggctaaaggggagcaatcattttaaagtgagctcttgttatctcttcaaccacctacgccacacgcccaccactaagttctgagaaaactttacacccccctcttcttcctctgccctagtccctctccccaacccgtaccgccaacacacacacctgcatacacatgcacatgcaaattgtttgaaagaaacatcatatggccaggtacggcggctcacgcctgcaatctcaggactttggatggctgaggcggaaggatctcttgaaccggccatagtggctcatacctgtggtcccagccactcaggaggctgaagtgggaggatagcttgagcctgggaattccaggctgggtgagccgagatcgcgccattggcctccagatcaagtgacagagccagaccccgtctcaaaaaaaaaaaaaagaaaggaaacatcatacaacatgaggcatactttacactgaagtaagttgttgttttcaaggcaaaatgagtttcccttaatttataggaaataaaaagaaatatttaaaagactagtaagaacaaataaatccagttctcagctggtgatcgataaataagaaaaagaaagacagataaggagaagattcacctataaattaagtgcatttaacaacttaaattattacttcccccaaaggaaatgaaaatggaccctctgatcagagagataaagtatgttttattttagttttttaattaattttgcagggagacacctaaatttaccaaaaaagggagctaatatcagggaaatacaagatcttaatggaaagattatggaattcacaagttactggtggcaacagtttggacacaattagacatcttaacgataatgaaagtatatagtttaatgaatctatgtcaagggaagccttgagtataaaacctttacagggtccgacgagatgaggacttttgctcaatgagtaaatagtgtttgaccagttgattagtaaggatgtgtttttgaattcctcgagatttaacaagatgacaaatcggacttgtttagatttctttttcgggctagcaagaacactttgacacactaagtaggaggagtcccctcaaccctctgtgagactcctaagcccactaaccctgaagtcacacacagctcaagacacacagagggggcctctaagctgagagacgtttattcaaagacttctctgatctatcagaactggtgatctaggagctttttgtaaagctaggtattcttcctctccagaaaacaaaagcaaaaacaaaacactttgcttctctatcagagggatccttttcatttcttttcggggaagtcttctttcacgtttaaatgagctcaatttatagatgactcttctccctgtctgttctccttgtcccctttatcaagcatggtgaaaactgtggagtcatccttgtctcatctgctctgactaatttgtttaccatatctggccagttcttcttttgaagggtggctgcaattttctctttcttatctcagttgttgttgctttgcattagcatgttttcatagcctctcctcctctcagtcccttcccttcctcctgaaatctaaacctttctgacactctttcatctggcactgccccctcacaactgttatgagttcctttttctcccacattgagtctgaattcctctctatggctttcaaagactttcttattcttcctcaaccctcttcattatctgctactccctagtgctcccttctctagtgaggtcaatattctcttccacttactgggcttgtttctcttcttccttctctttacccatcaattgccctgtccattggcttatttttttttttttttttgagaaagggtcttgctctgtcacccagggcagagtgcagtggtgtgatcttgaactcctgggatcaagcaattctcctgcctcagcctcagccttccaagtagctagagttatagacgcatggcaccatgcccagctaattgtttttatttatttatttatttatttatttttgagataggatctcactttgttgcccaggctgggttgaactcctgggctcaagtggtcctccctccttcacttcccaaagcgttgggattatagccttgagccaccgcgctggggccggcatttctcacttctgtctgcagagcatgtctcctcatcagagaccaacttcttacaaagtcccactcaatgactgagattcttccctttctctaagctcccacagcatgtaaagtttgtggcacctggcttgatacaggtctggatcattttcaaaccgctctatttgtgtgaatcttgtctcccacaaaaatgatacacttttcaaacaaaaagtccattttctctgcttacatgcattttgtgtctataggaaaagtttagaagagaaagcatgatttacattggatccgttgacatcatcatgtgatggagaggcctttggagtcagccagactcatctcaactctgccacttactcattgtgtaggtgaaacttctgagtctccatttcctcatgtgtaaaatggggatactaattcttggcagagttgctataaaaattaaatgtcataagatatggaaagcttcttagatactatttggcccataattatatgcccaatagatagtagcaatatctattattaaattctggaggaggtaggtggcaagactcaattctggaagtgagttggactcactctcaggtgtccttagatcctaactgatagggagagaggaagcaagagcagacttcctatctgctcagcctggatgtggtcaacttctgtctgggatggtgtttaactggctggaggagttttactttctaagatgagaaggaaaggttgtccagagggaccagcattccagaggctcatttcctgggcccaactctgaagctcctttcctcagagatgatgcaggacccgattatagaggtagacactgtcatacaagagcaataccccagggatgagaagcagacatttggccttgacagagagagattctcctggtgacaggagctggactggtgctgagcgcataaggagtggctcaaccaatcctgcagcaacctggatgctaacaggcacagagagatatgagggatacagtaatgtaacagactctactacagtgcttactaagtatgtgtctgcattgatctttgagctttatgttgtaatattaatcttcacaacaacactgtgaggtagctaccattcttgagccccatagtctctatctatccctctagattccttgtctgccctcctgcactctgctctgggccctaggaa

SEQ ID NO: 43918 - DNA, 1939 bp, Homo sapiens
ctgtaattgactatttatttttgcatcaaacatggattcatcaccatctatctgaaagaaaatgagactcttaaaagatggcatctgtgttaagactgtattaattaatgaataaatatctgccaagaagctggtatgtgttaggaactgtgccaatacttctttgaacctaaaatgtcctgctttgcagttccaggctgagctgatccacatgtgacaggattggaattgacctcgctgtgaacctttcagtcagatctgtggtatctgagtcttgagaaaaaaaaagaaaagaaaaaagtttcttatttcatcacagcactgtgactcagatttggacagtgaatcatataaactcaattagaagaacaggcagttaaatcctccaattagaggattttaaaatctgggaacaccataacaaacttggaatgacttaggggatgatgcaccactattccaggatcccaagtctacataattaaaatgcacagaagcagccaaaatgattacctcctcagggtagtaattgacacccagtaggtgtgctctgaccttgacggaggatggagtaaaaacagaacaaacaaatttgaacctttaaggaaataatgactctgccagcagcagggaagacagaaccacttccaacgcatcctgttggtagcctaataatgtgtgcaccccgtagaaatttatctaggtcattcaacaagaagggatacatcccgaatgaacaggcagcaagggcatcaatccacacatgcttatttctcaagtgaggcaggaagggctctttccttctgagggtcttaaatgtttagctggaatctaaagggggtaaatggagcagaatctaggagcatagcttctgtggcaggggacaggctttcctttgctaaagtgaaccactaagtgagagcatttctctcttgcttacatattctcacacacacacaaacacacacacacacacacacccccaaacccaatacatccacctttacaacactagttaataccatctctaagatcatagtaaagatatagactctatagagaattagggcagatatggagggcagggaggggagagttgacagagaaggtagctcttgatttatataaatagttctaaagtacagaggctggtatttgtctttattatttataagtttgccaggttattttcccattgggctgtggactactcaaggtcaatgcttagtacagaattggtctcagtatgggtttaggctggaagaaagaatgaaggaaatgcagtgacttttcaaagtcctataagcagggctgaaactagtctataacatcttttccccttcagattgcctttgatgttctaatgcaactgaatacaaatgttgaaggagaggaaatggatgcagagtgtgatatgttctgtgctccaaaccccctaggtagccagaggatgtgtctaagcaagctcatgctattgcttaccttaaacagctatagggagcaaatactgtgaggaaaaagaaccctgacccagatacaaatcacggagcattagtcttgggaaaccccagagacagacagggtggggagctctcatggaccaaagatcaatggtgagtcaaagaggcagcctcatcaacatggcaatggccaacagatgtttattgccaggactatcagactctggttgtgggtttctgtgatgtacagtgggagatgggtgtgactactgctttgtatgttaatgaaccatctgataatagagagtgcagtaaatatttgttgagtgagtgtcattgagtgggcaggtctacaaggatctacatgtttattattaaaaataataatttggcactataagtcaatgcttgtcataaagactggagtaccgcgccctgggtcagaggccacagattcgaagtctactttgccagaggga

SEQ ID NO: 43919 - DNA, 2954 bp, Homo sapiens
tgatgcttgtttgtcaagttcaactgttaaaggggagataggctcttccctagtagggagagggaggaaggaaagggggatggggcggggggagggaacaggtaatatctgccatataaatattagtatgtagctgacacgttataaactgagctgttagggtgaatttcaattttgttggaatcgaccttttttccctcttaagttcaattgacttacagtagatcccagaaagaactcaatacgttatttattctagaaagctttcttccctgagcaaaggaggcagagctaacgaggagaagggaggagcttaggtgaacagaactgaagtcacagctggttagcatgactagaatgcatggaaaagccagcccaaattagatgagtgggtagatagagagctttgaaatccttggaattaatggtggagtccatcgtaattgaaaggtcgggccttagtgggctgggatagggagagaagctgtcggggacctggggcagtgagcctgtaccccgtggcttctcacacactattttgaaggcgttcccatgcgcaatctcgcctgtcagttcaggctgtaggtttctcctttctaactcctgagcagaacaacactgaacggtggtagtcttgccttgccacccaatgagtgctagaaaacagtcacttcaaccaattggttcagtccggagaacgtgagcacattctactttactttctgttcaatgattttggaaaacaaccttttagattctggtcagaaggggcttggatccgtgactttgaaacactcgccactaccacaaacgactttggaagttaatcagaaataaacagtatctgggatctcatccgtcctaaacccaggggtcagagcgtggggggcttccactaacttcaggttaagaggatgaaacagatccgcggagaagggtcccacgatccctggagactaaaagcaagccacgaacagccgggacgcgcgggccggggagatgcgccgggggctggagggcggagagcaccccccgcaggtcccggccagagcccggggccgggtcacctgactcgcggaatttggggccgcgaggggtggaatgggaggggaatggttagcgcctcccttcccgctcccactggatccaggtcggcgggggccggcgcccggcggccacgtggtggtgctgccgctgcccccgccccgccggcctagcccgggagctcggcgcccactgacccccgcagcgggggaggaggagggactgcggcgcaggaagccgagcaggaagcgagcccggcggccgcgttttcctggggaagcggcgggcggggtggagcagccagctgggtccggggagcgccgccgccgcctcgatggggtgagtgcgcggcacggagttgggaggctcccggcgcggggtcccgggctcgtgtccccgcctttgtgtctggagctcgggcgcgggaggcgctggggacggcgcccgggcggagcggctgagcgggctgcagccggggtcccgccacctctccctggtccaccgccggcagcccactgtctgcggagagcagatctggggacaagaggaaggagaggaaggtggagatgagggtagagcgggaagacccggccaagttaggagaagggttcttcccgggtcctccgcgactcgcaggccggctggggcggggcgcggggcaggggccgcggcggagggagcgcgggtgggaatgaatgagcagacccggagatgcaccctggagtctgcgccgggtcccacctgtttcgccccgcgcggcgcctcgctgcccccgcgtcggtgctgctgagcccaatccgcctcccggctgaacttggaggaggtggggagggaggtgcgagcgggagactccgggtggctcccaggacgcggggtccgctattgttcctcctctgactccagggagcccctcggccggcccaagggcgggggcgagacccctctgggcctgcccctgccccctaccttgttttccccgccgcagctcggggagaacggatgctggagttggggcagactcggggccgccgggacttcgggagtaaggaggacgtggagccaccagaaaggcgcccgccatctcccgcgacccctgcctggtggggggtggggggtggggtgtcgtcctcaaccaccttcgctgccttcttgggcaggttggtgtcggtttagtttctgcggtttgcagggttgacatcctaactcctttgagtttcgcatcccccttttgtggagggggctcagagcctggagaagcaacagacggggaattaaggcagatgcagcccagcacagcgtggaggggtccgaagtggcctcacgggggcctgagcatggctgtctttccaggctcctctttatttgccaggagcccagctaagcccaactttactcccagaaatgttgaggggaatctgcggactcgaggcccctcgcctcgggaccagcggcttctcttcgccgcagctcacgcatgatcggggtgggattccgtcttccttccgggagaggagaatgcccagctgcctgggatggggaaacgttgccggatctctggggaatgtggtctcaaggctgcaggggcctggcagagaggaactgtccatcactaggacatagccgaagctcgccttagcgaagagagtctcacctcctcgggctttgcacagagttggagaagaggtcgggaatcacagggaggctggattttggctgctctgtccccagcctgcaggtccctgttcgccctgtggctcggaattttattactgatgtatataatctgataatcttttcttaatgatgcctaacaagtgtgatttttttcccccttgggtttgtaagacagttgattttatgtgaggagattgatccagttcttatattttagccagtgcttgtctaacaga

SEQ ID NO: 43920 - DNA, 2105 bp, Homo sapiens
aaaaaaaaaactatatagggcagtgaaaacattcagccactagtcaggccttagggtctggttctgaatctcatcatgaataggctttgtgactcaggcaagtttctaaacttgtctgaggctctgttgctacttctgtgaaatgaggcacttagactagatgagcaatcttgacttttgaagggtggcaactaccttgtagaatccagtgaaaactcagaaccttcctccctgaaaaatgtaaatgtatacttgctaaaagataattacattccatttccaggggaccacagacccatgttaaatgaagtgattgcttaagattcagctcaactcagaattgctgagtcccacaagaccctgagagtcttgcattgtttagagaggccccctgaggaatgagctatttgatgagggaggttttgttgttcctggcatttttcactaactgccctgtgcattctggggaggggagacgggaacaaacactgagaaaaataaatagggaatgagtggcatctggaatatgaactgttttcctcatcacttttcacaaggaggtggatggcatgattgcagcacagaagatatgttgaggaatgacttgaacatagagatacagcattttgtacagtgacagttaagcagtaacttagacttgctctacttttaatgtttgagaactcactgatatagaaatctaagaaggtccagttcagagaagcagagaacagaatggaagttaccaggagcaggggtggggatgtgggagtggggggttgggggaggtggatggggagatgttggtcaaaggatgcagcgtttcagttaagaggaatagatgaagagatctattgtacaacatggtaattatagttagtgtattgtatacttgaaaaattcctgagagtagatttagagtgttctcatcacagtgaaataataagtatgtgaggcaatgcatatgttaattagctcaatttagccattctacaatatatgcatatttcaaaagtcatgttttacaccataaaagtatatacaatttttatttgtcaattaaaataaatattaataagaaggaaaaaattaaggttttggttaatttgaaaatgtcagaagcttctaggaagtatatcgtaagtggaaatatgttatttaccactcctcagctgttaactgaccaccttcccaacgcaaccctgctctgtctccttcccatgacccaagttgtaatccaatcaggagagaataccttatttggaaacctacatatgtcctttttttctctgcttaggtgttgaaaagtctcctctagagctttggaaggctgaatgcactaaacatgaagagcttgaaagcgaagttcaggaagagtgacgtgagtatgcggtgactcacagtctggctgttccttcttctccatggagctgcagaaacgctcctccccaccttgataaggcgctgttgggttaataaactacagacactcaagtgctcttggccccagctcagggtagcttctgtagatggcatgctctaggttccttgctgtttgtgtgcatagctttcaaaaacaatgtttttttatttttatttttaattttggggatctgtgccttgtagagaaaggaaccgtcacattaaacatcttcaaaggaagaatcagtaaaaacctcaacatttctaaagttgccagaaatcctgattcagaatgtcgtttttagaagaagctagtctctctcatgcgggtggtttaggaatgacatattagcatggttcatctttggctttaggaaacgtgttcaactctctgttaagggttttgtggtaaaatggtatctactgctgcccgtacctttcctccccccgaattccagggactcgtactcatttgttatctaaccaatccataaaagactctggattggaggaagcagttatgatgtcagagttatgaaataaagtctcccccaggagaagagggagaaaaacatagcagaggggttgtacacgataatatttttttaaaaggtcaccccataaacccttctatgatcccagtcttgtattagctgcattccagatactttgagcagagttgt

SEQ ID NO: 43921 - DNA, 586 bp, Homo sapiens
tatgtagatgtagatgtgtatatatatatatatatatatatatatatatatagatgtgtatgtatgtatattgtatacatacatataaaatatgtacatatatttatgtacataaatatgtagatatgtaaaatatgtacatatgttaaaaataatacaaggatctcacatcatgcctagtccagagctcaagagggatgtagcaactaaatgtattatgaccatctagattgcagggaaaatcattagccaggctcaaaaaagtaaacctctgctgctttctagattgagcaatacacaagatattgttcatgtggcaaatcaatgccagcaattccgtgtctgcctttatggcttggacttagggcttttattttaaatgatttcttattttctctgccaactggtctctaaatataagttcgtgtttttcttgaacggacacttttttttttgaggtggagccttgccctgtcacccaggctggaatgcagtgatggaatctatgctcactgcagcctctgcttcctgggttcaagcggttctcctgactcagcctcccaagtagctgggcttacaggtgcgt

SEQ ID NO: 43922 - DNA, 1163 bp, Homo sapiens
atagataaaaatgtatactatagtaaattgagaaaatatactcatatacatatatttaaattacatacttatcttcacctaaaataaagatactttgtctaacaaagtaatattagggatttattttatgttttaagtgaatgataaattatcttgcaatgatatacctcagatgaactcttctattaaacatctgtgtatttgtgcatctacttatttactttagaacgggcaagagaaaatggccttgggacttttgacctgtggaagttttgcattttccagcctggatatgtggaggctgtgggcaaagccatcttacttccacattgtttttctgtttcccagttcctgggcactcagctgcctaagtgcttctcttttgcaggaacaaaaagaaaaaaaggtaataagcatctcagaactcatctggggaaaaaaaaataaagaaatgaatagttaatttgctgctactgtgataaactttctttgtaaacattgtcatctcaacttctgttttgatagaggacagttgaaaacactgtgcttgcactggctggctgaagtttacacttattcaaagcaaggcagttgagaattaacccaaaaacgaatgacctgaccttccaggagtcctgatgcggccagggggccatgtgctcagggaggctttgcagggcagtcatcccaggagctcggtggagtggagggagaggtcaggaaagggaatgcctcggcctcctgctgtctgttttcagtctcctaaagactcctcggagatgaccacaggccctggaaatgggagtggcccctggagttggggtggtcagaaaaagcagaagtgcaagtccaacatgggatcagccagcattgggcatgcctagggacaatcagttgtctagggactgcccaagaggcctgggctccctgctgccagggaaggtggtgtttctgttctgccatgggtttcagctgcagccaatggacccttgcccaggaggggttttaatcactacaaagagccagacaaatgtggcccatggactcgacagtatatatagaaagagcaatggcaatgggtgtgcagagtcactgtcactaattttaccaagatagttctaatcttaacttatacaggtactagctcttaccaataatcttgc

SEQ ID NO: 43923 - DNA, 806 bp, Homo sapiens
caagtgttttttgttttttttttaattccaaactgccctaaatttccatagttatggaaatgctttgtaaagccgttcattaagtagactgatattcaggttaaattagagcattttcttaaaagtctgtgtcaattgtgggttagcttttttgtttgtttttgacagagatgaggtctcactgtgttgcccaggctggtctcaaattcctgagctcaagggatcctcctgccttagcctcccaaagtgctaggattacaggcatgagccatcatgcccagccagaatgtgggtttgaacaaattgagataacagtgagaaaaaacaccagagttctttagggttacatcgacaactttctttgtaagaatgatcttttcaatgtttgccatgttttactttgctgtctataatgtgcagaattcctgctagtgattgagtaattcaggaatccccagtccctgggccacagactggtatttgtctgtggcctgttaggagccaggctgcacagcaggaggtgagtggtaggcaagcaggcattatcacctgagctctgcctcctgtcggatgagtggcaacattaaactctcatagaagagcaagtcctactgtgaactgatcatgtgagggatctaggttgagtactccttatcagaatctaattgctgatgatctgaggtggaacagttttctcccaaaaccatctcccccggcccctggtctatggaaaaattgtcttccatgaaactggtctctggtgccaaaatggttggtacagccaggatactaaatagaacaattca

SEQ ID NO: 43924 - DNA, 916 bp, Homo sapiens
ctgctgcctttcatgtctttcttagtcttatattcagagcccatctgctcttatatagaaatcgtctctttccctcctaagtgtagaaatcagttttgcacatacgagtgccttactgttactgtggtttgcagaattattcagttggggtttggcattgacagtgattgaggctttgctcaaagctctttgacgtttaagagcttgctcaggaagaagttttgtttctggtgagactttgttgagtcggtagcctggacaactacttaaaatcagtatccagctcaaaattcagggcctggtaaacagaccagaaagagaggcaataaaagcagatgaaaaattatgtgtctgtaaacctcgggtaaccttgagctgctggtttggttctgtaacacggtggacagagtgagctgtggatgaggtcaaaggccaacgtgctgaggagcagctgtctagttcagcgagaaattagctaatgtgtaaactggccttgaggtctttttacgttgcttcatattcctagtgttagttaaaagaagtaaattttatctcagagtttggtgactagccgtgatttcattgcactatttatgttttcttttgggaaagcggccttcttgggtgtctccatggtgaaggggaaggtattttaaaacacactcattcgggagcaggctttaatttgagtgacaggagggtgggggctgcgaggactgcagccctgctggtcagtgcggctgtggccagtgttgttcatgacctctgtttcttctctttctctacagaccaatgagtggaacaagaatgatgaccggctactgcaggccgtggagaatggagatgcggagaaggtggcctcactgctcggcaagaagggggccagtgccaccaaacacgacagtgagggcaagac

SEQ ID NO: 43925 - DNA, 1284 bp, Homo sapiens
ctcttcctgcaatcagctttcctaaccatgcctagctccaatcttactgggtaacacagacggtgccagcacagtcaacagccatatctaagcctttcctctggggtccataaaaacaaaactcccgaggagctgtgggggtgcaccgtggccaggatcgtcgccgaatacagcccgcacacgtcgcagctttaaataagtagggccgtggggcccggcgctcccttccatccttggacggaatgtatcttctcttcctacgccttcacctccgaggggtaaggtctcgtgagatacaatatgcagaggccagttttggggcgagccggaggccgggcgcgtctaacctgcggggaagggaaagcggagggtaaggcaagggctgctgtaggcgccagacaacagggactctccgaaccggaagtgccccgcgtcgccatggctacaggcgctcccagcagaacccgtagcgttccgttcccatggcaacggtattgtctccttggccggacctgggctgcggaaggtaactggggacgtcgcaggctgtgcagctttcgcgaggcaccgctttggcgcccggaccgaggtgcgccagggtcaggaggccgacgcagcgggaggaagccgcgccgtcgggctcagggagctgggaggctggttccggggcgtggtttctccgccttgagccaggtgccctttgcgcactcgcgcgttctcttagagcctccgcggcagagaggctctcagagctcgacctgcggcgtcagggcttacagacttgccgcagaaccacagcgggaaaagaggagcgattcgtccttgaggggctcagggccgtgcggaacgtcataggaacagagtccgggagtttgagagatcagaactctttgctgtgggcatagtgtttaaagtggaggttaaaaagagaaattagtgactctccctttctgattttcggataatggatgctctggagcctgggtcagaaagccactcagggctcggtgggaattagtgattctggagggtgaaaggagaggcgacttggtggatgttaacattcaataagtaactgcgttcgatttgggtttgatttaagcgactggcatagccttccttgagagttgaatttcacaaatactgtatttagaaatcacatttttcgttttgtgcttccgaggtttctcctatcatctaacagcaacaactaaaacagacacatgaatttcattttattgttttattttattttgagacggagtctcgctctgtcgcccaggc

SEQ ID NO: 43926 - DNA, 1976 bp, Homo sapiens
tccgatttcattaaattacatttagagtatctatggcacaggcttaaaggcgcctacttccatacctgaataaaagcatttgcttgcacacactttgcattttccactgttactttgataccatttttagttgcgaaacacgtggcatgttctcggaaatgaatagctttcaagatagtggagagattcctaacgttgtcaaggctggccacaaggctgtactgatcatcctcgtcttggatctgttgggtcagaaggggcatcgtccactgcgcattcggccccgagggatgctcctggggccaacaacttctcggcggatcgccaaacacctgaagggattagacagtaaaactcccatcagtgctggcgaggtccggcgagctccacctgcgctgagaggtggaaaggggctgggaggctgaacacggctgaccaggccgaaccccacctatgtcacttaactatctttgtaattctggaggaaaattatctaagctacggtttcctcgtctccgtaagaggacaataacgtgaaaagttgtgaagaatgaagacacgcaactgacacggtatctcccggccaaacaggagctacaaatccgcggggagtcggttttgtgcagcccgcgccaccagccccgcctccaacaaaacaggcgatggcggggcgggcccggagtgtccagataatcctccaagagtcccagacaaccccattcaccagcccgcccgcgggacagcatcgcttactagtctcggggtccccgagtgcggaaaccctacctttgcggtggggtctggacgcccgagagcccttctcagcaaagtccctgaagaggagcgaggcggctccgaggaaccgcggaggaagtgaagccagtcccgccactcttcagaccggccctccacctcggccaccgtcaccacagagctgaaggaggcctagagagccgcgcgtgccgcgccaccgagaccggaaggaggcggcacagacctggaggacgaccgcggagctgagcgcttagagccgccgaaccatagagatcggaaataggagcgagcggcagcgccggaaaggaggccaagagcgcgggcggcgaggcaagatggcggcaaccaagaggaaacggcgtggaggctttgcagttcaggcgaagaagccaaaaagaaacgaaatagatgcggagccgccagctaagcggcacgccacagcagaggaggtggaggaagaagagagggaccggatcccaggccccgtttgcaaggtaggaggggatgtccccgggctacacctgcggcggcggctctgtgcgccttttcttgggttacttacttgactacagccttgcttaatttcagagtagcccgggtgttaacggtaggtcggttttagcaattctcccggccagactgggcacggagtttgcagctaatccttgtgcacgtggccgtcttcctggaggcggcgggttttaaaacctttacccggcccacggggaagcgacttacagggtgctcagatccagcgttctttcttactagttgttcagttgttttttttttttaatgtttttggagagtagtgcttttccttggttatttctcgctattatttctccagtgattagtatgcccatatactgccatagtcagccactctcagtcagggatcctgaagtacgttaggggagcctttaaaaagttgttgcccttgggactgtgactctgacttgttaaccaggtcattaactcaagagatactgaaaaatagactaggtagtatgagctttacttgtattcaacagacattgaatgtgccatgcactgtaccaagttaggcttcctttgggtttgagattgcaaagatgactagaatgtgacctcttcctcctgaaatgttggagtttaggaggaaacttaagaattcaaataagttgatggtttttattcaaaagaagtgcacacaagttgtt

SEQ ID NO: 43927 - DNA, 2098 bp, Homo sapiens
ctgaatcgccttatctataaaaacggggatccattgagaaattataatcagatattttccagaatcctctcccatcccagctcctatctcccccttcagccctcaggtcggctgccactcacactgaccgccatctgtgcccctcacaatgacaccagcgtggccctgcctcccttccgcgcggccccgcctctcgccccgccgaggccccgcctctcacaccaaggtcccgccttcctcctgttcttcccggccaaggcctaccttcctcccacgcggcccgcctctttccccgccaagctcccgcctttctcctgcgcggcccgcctctctcctcgccaaggccccgccttccttcctcggggcctcgcctctcaccccgccgaggccccaccccctcccgcgcggccctttccggcacagagcccacccctagcccatgcgaagcggcggccgccggcaccgcccccgccgcgctcccgcttgccgcagcctgcgtcgtctgccgccaccgcgcgccttcactgacctacaccaccgccgccgccgccgccgccgccgggctcgctggctggcccggtgcgggcggcggactcccgccggagaggactgccagcgccgccgccgccgccgcttcggcccgggcccgggccccgaccccgtcccgggccccagcgccggccgcccgcccggtcgggcgatgaagtgtcactatgaggcgctgggggtgcggcgcgacgccagcgaggaggagctcaagaaggcctatcggaagctggccctgaaatggcacccgggtaagtacctgtcccgcagcccccgcggccactcggagaagcccggccctccccgaccttcccttcccccgggcggactccgcggagccagcagagagggacctggcggcctaggagctccttgccccgcccggccagtgcccggagccgccctgcccgtctcggtgggcgaagcgctctgccctggcgcaccccggctcacaccccatctcctcatacccgcgaccccggccccgcatcgccactgtagggggaaaactgcagtccaacaacctcacttgctcccgctaccgggtcgcagacaccacgagggagcagtcgggaactcggaactcagacctgccccaggcttgcttttccctgcgtcccttgcagcgcagcctctcggtgtttttcctccgctgccctccacctcgtccgggaatcccagatacttcaacctgatgtatggctcttttcgtttcttagttaagaagttaagacacgggagctagtaaaatatcttttcaatagggatgcgcttttttcgctgttttttttttcttttaataagctgtttaagcagaccttgtacttcactttggacatgattctgccggggaaggttttaatcaggcggcttccccagtaaagtttgtatgtttacttagaagtatccttcctttggatgtttcattggtctgtaatccaggcctgtgtgacttttatgaagtaatctgatcttccaggctgggaaactaagagagtagttgactttcagctttttgaggttcatatgaagaggctttcatattagcattcatcagtaaacacggttacagagtatccaatatatgcaagtcactgcactctactaagtagatttggaaatgctgagacaggggtcttagagtcttgttaggaaaacaactttctgccttacacaaatgaaaagttaaatacaactgccagaaaaaaatcgcaacatacataattggtggttagattaatggaacaactaatatatgctccaggaattcagggagggagttaccattttgtattgagtcttccccttctcagaggagtttggactggatcgtagaggaatgcaatttggaaaagtgaactcaacagtatggaggatagcatggtggaggacaaaagatgttccgggggacagtttgactgaaggtggtgtgtattgcaggtctgaaaaatagggattatgagaggagtggaaggaaaggtcagggacccaaagtcaaaagggaatggctatggtgatggagtgagagatagaggtgtgggtctgttactta

SEQ ID NO: 43928 - DNA, 744 bp, Homo sapiens
accatatattttgctaagggtaaaatatttttggtgaattgcagacatttaatttcacttgtctgaggtaaaacaataaactaaaatacatgggcatgcatcttacactgatcttattagaggtcagtgctaagtacccatcttgattgaagttagctcagatgtggagattcatagaatgagggtccaggagaagaaagttaggggaaatctcattttctttctgtaattcattcagtggtgccaaagctgggggttccctacaatggctatttagactttccctgcttcaaaataagagcagtatccttagctctagccaagcatttttctaattcctgcctttggtcacaaagaaggaaaagcagagctgtgaatgagttagtggaggtcaagtcacatcagagttcatgacctagtgattgctggtgaagtaatattggaattttggtaccatgagaagacttataaaggatttcatcagaagttttcattttttctaaatcctcccctacaaaattttcagattggaaattactcttgtatttgtagaagattgtctctaaaattgtggtttaactcacgcaggaagtaaaattcctatagcaagacatagtttcattttagaggacccccaaaatcccgtgaattctctggtgatgattctagcctaaccttcaacataaaataatgaagagaacttttaaacttttttatgaattcctaaacattaccatttatgtg

SEQ ID NO: 43929 - DNA, 674 bp, Homo sapiens
gacaatgcggatgttattaagcagctaaaaatggccagggtttcctcttcttaagaattttaggagttcggtagtttcatctgtctggtgagaatggaggagagggtttttaaaaggtcatttgaaagtcagcgtcttcttttttcaaggagaccaagagaatgaatttagagagggacacagtgagcacttaattcatttggaattctctagaatatatgagttaaaactttctgataattgaagattcagctccattaatgtctaaggttcatatacccacttgaataggttctgcgaaaaatccagcaattgacttggccacagatgtgctcagcgtatctttgaattgctcaatatactgatctttagcttggcagcagtctgcaaaaagcaaacaacaaaacaaaacaaaccacagcatttgaaaatgtgagcctgatatttagaaacatggggaaaaacaggaaaaaaaaaaaacaaccagacagggtaagttaatcagggacttcagaatacggtaaactggggtgaggatatgcatttctgaagggggaatgttctctctgaacaacttgtactttggttcaaggagggagattaagatagccataaaggcataaacaaaccacttcagttctttccatctggggaagaaacgtcccaaagtgtca

SEQ ID NO: 43930 - DNA, 2023 bp, Homo sapiens
caatggggaatgtaaaatggtcccctgtacctgtttacggcccgtgaagcacaggcacataaatgtacagacagttgcttaatctcatgtttgcatgagggaatttgctgaggaggaggtgaggctctcgtgaaacaagatccatgtgaaaatcacaagcatataggatattactcataaagccaccaatgtctggttaccccacatctcctcatattttctgttcttgctgcagagaggagagtctgagtagatggggagggcctggggtcaagccctggcttggatgactctgggtgaatcacagcacttgttggcaattgagagcgtggtctcacttcctagaggcatgatgaaaattcatgcagatgctttacatcttttaaaatagtcatcctagcctggtgcaatggcttaggcctgcaatccgagcactttgaaagactgaagtgagaggattgcttgagcccgggagttcgagaccaacttgagcaacatagtaaaaccccatgtctacaaaagttaaaaaagaaaaatagctaggcatggtggcatgtgcctatagttccagctactcaggaggctgaggtgggagaattatttgagccttggaggtcaaggctgcagtgaaccatgatcacaccactgtactccaacctaggtgacagagggagaccctgtctcaaaaaagaaaaaatagaaatcatccttgggcatctgtaaattgaagtcacactctattttgattgctttcctttggtttttaaaaatattgaagctgagatagcatgtcatgttgaaattgtgtatagtcgggtttcattatccacgaatttcatttcaaaacaaaaaggagcattacaaaatattggctatgaaaatggggcattgactcagggtgagaacctgtgtgtcaaaaacatgcctcatctctaagacctcacccaggtctaacattccagaatcccaggcagcagccttcggagctcaagtcttaccctctcgctgatcctctactgacccacgtccccctggtttccacttacggctcaggaaaggatgcatctcaaggatcctgggagcggaagtgaccaggcacaagggtctcagcaaatgtctccagattagagtcatttctcccactcagaaagccaacccccatggaagcagattggaggccgggctctaactgctcactatcctgctggactttgagattaagatggggaggaggcgctaaaaggggaatcctggagtggtgactgcccatggcttcaggcaagccccagagctctctatttctagtaacagtgccttcaagggggagaaaaagagagtgaggaaaagagatagaatgaaaataggaaggagagagagaagaggagagaaaagaaaggaaaagaagagaacagaagggaagaggaaagaaagcaggcagataaagcaaaggtcatctgacaagttctgttagtttaatattccatcggagtttcatccgggtacacttttctctgcaggagggtggtgctgggtgtgggagaaggatcaggacatggttgaaggggtcggagattgtgaaacgaggtatgtgactaagagaggaaaaaggaagatatgcatgaagtgaatgaacaaataaattggttttgggggtcttagagaaagagaggagaaaacaatggggaaggagccattccaaagaaaagctgagagtaccaaatagctaggtaaggttctggacagctgtggatcatcttatgtgtctgaggaaggcaaaaggttgagagctaaggagttagtgtgccttattttcattatttcttaaattcctatttatcccactccagcctccccttaccttcaatccccataagcaagtatttagcatgcttatatatatccttttgttggaacgcattcttgtaaaatgtgtattgtttagggtgaatgcagttttaatttatgtaaatatgtgtaatatgtcttttttcttttcagttagaaccatgtttttaagatccaa

SEQ ID NO: 43931 - DNA, 1065 bp, Homo sapiens
aaacttagactgcctctagaacttcattctcagcctaggagtcatttggaatatcaatccaagatcctaccctaccttcacagataaaactccaattaaacagatattatttctgacttataagtgacacctgctgagtctctcttctctctcctttgagcagatcaggtataatattctccattttacataagactagagaagatgaagaactatctcagtttgcacaaatggtaaatagcaggggagaagcctttcatcaagtaggaaaatatagaaatttctccttgaaaaaaatacttcacaaatggggaaacttggaaattctgttgtcatgttagtaattatcggggaggatttttgcacacaggttcaccagtgatttatcagttaagtcctgagtgtaactgaactttgctctgccccaggcctctgtcaataatagagtccagtaaggctctgaagataattaacagcttttccaaagtaattctttccctctcttaactaatttaggagttgtgaaattgaaggaaaggaaaattgttttggaaggatttcagataaatttatacaatttacatgaaacttcatattacaggtgttccatttcacagttaatggattatgaagaatgctgtgtgcagagtgttcagactgaggtgcagagattagcagatgtgtaagaagagaataactgcttaaagatgcggctcagatactgtaacccttagaatttcatggaaaactgattttcttgaaaaataatgcaaggtcaaagtccttttgtttatttattaggactctttgaacatgtctcatcggaattattggacttaccgtgttttaggaagtaacattctggagaaagctagggacacatggattaccttagccttcccactagactgtaatccccaagaggctggagagcacatccgtactgctaactgcatacctggcacagtgcctggcatacagtgttcaagtattattcaataatgtatgtggtagaatgattgacagataatttatgtggggaagatttgtgtttaaatgggagat

SEQ ID NO: 43932 - DNA, 1788 bp, Homo sapiens
aaagcttctccttcagacctccagtatctagtcatcgaagtaacttgggtttatttattgagacaaggtcttgctctctcacccaggctggagtgcagtgacacaatcacggttcactgcagcctcgacctcctgggctcaagcaatcctctggcttcaccttcccaagtgtctaggactacaggtacgtgtcaccatggctggctaatttttaaaatttttgtagagactgggtcttactatgttgcgtaggctgggcatggatttattaatggcttttgaattaactaaataattaatgaacatgggcttaatctctaagtatgcaaatctctaaatgggatatacttgtgatcttcaacttggccttggatatctgtgtgactgatttaacctttgactcagtcttttgcagtgccaaagtcattgttgatgaataatttcatttcttgtggatcctatggttgctactaactcttaggaaaatagtaggctctggagaaggagtaaaaaccctacaaatatgtaaagccaggaaggaaaaggagaagcaaggatgttaaatcaatctgagttggaggaacagatctctgtttttctctgaagcgttgtcacacaatctcatgtgctcactgcttcaggccaagggtgtgtcagcaaggctttcttgcactgcaccagggacactgacctgaaaccctggattttacctagatcatgagaggtcttagaaaccttttaggccaacctacttatttaacaagtaaggaacctgatggccagagtttaaaagactcatcccaggacatagtgcctacttagtcgtggtgatgtgatttagtcttggacattgagtgctcagtcactgtctcagtgacagcattattgtgcttgagccaaaaaggaagaaaaggaaatttgttcactcaagaacacatgagactttcgtcaatggcacatctacgttagcaatgcttgggatggtaattcaaagtcatttatatttttctgtttgtgtacaaagttccaatgtgcatgcattgttctcttcaggtttaggcatgtaagccaatgacattcaaaaatgtatcaataagttttggtatggagagtctcaaatcacagggtggcaggtttatccccaaatcacagccagcctcaatttcttatcaggcaaagtaagtcacactattcacaacagctctgtgttgattcaattaaacaatacgtaaacattcactgaacattgctggttggcccttagaccattttgttgtgccctttctggcttcttctcatctctccattcatacatatctatatctatatctatatatatatataatccctataaggcaaatgttactttctaatcaatacatttttccttgcaaaatgaaaactttaaaaaaaaatagaggaaggcactttgtaaaatgtgcacaaatctgtttctttcttgtctactctaaggagatagggaagttgctaaaggcagggccaagtctttctgcaaatgatgggcagtggtggacacttgaggaaagagaaagccagagtttccccagagctaaactgcaacttggaatgcagggacctctggttgctcaataactcataggcttttcacattcagctgggtcatcacaagacacagagcaaaactgcccagatcttgtacaggcagtaaaggattgaccccttcagaccaagccagttaaagtgagtcttttgtacttaagtgactaccaggattggtcttaggcacttaggaaaatgtagagtctg

SEQ ID NO: 43933 - DNA, 1196 bp, Homo sapiens
ggctttgagggtgactgtctttggttaatgtctctcaaggtagattatattccttggcctttcagaagttgtgcgtagttttgcaggtcattcttttatgtgaattcatataagattcagcataatgtgaatcttaaactactgatatgtttctttttttgcctgcttacatgcagtgttgttcattgcaagtcaaacagacttgatctgtcctttccaaaagaggattgttactatgaactaaaataacctttagtggaaatggttgtctagaacaatgcttctcaaacttcagtgtgcaattgaatcatttggggatcttagtaaaatgcagattctgatgcttaagattctgcaaatggaattttcaaacactgcccaggtgatgcctatgcagttggttctcagacagttaaagtatcgaggatttaggggactgaatgagcttggacaactttcccacacgcttcccttactcacatgatattgtttatatattagaaaaatggagcttcgtatctattgcttttgccattctcaaaacattggcaatgtgttcactttcaaacaggagggggacctctgagtccagttgctatcaatatgggatagttggggtggaatatttaactcccagaggtgagctcaagttctctatgtccagctagtaaatggacatatagaatggatttaccatcaagtgaagggaaaaatagagaggggctgctagatgagtcatggatgcgccctttaaaatgaggatccaagctttgacttctttcaggaagcctggcactggaattgaccgggagattctcattaccttactctgacctttggagctattcccattgctctgggaagcaaatacctagtttcccagaacttttatttggacacttctgatatgagccatttctgcctctgccaagattttgcaattgaatttacttcagagagacactaactcctggctttgcttaaaatttttttgtggcccaagatttctcacaaaagcaaaacctctctcttttaaacagctgttagaaatcgtcgccctccctttttatggtagctttaggaagattcacccattgatgaacaggagtcccagaggagcctgaaactcaaaggagaaataatttctggtctgtggagaatcctaaatccctaggttggtggtggtggtagcagtt

SEQ ID NO: 43934 - DNA, 441 bp, Homo sapiens
tggcacatgtatacatatgtaacaaacctgcacgttgtgcacatgtaccctagaacttaaagtataataataaaaaaaatttgccatcaattgcaaaaggactcatgttcacagtctatgccatcactccaccaagactgttaatggcccctctgggaaactgtggtgcaacagccgtggggctttccagaacatgatctgtgcatctgttggtgctgccaaggctgagggcaaggtcatctctgagctgaatgggaagctcaatggcatggccttccatgtccccaccatcgtgtcagtggtgacctgacctgccatctggataaacctgccaaatatgacatcaaaaaggtggtgaagcaggcatcggagggccccttcataggctgcagggttatacgagagttccgtgggcacttcttttatgattttgaaaaatat

SEQ ID NO: 43935 - DNA, 535 bp, Homo sapiens
gcagaaacagcaggttaggaggagacctcagtgaggagaaatgcgtgggaagaggattctctaggcagagctggccagaaagaggaatttagtggaatggcatgctgtgggacacaggctggagcccaggacaccaggctagtagtgtcagctgaaactcacctaccctcctgctcacaggccctgctaaaacccgtccttgccagcccgggtcagctctgccaatatttgtaacattgctcatcctctaggaacaatttattcaggataatgtgttgctgggagttacagcaagaatgcaagtttttgttttgctttgcttttgtcatgagtggggagaagtgtgtgaagtagaaagaaaagtttatttaaaaagtttaaagcctatggttccataatgagcacactcggaagccaattagggtgatcattgatttcttgagtatttagtttctcttgtgggtcattctgacctctgctttcccctttttctctctctgaaagcttctctttcttattttactgtttattaata

SEQ ID NO: 43936 - DNA, 1244 bp, Homo sapiens
aaaaagttctcttagtgttattgacgtgctcaatttactgtacaagcaactaaggtgatgggcaaattgtatcctttggattgaaatctcaatccagtttctaaatattgagggagtcttgttctctgctcagatttcctgcatccttaaggtattggccagatgagtcactgtggaactgtacaactcagaacccttactccacattcctctggcctaacaaagttgggaggatttacacaaaggtcaagggatcaaccacagcaaatgtggggttgaaacttaactggtctcaagacaggaggtggacctcaagtctgaaaagattccagaagctttgccaaatccaccctctctatcattcagaaacatcaccactgtagtgataggttttaagcactgtaatcaatttttttttttttactcattgggtacctatttctcatttctcccattttcttcttccctttactgtccctcctctgccagtgacagagtaactttactccttcccactttccctaaaagtgccaagcagtagggtgggagtgggcacaaggcatggattctgcaaacatgctttctctgctatccccttgaaggacctagtcctgaagcagagaaagagaagtgagcttgtggcacaaggatatctgtccagaatccaagaagccaggtgacttaccctgggcatgtcgcaagcctgtcaaagtttgaatgcttgcttccgaatgcagagggtgaagtcacagagcctgccagatttaccaagggtgcctgctggggtttgctcctggcaccgaatatcctcaactaccagtctgtgcagctctcatgagcaccaacctgtttgctgattacccgttggcaagctgactcttcagacagattaatatttgccctgggatatacaaggcttttatgacccctccccattgcaaagaaaacaaaaattgactaacttgcttttgatggtggttggatttgtttgatgtggcttgatttggtttacagctcatttgcggcagaatcaaaatggctcgattcaaggcagctgtggtttcagcaaagcaggaggaataaggagttgggaggggtggggcaaccatagcaagggcaagctacagggttgagtcatgagtccctttcacttaaagctgtagtctatgctgtcatccctgtgtcgccagcatctgctcacctggcttctttggaacatggcacacaggatgggacaagtgatt

SEQ ID NO: 43937 - DNA, 969 bp, Homo sapiens
tccttgaggctgatatagtaattgatggacctacaggcctaagtttgggtggaggctgaagatgacccaattaactggtagcatccccaagagaggaccctcaggctgtggctgagacccactccacaaagaagcctccccaaccagcgactgctgctcagatcatgcacctcagtatagtcgctgactgcagcagatctctgagaggatgagattcagcattttctccccacttgggtttgccaccctggatcagcaccatcccctgagggcatgccttggacatgcaattgcatgaggagaggtaagactggcaagcccaaggagtgatgcccatcctggttagagggaaaaccgcctctgatggctgtcctgacaaaggcagggcagtcctggagtattgtggcatggatgccgatggcaccattcctccagccagtccagcccttcaatctcttttacaatatctttcagcctccctcagattccccagcgacagggcagcatcctgggcagctccgttctacttcagccatttgctaacactgctgacacagttcatcatccttttgttgacacctcagtgccgctccgactgcaatgctgctggcaggaagattgagaaggcttgccccaggaagtctcccttttcctactccagcagtgctggccctgagccccagcagagtatcgcttagcaaagtcatcttccacttgccaaagtaaacaaatggagcactttataataacatgcccttgactctatggagcattgccccaattctgagtgaagctgcaaagctgagtgccttctgtggttcccatggcactggacaaaaggcaagcttctggggatgcctacagtagcctctgtttatttcattgactggatattggcatttccagtatcttctctttgcctctctctttcctcagatgtaagagtctgaaatcttgaccttagtttct

SEQ ID NO: 43938 - DNA, 1782 bp, Homo sapiens
ccacctcattaaacatttatatatatattatatatatttctataatatatatatataattaattaattccctaaactttgcagaaaaaaaatcgaagcccagagagggtaagtatcttgcccaagtttgcacagctgatggtcaggattgggattagcagcacttccctggtcaagtgaagcacgatttcaggtgggaaatcttgcccggtcaacttgacaaatgaagacaaagtgatccctccagactaataataatgttttgcaaccattttcaagtccagtcatagaatcccctacgttgcttgttttcagggcagtgtgggttgcttccccaggatacaggtagaggtcactaaaaggatagttttctactcaaagagccagaactccagcccttgccttcccctgccgtagcactcgggccggccctccagttacctgagtttgcctgactttaaccaactcctcttcccttccctcctcccttctccagcgggctctccttccagcttcctcccgggctgcaattcctctgcctaggtgcctccgtccagctccggcttctggcccggaggctgctcatctgcccctacccccgctgacttttgggaggagcaacacctttcaggtcagcattgctaaccctaaactttccccgccggatgcccgcgaggctgctgcggcggcggctgctgctgatgggagagtctcgagtccggctttcatcacatcacctgtctgcgccccttccccctccccgctctttttttcttttctttttattttgacgcaaataatttgcattctgagaatcccacaatcaacgccgaaactcatgctcaaggatacaggtgaagatgcctttgacaaaggcgaatgcgagccgagtgcagtttgtaaaagctggggttgggggcagtggtggaggcaaagcaccttaagagtattttttagcccctctgagaagggacatccgggcgggaggcgggcggatcccgggcttccccgccggctgccgactctggctcctggctggcgttctctccaggagcccgcgccggtggccccgctctccccttcagcacgcgggcctcgaacccgcatcccggagagcggccgcccgcgcagcccctgccgcgcgccgtcggaggcggcctcagctcgccatgggtactcacttttgccagggagcaaagtctgccacatcagtcgatgagtacttcctgcacgaggacatgaagctccattgtgtggaaagctgtttcgcgaacggtcggtaaaatccagaaagagggagaaggagtgagtaaggcagaaagcccagcccagaaaaccggcgtctggggatttcagcctccgctccccggtccccagcccggtggctctgtgagaagaagctcaactcggtgcacttgttcactctttcttcatgagaggaggagtcagtgttgcaacatttatgttccttgctggaggcaaaacagtgattttcttcagcatgcaaaacgtccagagcctgccagttttagaaggcgacggaggtagttgggggagctggaatcctgcgaagacctgaagaaacaactgattccccccagatcggttttgcatgattagggccacatatctttcattgagactgtaccagaaaatagacagacaaaacaataataaaaatgacttagtgagttgaatgacctcaaagatgatatttttccaggcagccaagatgtggagtgtctccgtgtcaaatttctttccttatttctgagtaacattg

SEQ ID NO: 43939 - DNA, 718 bp, Homo sapiens
ctggactcatcttcaccagtcttgcctacatcaaactcaaatgctttcatggtaaacttgattacattagtccctgaattaaaaatttttaatggcatctacttcccacagaataaagttagaacatctttactcctgctgatttcattgggctttagagtagtagtagctcaatacatatctacagtgtgtttgaatccatcctctcttcttggaatgttatttcccacccttcatctaaaaaccttacccattcttgatcttcagactccatggtactttcttcttaaagctttgcctgatcactccaactctgaaagaaagcactgtgcttgcttctgtcatgtagcacttgcaaatgggtttataatacatctgctttgttctacctccaaaggtcattgtgaggctgatatgagttgacatttggttaattataaaccatgtgtaaatataaggcactgctattattagacaatgtgtccttccttctaaggaaacccacgctggtggataagcagtgacctaagtaaaatcagcttttatgagcatgggaatgggaatcatttgctccatgggaagatgctaagagagctggcctattgactgataagaattcatgtctcccaaacccaaagagggaaaactgagtctgctgaatcaaatgcagcagttgttagtctctataatagctgcatagatgtcttcgggctactgt

SEQ ID NO: 43940 - DNA, 1028 bp, Homo sapiens
atctctaaactgatgattattaaaataataaattttctgtctgagtggagttcctttatcttttcccaacttctgtgggtcctcagacaactatctttcaatcatcagtagtcaatagcatgcaggtttttttctttgtattacatgtcttcagaggacagggtaattgaatccttactaaaaaaaatttggggcaaaagtcatatgcagtctagccaagtcatgatactaaaacattaactttgactccagtgactgctattgaccacacattaaaggtaaagtttgggtcagctatctttgagctaatggagatgcaaaggagtgtcaaactgaagtcattatctttcatctacattttgctttcttcttgcagaaggaatcaaaatgcgtttcatgggccccgcaaacattcagttgatgtccaggccataagactgcagttctgttagcttacgttggctttcacaatcgaaaacagggttgcaaaatgatagtaaacaatgttctcactgaagatccattttatcggtctttcctgatcccactggaatgtaatcattttgatgccagcctaaccaaaacaaagtagcagacatgccctgcaataagcctcagctgagcagctggagacgtgataaacacctggcttcagaagttaataaaaagcttgtatcagcagctttactgatctttgttaacaagggtatgtgtggctttgcatcatcatgtcagtgttctaaacaaacaaggatatgggcaaatccagaagtcacatgcaaaacgcagactccttgtgcatctaccccaaagatttatgatttttttaaagctagaaactcatattattcgaggaagcgaaactttttaaagcaaatatcaagtgccttatttgctttggactccagagacagaaagagaaacaattaaaatcaaataaaagtatcaagtaatgactctcaaattgttgcaataagcaggtgacttcagtacatattagccaagcaattattgggtctcagtaacat

SEQ ID NO: 43941 - DNA, 1706 bp, Homo sapiens
tgtgagggagttctcatgagatctgatggttcagaattggcagtttccactgtactctctctcctgccatcatttaagacttgccttgcttcccctttgccttccgccatgattgtaaatttcctgagtcttcccagccatgttgaactgtgagtcaatcaaacctcctttctttatacattacccagcctcaggtagtatctttatagcagtgtgaaaatggactaatacaaactccaacccatgagagaagctgcaagggctgaaccctggaaagtcacagggcagggctgcctaaagccataggagcacacctcttgcagcagtgtgctctgatgcgggacatggagtcaaaggacactattttgaagctttaagatttagtgacttccctgttgggtttttgaactggcataggccctgtaactcctttcttttaaccaatttctcccttttgggatgagaatgtttaccaatgcctgtaccctaattgtatcttggacatatataacttgttttttattttacatgctcataggtgaaagagacttgccttgtctcagatgaaactttggactttgaacttttgagtgatgctgaaatgagttgaacttttgagtgactattggcaggggatgattgtcttacgcaatgtgagaaggacatgagatttatggggccagggaaggaaaaatatagtccgaatagatgtccccaccaaacctcatgttgaattgtaatcaccagtgttggaagtggggcctgatgggaggtgtttttctcatgggggtagatccttcatagcctggtgctgtctttgtgatagtcagtgagttctcatgagatcttgttgttaaagtgtgtggcacctccttccccactctctctcttgctcctgctcccactatgttagatgcctgcttccccttcacattctgccgtgattttaagcttcctgaggcctccccagaagcatatgcgggtgtcatgcttcctatacagcctgaagaatcatgagccaattaaaccaccttccttataaactacacaatctcaggtatttctttacagtaatgcaagaacagcctaatacagaatcaaaatgaagcagcacttgtaatctgaagggctttcttttcctatcataaattgtcaccttgatatagcacaaataccgaagaagcaagccttaattgacatcatggcaagaggccaagccagagcttgtacatgcagagcaaggcacttaacaactgccagactgaggttgttggtacttgtacaagtctaaaaggttagctcaggatttccaagcacagagggttgtaactcataaaaacttaaggctcatgtgaaatggtgtaaaccacagcattcactacaacaaaatttagttagttaaatttactctactttgtttttctgaggaaattatctaatgaatttcatatgcatgtatttaattgggatagtttaaagataatttaaaaactctaaatgctggtgagttttccttggggaaatataatcaaagttatgcctcaatgagagttgtaattagtattacttcctaaacaagcagtaattttagttacaaaggttgaacagcattttataaagaaaagtaaaggtaaataataacccagatccatgcaagccacttattagcaaagatacccatgagaaatgcttaatgtctatgaaat

SEQ ID NO: 43942 - DNA, 1524 bp, Homo sapiens
aatttcatgttttaggaaaaaaaaaagcctccaaatagaggcaggcttaagttcatggcttagaagtaccttagcaccaaaagctcaagtactgagtggtccctgccaaagttttagaaagagccatacagaggtacaacccacttcatagccatacttgatggctactgtcagctttatacaatctctgcgtgtttaaatctattctattaaaattaaatttgaggagaaaggactctccaccaccctcctttcagttctattctttctttcctattcatcactcctttctttcctattcattactgtatccttaacgctcagcaaagtgagtagcatatggtaatgattcaaatatttgttgaatgaacaagggaaaagtgaaaatgaaaatgaaactacacagatactatgcaaccaggaagctgaattccttcaccaacaccagcaagttcaaccaatgctctacacaaaggaaacttttattctcctctcacattctgtccttctgtcaagactcagaatgtcttgtttgtgccgatctcatagggtatattatcgaggctagagcggggagggaagttctatgcagagaacagggactttggggaaagaatctgggaatttcagaagtaaaagcttctctgtgaaagatcaggcagttgtccctgaacaatgaatgtacacagggctgattacaaaagtgacacttaagaaaaaaaaaaaaagactctcttaacagtgtggtgacaaatcctcaaaataagagctttgtttatttaagggcctgggaaacactgaaaatattgagtttttagctaatgatgaactgcaaatgcaaagcattgtgaattactctactgtcaatcttaggttaattttatactgctgcagtacttgctaagttaactagagcagtggttattaatctacctgcacattaaaaatctctgaaatgctttcagcaattctggtaatcagatcatacttcagaccaattaaaacccactatccagtcagtgagattcagacatttgtatttattaaagctcccagataactctaatgtgtagctggtaatgagaatcacagttctataggcaaaggcctaattcagatatcttcctagattaaatgggagtaagctatatgtccaaagaagacacgattattagaatgaatggcccttggaaggtttacgctggccttgctcttggctatttcagattcttccaccatgccaacaaggcctactttcctttaaatgtttctttctatgtttcaaagcaaattcaaatactttctttgcactcttcatgagacagttttccaaaaatacattcctcttgtttacttaaatggttcctttaatttcaccttcactatagaatctactagaaaatctggaggagggatggttatgtttcttttttttttttttaactttaaagcaaagaattttaatttgaaagttgagaaaatatagcagagaaaactagtcatttggaatgttatgagagaatt

SEQ ID NO: 43943 - DNA, 1149 bp, Homo sapiens
actgtaaactccgcctcctgggttgatccttccacgtcagcatcctgagctggtgggaccacaggcgcacgccaccacggccgcctaatttcttacagaaaaaaaaacggtttctgctaccttgcccaggctggtcttgaactcccaggctcagtcgagcgccaccccctccacaaagtggtaggattatttgcgtgagccacggagccctgcggagactctggttttactttctgctcacctaagaagctcctgctgtgtccctaagtgttcccgcctcgcctctccccacacccactgctccctaacttctctcacaggcccccaacggcttcctcctgcgctggcgcacgctcaggtcttacccgccagcaggtggcgaaacacgattttctgtcctctgcggctgagccctagcgtcccctcttctctaaggcctttcgcctagttccagcctggatacgcttccatagcaaagggttgcccttggctacaggaggacgcgggctggcaggcttggttcctggcgagtttctaagcccccgcctgcggtctgaggcaccggctgaaccatgtcggagatcctgtgccagtggctcaacaaggagttgaaggtgtcccggaccgtgagtgagtgaccacggccaggggcgagcgtctgaggggctagcggggcgcagagcctgcagcgcagcgcagcgcactcagggaaggtggcgggcagggcgcgagctgcacaggtggggcacctgcgtagccggcagcatcccacagtgagcaactcggctcggcggtgccccaggtccgtcccgccacctccctacagctcaccccagccagggcaaggccttgtcacgtccccactctgccgctctcgagttacccttgtcacggtgggcccaacccgcaggcattctgactttgtgatgtggttctaggcaatcagagggtttaggaaggtctcctttgcttctgtggagagggaactttgctggactttgtagtctgaccccaacgatgcctccttcacatcaccagaagcagaagcatggtgtggtggctagtcgatgaaatatgaagccactggacaagttacaataccttctctgaatgtgtttccttctctataaaatggacctaataatgctt

SEQ ID NO: 43944 - DNA, 788 bp, Homo sapiens
actaacagtcaaaactgattataacctaaatattgatttatgtaattaaaacattgccaatctcaaacccatgccccattcatttggtcaataaatacttattgagcatctattatggtcctagcaccattaaagaggctagggattcagcagtgaacaaaataaatctgtgaccacagagtgtttgtatccttgtgtccaggagacacagaataagcaataaacaaataagcatatagtgaatgtgtccttagtcataagagctatgtagagagcaagaaagcaaagcaaggggaaaagaacgttggatgtaccattttgtaaacagtggctgtggaaaatctcactgagaaggcgacatttgaacagactgacaacagaagtgattgggtaagccatgtaaatatttggagaaagggtgtatgaagcacatatgaaagcaagagcgatggcactgaagggggaggacacttggtgtgtttgaagaacagcaaggaggctggtatgtctggagcagagtgagctaggcaacagttggctgatgatatggtcagagagattgttgggtaaccagattacctaagtccttggaggttattatgagaatatagctattgatctgagtgagacaggaagcattgctatctggttttaaaagagtctgcagtagagtaaaaacagcaggaagacacgttggaaccagatgggaaacttttgcaatagaagcaaggcgtcattgtggcttgggtgatagggtggttgctgaagggtttaacccaataggtatt

SEQ ID NO: 43945 - DNA, 1626 bp, Homo sapiens
tctcagaatatcaaaatgggcactaaattagatgatccgtggttccttccagctctaagagccctgattctccgtgatctaaaaggaatcctttagcgcccactacggattaaaataaagtcttggggaagatcgatcctgggatcgagctcatatataattctctttcatcttctacttcctttgaaataaaaataaaataaaactgaggcccaaaatgcagaattaacagtcccatgaatcccttaaaaacggtcagcggcacaggtaaaaggaaggaggctccaaaagatccgaatgacctgggttctctcctcagacctgggcagttctccaggtttcccctggagaaaaacactccgctggcattgcagtcatgaaatacctgcctgcgccaccctggctccatatgcagcttcacaacatttgcagtgctgccctcaggagtgcctttccctggtctccaagaggctggaaacggtcaccaccgtttctgctggaagctactgtgcacctcccggccccatggagcttagggtgagcctctgaaagtcccactgcgctctagagaaggcagcccaggaactcaagctctggtcctggtctcaaatttctggccccagtcctgcgggacggggagcgcgtcctgaacaagaagagagaagaaaggagagtgtcttttctcaaaaactgtcttcctcacctcagcaatagaggcccctctctgccccacggctagatgggcttctccctcctccagccaggtccgcaagcccagcctggaaaatcgcctggataactctgatcaatcgccgttcgctggagccctggcagtgcggggatccgggacgcgcctgtctgggaattctccggccaagcactcacccagtgtagatattgtcaggattttggcagcctctgagagcaggaccccagaaagaaggaaggccactagaagcagcacccgctgcccaaccatgctcacttccacagaagcagcggatctcagcctgggctgcgcgccctgcgccgggctaaggactctgtgcgcgcctcagtactccaaaggcactggctgtgggcctaggaagaggtaggagacggatcctgccaattctctcgcccttctgttcgttctctttcccgctgcccctcctccctgggtgcatgctccatgggataatctgccctcaccctatcaaactacctgaagtcagtaggagggggttggtaacctgatctgtaacctttctctgcctgcgtaatcacagctgtcctatctggaaaatccttactaagagccaggaatgacaggggcctcagtaaatcacgttaatgaaggctccatccccaaggaaaccacctgtctttcgtggagctgtctgaacttatgttactctgcttcccttccagctgcctctattacctcatagtgccatctccatgcccccattttccccagaaacctgctgaaaatctctagctggtgtcccaagctcaagatgtccctgagagggaatccctaagggaaactgatctaccctctctgagggcctctttagaagataacattcatgaagaggagctagtagtgttctaattctgaaagtcactccgggtctgtac

SEQ ID NO: 43946 - DNA, 1224 bp, Homo sapiens
ggcgcctgtattcccagctactcgggaggctgaggcaggagaatggcatgaatccaggaggcggagcttgcagtgagccgagatcacaccactgcactccagcctgggccacagagagagactccatctcaaaaaaaaaaaaaaaaatgtacaataagtgtcagagctgttaggagttattctaaaaccaaaacgtttggcaattataaaaatcccaggtcactcaaaactagactccacagaatcagggtaaccaattggctgatgccacagctgaaagagcagcattcaagccaccagcaccaatccaggaaatgcccataaaacctgaaacacttaaaaacatgttgaaagaaactgagagcacagctccatcaaaggagaaatccacttggaaacaagcaggggaatacttgactcccgaaactaaaatatagtgtggacctaataataaatccattattccaatggcatatcaggtgcccttatggaatatattcataatcaaacccattggaatccagataaaatgaaaccctggtgtaaaaaaatattactggaaaccgtccttcatggtggcaaatagtttactcttgatgtgacatttgtcccaaatataacccaggaaattccctccatggggccaagggtcattttccttttccagctggaccttttaaggtattgattgattttatccagctgccatcatctcaaaattacaagtatgttttagtaatggtctgcatgtttttccattgggttgaagcttttccctgcaggcaagtaacagctatggcagctggaaaaaatctactagaaaaaaattatgccattgtggggagtcccctgtgaacttcacagtgacagaggaactcattttactggccaggttattcaaaatatttgtaaaattcagcccatatgttaacatttccattgtgtctaccatccctggtcctcaggcctggtggagaggcccaatggaataattaaaacatatctaagttcacgaaggcatttcacctcccctggcccaaagcactccccctagtgctgcttacaccccaatccaccactttcggtaaacattaactgtccccttatgaaattagaacaggaaggccatgtgtatggaaatgaagataaccaatccaacttttctcaagggagatatattgcaatattgtgagggactcatttatcatctcttcaaaaagccaa

SEQ ID NO: 43947 - DNA, 1363 bp, Homo sapiens
actttataaatcttcatttttatgaggcttagaattcatcccccttccctcttccactgttttcccggggtcacagttgtagtatagtttgcccaatggatttcgcatggtcattgtacctggaatatgtcacgctccctactcttactgcccccaaactcttctcagcagagataggctgaaagcagctcgcttttaggcggcgacgcaaacacacgtagccagctgagcgacagcaagcaaccaaatggctttgctggaggccccctgcgtgcacgggtaaagctcgttgcaaaatacagtcctttcatttattcccatgttgctatttatgagacctgtcaaggctgcaagggcatgcgcagccttcccaccacacaggacccgctggggtctccggctcccctaaaattaaaccattgtctctcgttccaacggcgtgtttagctgttgtgcgttattttacagataaaggaaggatcccgtccacagacccaattcttagggccgccttctccccgacggaggaagaagcttcctggcaaaaggacgaacaggtgcgacgccagcagttcgcagcctctcacctggccggcgggctgggctactgtcaccactcagcagccaaggacttgggccccgcagcggcggccactcggggtctgccgggtcccctctctttccgcctgctctcggccccggaccccagactcaaaagcgcctcacgcgttccgccttaggctcaccgtccgatctcgccagacagcgtctggacgggaccgggaaacggcggccgccacagctgtccaggttctgggatccacgctcagagacgacagcgctggcgatcaccagaaggcctgcgggctcccgagaaaggaaaatccgtctacagtccagcggctgacatttcccagtcagccgtagcgccgcccgcttccgcctccccgcctaccccgtgggccgaccagtcccgctcccgcggggggttgtgggtatctcgaaggcgggtaaagctgcaagggaaggaagtaagggcgagcccgtcggactacgaagcgggacggaaactacaattcccagcaggccttgggcctcagtgcggccgcgaagcagagcgggctgtagagccttgcgcgcgcagtggggatggaacgttgctaggcttagcgggtctggctgctgggggcccgagcagcacgctcggagccgccgcgcgccaaagcgggaatctgggaggcgagcagctctgcagttaatgcacgtattttaaactcccgggcctgcggacgctatgcacaggtaaacggattgcaaaaaggggaagagcatgaaatggaccctcttaataattcttttaggc

SEQ ID NO: 43948 - DNA, 1881 bp, Homo sapiens
cccccttatatataacacccgggtgtgttctgagagtctgttcttaatttctttcctcaccaaatctctttcccaatgctgttgcaagaacatgtcctcctctgccatctgccattcctccttttcttactccacctacagtttcttcccttaaatattctccagtgcagaatggctcacaatttggctaatttggatataccagaaccagaattctcatagtaattacaacgtttcccaagtttcacatgagggattcaaagttggagctggattgctgtcatcgtaagtgattaagtataagtatctgtgtatactgtgatcttacttcgacagtgtttctacattccagaaagcagtttacttaatgacagcaatttgttctttctgattttctttggttatatacctttagatcttattgtccccttgtgaacaagcatatttatttcccttggataatgcttttattttataaattagccttcatcttgtactcagctaacgtatattaaacatttgtggggtttaagacaccttgtagaatgtagaataaatacatttaggggagtagtgggaagactggaagagcaggttaaacacggaaggtcttcagactagctgaacagcctgggttctgtaaacacaagggaagcatcaaaggttttggagcagatgaatgactaacatgagctaggctttaggaggatgccttggaaattggtatatagaataggctagaaggaagaaagacagttataaggaaagtttggggctttttaaaaataattattgacaatgtgaaaatataaaggatgtttctgactttaggtaattgatgtgctcattgatctgtagtaggattttgttgaaattccaaaataaatgttccctttcctgagactttgtactgtatgtcccaaccttgagcaaacagagatgagagagatgaatttctaggcacatagatctgagttaagaaggaaaaaatcattaccaacaccaaacagtatttactttggaaaaacagaatttgtgaaacagaatttgagaaacagaatttgtgaaacagaatttcactgttaacagggttgaatttcatctaatgtgaaatacctaaagggactggcttatctatgcagaaaaaaaatggtaatacgtagggaggtaagatggctattacctcctataaagggtgtgatttttcacccattgtctctacctgtacccaactgtataaccctatctaaaatatcttagggaagtcagtggtagttttcatcacacataatggacttgttgactatgaaccattattaagaagttcatcagtcctgacagcatctccctttaagagatgagcctagttcaaataaaggtcaagttcatatccttaatttgcatgtaacctgtggtggttccaactggtgccgcagtaaaacatttgcttttaccatcactcacttgctagtttcttctcataacacagtaaccccattcagatcactgtataaatcacaactggagaaaggaagcaaatatggttggattcttaaataaatctgagtttctaaggttattaggaacctcattcaataaaatgcagcagtgtgtttcctaatgacatgttgctcaagctatatggtctgtgctttccagtttaatttgctattttctcaaatcatttattgtaaattacactttcagactgcattttgtagatgacacaaattgtaaaatttgggtcatataactctagtcaaacagtttccatagatactgctattctgaaagtctttttcttcctttccagtgaacttggagaaattcccacactaaaaacactacaagtttttggaatcgtgccagatggtacccttc

SEQ ID NO: 43949 - DNA, 354 bp, Homo sapiens
agaagtcaaggcaggactactagacccaaatgatgaatgaaacagaaacttggcctacctacataacaccaccaggacacctcttgcatattacaggccttagatgggccaaaatattacattactaaaagtatttcacaaaacttgataagcaacatcccaagttactcaccaggcctttgatcctgttccagtacacaaattgagccctgaactcttctgtttttcccatggaccatcatcaactgaaatctcatagtaggaagccctgtgaattgagaatataaaactgtttgctgagcttatggttcaaggtaaataagagagtcttcttcagaactaaggaaatcttaa

SEQ ID NO: 43950 - DNA, 669 bp, Homo sapiens
ttctgaatcatatagtcaccaggatctcaaaatcttatgttttacagcttaagttttttattttttttatgactttttttttttttttgagatggagtctcgctctgttgcccaggctggagtgcagtggtgtgatctcggctcactgcaagctccgcctccctggttcatgccattctcctgcctcagccttgatgactttttaacacactgcatatggctacttgatgaccaaagataaactaatacttgtagaggcggttagatgacctttgttccacttggatttgcttctctcttgttctcagatttataaactctatttggaatttaccttacgaaatctaaacaaagggctgactagctcccttagaaaggataacttatatatacatatatccttcaaaaattatttttcctagttggagtaacattttataactatcttaccattaaaatttttttaactatgtttcttatgaataatccataaagtaaaatgtagagaaaaaagttcagaaatatccttagtgaacacccatttaatcaccaagtaggaaatttgtccactagagtgaatgctagaattcaaaagtgtgttatttgtactttctttgctcctccgaattcctttatacctttcctttccctttttcttttctttttttt

SEQ ID NO: 43951 - DNA, 1085 bp, Homo sapiens
tataacaaataatacttatcatcttatcactcctattacagaatcccattttaggacagcttcacacagcccagtattctttggcctgttaataatctctcatctggtctacaactaatgctattgcattctgagtatgggcctttatataaactataacacaaattcaaatcagtaaggaacttatccaataaaactgtaatgacaacaccaccaacaaaaactattccactgcctggcaattacaaaactgtgtattctacagcccacgagttttacttcaaagctggcttatcccaaacagcattacctagcaatagacaaatatttacctattagagatttctccactcagaacgggtacacttaggtagtttgactttttaagacttattgattttccctacattttaaaagtttttttattaagtggtaatctagttcagaggtccaagagttaatcctaactgagatgccacccattttcttgaggccttgaaaacgttatccacagtttcaaaatgccagtactgtaaagggccttggaggctatctggtactacctctgcaattcacatactgaattaggtgaagcactttgaaaactgacactactatacaaaaagtatcatttccacctatgaggcccagagaagaacacacataggaagttaaccacacagaaccagggcctagaactgagctcttcactcttaatcccacactctgaacatgccaagtgagctattttaaattgttgtgggaagcttcgataaaactgtatgcacatatttatgcatacatggcatttgacaaatcctacaagctagactttgcaaaattagtacaacccaaagggcacaccactttccccaaatagtaacactgtgctttcttagaacattactagtccctatctcacctctagtttcactccctaatacaaactcaactactctaacctcctgttcaaaccctttattctttaaatgatgcaagtgtattctataaacagtcattttcaaacacttaggaaaaagaaaacaaatctacacatctagactcccatcaggtgaatgcaggag

SEQ ID NO: 43952 - DNA, 3532 bp, Homo sapiens
ggacatactgctcatggtagcaccgggcactctccttttcctaaagttggtggatggtggtatgggatcagaaactgtttttaaagttggtggggggggatgacaacaggaagattcaaactctggtttttcccttggatttgtatctttgcagatatattaataaacatatcaaatatggtatattgtggagatactgctgcacaagagtcgcaggcttttttatttcacacactacccagtataccagccccttgtcctgacatttctccttaataacgtacatatacaagtcaaattttctcccttttccttcttagcaccaaagacctgtgcttttaaaacaagctcgtagtgtccaacgaccacgttccagcaaggaaaaggctcacgctgaaggactttccggagtgccctaggcctcgcagtcctgcagagtaaaagggggtgtgtccgcggttgtttcggcccttttcccccggcagccctcagcggcgccctgggccccctttctcgcggcggccaggggagctgttcgcagggcgtccagacctcaggccactggctcactttcttggagtgggtcccaaccagggaacgagggcgggggcggcgagggcaccaacgaatcctcaaacccctcactctgaggccactcggcagcccctcttcgccctccccgcggcgcccctgcctcctaagtccctgcatgaaccactgtccctctctctccccctctccccggccctgcctctccctcgcacacacgcccaaaggcaaaggaggcccagggagaagccagaggacctgggggccgcgagagaggcaggaccggcatctgcggtgccctgggaagagtcgtcccgagaggtccccccgagggggcgcagccgccaccagagccccggccgagcccgggagcgaagcggggccgagccaggacccaccagctgcttcaggtcctcctccgagagctccgcgtaacggtaccgctgctgctcgaactcgtaccgggtggttttggccaccaccaccacccgggaggggcggaagccgccgtccgcgcggctgccacagcccgccagctcgcgcggctgcccctgccccaggtgccgccggccgccaccgtcaccgcccagccggggccgcgcggcggggcctcccgcacccggtccccgcagcgccgccgcccggccgcccgccacgcgacaacagctgcccagcaagaagcctcggtagcaagtcatcgtgggccgggccgcggccgcgggcttgggctcgggccccttgcctcagctccctaccgccgggagtgcgcgccgtccgcgccgcccgggcctctaacttcgcgccggacgggcagaggttaagtgccaggacgtgcgtggcccacgcggctagggggacgtacccaggcgttgacgaaggcggggaaagcgtggcgattgggaaacgggagaccccacgcgggagaaaggtgggcggggaagaaatggaggccccagctagtgggttttgtttgtttgtttattcgtttcactcacgcctgcataatggctgcttcgccgcccgggggcgacctccccgcaccacacgcttccccgaggtcgctcttctcccgcccccaggctaactctatcggccaatcagagcccgcggcggctccggatccgaggggccgcgccattggctgcggcctgagaaagaggtagaattctgttaggcgattgcgtcgccctgaggaatccagctggatccggtctgaggcggcgcggggccagcgggtggggttttgagcggctggcgggaaggcaggttcctggcatatgctcgcttgggttctgttctgcaggccgaccacgtgcccattggtttatttgaccagggtcggtgtgatagctggtgtgtctggggccgggctgggggctgaggaggcggacccggctcctgctgcaccgtgtgcgtggcttggcacgaaatcctctcggcgtgggacccagtgcccgccccgctgccccctgcccccccgaagagccctacctataggacaaagtccaaatgaattagttctttgaaagcttttaactggaaaggagtgagttaaagcaatgtttgatgactattgatctggctttggaatcttgggtagcttgggaggcaagaagaggaggaagggatgctgttgggataatgacccgtggagtgatcaggacctgggctggggtgtgacgagaacagaaggaaacgtcccattgtaaggggagaaccacatggcagtgcacatcctgctgttcaattccgcagctccttagatccccttcccctggcactgtgtttgctcctttgtagtcctggcgctacgtcgcttctggactttgggcaggttacctcatctttctgggcctcagattcctcatctgtaaaaagggggttagggtgaccccaaggttctaccaagtccaaatcgattcagtgaatctatgactctcctcacgggcccaccagcaccagcgttcattcgtgggttcccgcggtgtgcctgctgtgtgccaggtagtgtattggactgggagcatacacaatgaagcccgataggtgtttacttggtaaagttctaccactgacccgttctcaccaagaactttccctcacagcagctgctaatagtgacgtgtagtgtaacaaccttaataacctgagcttctagaggtaacatctataactatcctcagactcctttgtagtcttactattttaaacttcattagcattaggaaggaaaaaaaaaagggagaaatcacagatgacgcttaggtttgaggccagggtgaacaggggaatgttaattgatccattcgatagagaaaaaaaaatgcgtagggagaaactgtttgggatcaaagtctgagttttgttgctcatatttgaaatctcggacctcatttcttcccatttcacagataaaaacccagatttttgactctcatttcagctgcaaacatatacattgacatctcagttggaatagccctttgtccatagttattttgcgtctcatcttccacctcctcaaaaatagtgtttctgaaggcatcctctcacaggtatcttgaattttccctcccaaatgagtttgcctcttcagtatttaaatatgctcatgtctatgacatctttaaaatttttctaaaaaaacaaaacaacctctaagcctttgtttttacatattgcctgccttacctttacagctgattctcgaaagagtagtctgttcatcattgccacatccctgcctcctagtcattcctcaacctgttgtacactagcttctccccactactttgctaattactgctgtttccaaggtgaccaaaagatcttgttggaactcaaaagacttttttcagttctttaattgattgatctttccaaagaatttgaaatggttatcatttcttcttgaaatcttttactgtctcccaacataccagtccctaacagtgtttctcccatctctatgtccctttttgac

SEQ ID NO: 43953 - DNA, 896 bp, Homo sapiens
attttcttatcttagatatggcaatagagagaaactcattcattctagggtatacataagtgataacagctttaaatatcaacgctccagaattcttaagaaatactatgtggtagttaagagcttgggctctgaagttagtttagataggcatgtgttcaaatataagttacatcactaattgactaactactttgggaaacaatgtatctttaccttagtttcctcatctgaaaaaaaaaaatcaagattaaagcagtacttacctcatagagtttatgtgaagattaaatgagacttttagatataattttttaaattttaacaaaaacaaaaaagccttaaagaaaggttacctggcattccaccaatccccattctaaaactcatagctatcattgctaaatgatgacaacacattctggatgagaccaagtaagacctcagaacttttctcagtatagcaaccattaccaacatattgtcttggcatacactgaggtaatttgccatccctgagctgaataaataaagctgtagctgacaaatttcaagaaactaccagacatatacaacttttaaatgccagaaagggattccccatttctccacaatcttatctcataagagtttcataatgtctgcaaacaccctttgtgaatttcctagagccatgtgaatttggatacctcttttcagtccagtgaaataaactgttttgtgtttagtggggtttttttgtttgtttttgtttttttgtgagacagagtcttgctcttgttgccgaggctcgagtgtaatggccaatggctcaatcttggctcactacaacctccacctcccggattgaagcgattctcctgcctcagcctcccgaatagctgagattacaggca

SEQ ID NO: 43954 - DNA, 908 bp, Homo sapiens
acaatcagatatattatagatgagaatgttgagtttcaggatctcacagtggcttatgtatggtgtatattgtaaagcctccacaaaggtaggctttcgtggctattcagagccatgttattaccccaatgtactatagtgtttagctcatagagtttcccaggtggcactgttggctggattcccataactgccatctgtaaaaacataggaaacacaaataatggtagagatagtttcacttgaatacttgctcctgtccgtggattcaagagactacactggcatagcaccaaactgcttacttatcaaagctgctctctatcctgaaattgctacaattgatctttaacccattgaacaccaacatttgggtcatgtttatcataaatattgcctcactacataaacattgcgttggcagttcagactaatttgggcccttttgctgctgagccttagatttggctgcctcagggctccctctggaggtcggcagagtccaaggtcagttaatattaaaatagccttggccttggcacaagataaacccatgtcttttcatccagtgcccacaagaatggggtcctgtatttgtgagcttagaagatgattgtctgtatctgaggttggaggaaagttacctgattatcctcctgtaagtgaaatgtgattactgctatgtgctggtatttaactttctgaagttttacatttttctatctttattgaagtgttttagctacagtgaaaacaaaacgaaataaaaccataggtcagaaaaatgccagattttattttatttgtttgttttagtgacaaggaaacctagagtaaggtggttctggttctataatgaccaccctctgggtaggaacagatgatcccacagagtctgaattccatct

SEQ ID NO: 43955 - DNA, 928 bp, Homo sapiens
tgatgaatgttaccaggactgggtccttcccttaaaggcagcaggttcccttctggcccaagggtgtgtctaggaaagtcatccaggaactagggcttggaatgggggcctcacaactctgagggctgtcctgtccctgtcctgctgggactgaggtggtatccaggaggcaagactatgcgcttcccactctaccctctccactcctaaaggggagggagagatctcttttggaccatgaactgtgaagcctggggttaggttaggaaagggttgatgccagcactcccttagctaccccagctggtgtctcaataggtcacatgtcctctgcacccaaacaagtcctctggctttgggcccagttcagcactgggacttgcctaggagttacagtgcttgtgtcctagactgccttttgagtttatttagagccccatagcacttcaacctgcagtggcaagcctctcgggaactcaaattctgaccattgggatcagtggttcccctctggctagggctggtttaaatactccctctgtaggcaggtgtcagctgagtgcggtccggttttcctttctgctataacaggaaagcacactgagttcaatgcctcacaattgctggctctccctctctccaaagcacagaaatgctctttgcaccacaccatcactgccaggggatggaggaggggttgcactggtgattcaagactgtcctacttcttcagtgcctccttcagtgatatgaagccaaaaccagaccaggtattgagtgctcacctgatttttggttcttataaaggtgcttttttgtgtgtagatagttgttaaattggtgttgcagggaggcacaattggtggagtcttctcttccaccgtctagctctgcctcccagcagcaacatgttgatccatgtggggct

SEQ ID NO: 43956 - DNA, 735 bp, Homo sapiens
ctgctaataaaaaaaaaaacccccactatagtttaactggcctctcaactaggattctatgttttaagattcctctgtgtatctagagtgctccagttgtggctcataactgtttaaattacccatttctgtacaacaaatctccccaaaacttagtggcttaaaacaataataatctattatttctcatgattttgtgagttgaataaatagttctagttttgtgggggtcagttctgtaactgcagtcagttgggagccaggcggggcttgtcagctgtgataccttcattctcctctatgtggcctctccttatggctagcttgggcttccacacaacatgatggtttccaaacagcattccaagacagcttcatcacatgtctggcattttggctgggaaactagactagttggaaatcagccatgtgtcctcccaagcaaggtacctggacctctttacatggtggctcaaaactccattaaagcaaaggctgcttattttaagtctagcctgaactagaattgattctgctacattctgtggggcaaagaaattcactataccatcccagattgaaggaggagggacaaataagctccatctctcagtggaaagaaagtatagaatttgtggctatctctgtagctctaaatctaaatcatttatattcctctaatctgcaaaatacactattccttcctaacatcttcaaaaggcttattccattatg

SEQ ID NO: 43957 - DNA, 1173 bp, Homo sapiens
ggctgagggttttttcttaagtttcccccgacagttggctatggcctcaagtgcaaattaacggggtaccaaaaaactccagcatccagttaaataatactttaatgcaatattttaaaatcaaaattaatgcaaaaaattccatcatagacaaaaatattctaattgtaactaaagacagtatccattgcagtgaacacccttgtctgggctccagtggacctgggtgttctctggttgcgcaacatggtgagtcaatgcacacaggaaagcacatgttcatagggaggaagcgaattctggctggagaaaacaggcaaaggcctggtggggcagagcttgcagcatagtgaatgatggaaaggtgacttgactggaagttgaattagtacgcgggggtagatcatgcaggcctgcaggccacataaggacttcagtgttacttctgagggaaacggaacaatcatgcaaagttataatcaggagggcgatatgatcctagtcgctaagaatacagcactgaacacagtctgagaatgtcctcgtcctaaaggagcttctgttgtagtgggaactgaaaccaaaggaaaggaaaattgagtttagagaaattgtggagaattcagtggtgcccttgagggtactggaggactctgtgaggcagatgatgtcagacagggtatggcttttcctatgagccccagtatctgtctaccctgccaggaagaggctttacctggttctggctccactttttctgaatctttctttgcaaactgttgacttgtttcctaacctgataagcattgtgttcctgccagacaaatcagttagctaattgtctaattacatctgaaggcattcttccagtattgccattcctttctttcctagttcagattattaagggctgcaaatttcaagctaccaaaagtcaaaactcactctaagccagtggcaggataaagaatgagtacttcttccatttcatttgctgcctaagctgctaaagagacacagccaaaatctcaccagtcttaagtttactctcaactgatttcttgtagagaagcctcaggaattcacttggcctgtgccccactcagccacagaccagccgctcatcctcattcttgtgactggtcatcaccactcctggtaacatagtgcaaa

SEQ ID NO: 43958 - DNA, 1022 bp, Homo sapiens
gacagatcactaagaaggtagaagttcacgaacaaaacagctggtgtatttgagcaaatatttttttttgtttgacaaagttccgctcttgttgcccaggttggggtgcaatggcgcgatctcagctcactgcaatatctgcctccctggttcaagcgattctcctgcctcagcctcccgagtagcttggattacaggcacccgccaccacgcccagctaacatgcccagttaatttttgttatttttagtagagtcagagtctcgccgtgttggccaggctggtcttgaacttctgacctcgggtgatccacccaccttggcctcccaaagtgctggggattacaggcgtgagccactgtgcccggccacattttattcttttaatttcaactgttttattaaaactcagaccacccttatctggtgaactgcttgatcctacccagcaggtgaaaggatcagagaaaataacaaccaatcaatagatgtcagcaggcagtctcattcccaaacaagataaaagaccatggactctgatctcaaaccaaaatatttacatatctcgttgaggacattatcggcagtttggaggggacattatggtgtagacaacaagaaaaatcaccgaaggaagttgggaatagcctgggctagaaaaggatgagctaacgtgttggggttaggaatctccagctctgatttcttaagcagccattggaataagaaactgggcaaattcccaacagggtggggcaatccccctgatcccagcccattgggaaaagggcctaattctgcttctcccttcccattccccagcagcaacataaaaaagcacaaaatgtctcagtgctctggaatttcttcactcagatgaccctgggtggattttgcatcaaaaacacagatttatgaaagagcaaattatttgtgaaaaattcttcactttagaggaagaactgtagagcatcaccacaggcttattcatgactacatttgaaaaatatgattctaggtcag

SEQ ID NO: 43959 - DNA, 1211 bp, Homo sapiens
tgtaggtggtaagtgaaacaatatctattggaaggagcgatctccccctctcaagaagtatgcatgctccctggctaagatagagacagatgagtgaggggttccttaaccttgcggatccgtgcccctgcagatgctgccctaattatgtcatagaaaccaatggaaaaaggaaatcagattccccagattccacccccgccctcgccccaggtagtgaaaagttagtgagacttcttgaaaaacaatagggtgtttccaggttaactaagctttaacctttaaccaaattctcaggaagggcttccctgaatattctccctgtggaatgcagcagaatggcactctaatgcctccctcaaagagaaagtgataaggccatgagctgctcttgaggatgaataccagcaggagtgggaagggtgctgagctacctgtgacctatagaaactctgcctggctcacttcccttcattaagagaaaatgtgcttgattcacttcaggaaaatgagattatttatgagaaagaagtacccttgattggaggctcttaaacaagtggctttccagagagaacagttaagtctccaccacagacagccctgggaagaaaaagacagccctagatattttggataatttgggcattgaccttcctgaggactagtgcaaggaatgaagtaaatgagctcgattcctttcattctgtgagtcatagcttcgtcgaaattactcaattgttgatcccacttggctccacatggaaggcaaagttcaagctatagtacaggtagcaacatgatccgtgtacaattgtgcaaaacacaaaattcccataggccaggcacactcccattgcctttggatggtggctcatgaagatacaaccatgtcctctgtcttttgtcctatcctaagttgttatctcttaggccataaactactcaaaggcccagtcttcccttctttctagcaccatgcctggcagagagagagacaaaaggcacctgattagtgtatgataaacgaataaagtttcataagtcctacttttcagatcctaataatagctcccagtgcccgggagtatgctgaacactttacaggtattactgcatttactccttaaaacaaccctgtgaaatgagtactattgccatcattattgtttgaatcatcactattttcacatgaagaaagatctagactt

SEQ ID NO: 43960 - DNA, 1451 bp, Homo sapiens
ctgcacaaggcctgaaatgtacccctcggcccttggggcactgatgggctctgcgatctgtgactggcacaaccagctttggatggggatcagaagatggggatgtggtccccatgattcagtgagtgcagaggggacaagaaggtcaccttttggctctgaagatagtcagcaccagcctcaacatttgttctccccacttggcgaataccctccccaaaggccactagactaggaaaggaagtggctatattatgtgcctttggattccaatcctaatcctagctccttctcaggtacccagagccctcatgctacattctgctacagccccagctatgcttgcccttcttggaaatccctcatgttttgaacaaccaccacacacctcttctttccccctcttgttgcagtctctcattgcctgaggtagtacccagagtcctttgtctcatgaccaagaaagttaaggagtgcagacaccaaggttggagcgaaagtttaataagtgaaagaagaaagctctccactgccgagaggggacctgaaagagggttgttgttttacaattgaatgcaaaggttttaataaaacactgatgagagctgggcatcttatttatataaggtgcgaatttcgggtagctatacccctctctcctagtgcacgtgcaggcccttagtttgagttactccatattgctttgttcgccttactgtgcatgtgtcaggagatggaattttccattgcgggcatgtctgggcaagtcacctgtgtagcctttcttatctgtatgtctgtgggcatgtcttaggtaagccccactgtgcaagttcccttatctgtgcctgcagggtgtttgtttgaaagaatttaaccgaggactcaccctaactgcctgctgactggtttctttctttcccctctctcactctcaccctgcttccaacccccttgctcttccccgggtcctgtgttttgcagagagccagctctctgcttggcccaatcttataaattcattcttttagtggtgttttgggatgacaattattcaaaaagatgcttatctcaaaaactgtattttcatgttaaacagatctccaatgttgtcactagagacctgaactatccagggaggtagaagatgctcaaagtagatgtcgctgactagagattttcagagttgccttggtgtactagaggccagtgaaggtgtttatccatgcacagaggaaatgtgaataagttgtcttgggctgctgccaaagtaaaactatcggcctcatgagtcaatccatgggcaacccagctactttacattcacaagttcaggttttgggttttgctgttgttgttgtttccatctttgtttttgtttgtttttttatttcctgcttctgtgtaggaatgaagcttcagaatgaggtgagatcatttctctaaaaaat

SEQ ID NO: 43961 - DNA, 380 bp, Homo sapiens
ttgacttttgtctaaagcatgtaattaggcccatccaggctctccccttctgccagggcacgggccctactagaggccctgaccctcaaggctactgtccttctggccagcacagctgacttccatgaccctggccaaagctgagatcatcctgttagctgcactttgatcctggagaaggccttctcccatgctggccagggttcctcgttggaatggaagcctgtcaagtcacattcctcaccacctacgtgctagaagcccatattttctaaatcactcctgttgtgctcatcaaggttcttcttgctgagagtccacccagtctctccattttcagaaagcccattctgggttagatacacactcatcctttcttg

SEQ ID NO: 43962 - DNA, 1133 bp, Homo sapiens
aagatacctggtgaagcacccttatgtacttttctaaaaaaaccctgccctgttccatactttaatcaacgactcaacaacatagaagtcatctacatagtgttttcatacgacataagcccaaaaaggatggcttccactgcatatgcctgtgatcatgattcataatgatttcaataggctgcaatgctggatggaaaccaacatgatgaagttgagcaaggaataagtgtacatttctgcttttagattcaaaaggcaattgcgcaattacaggatggggaacaactgagcttggcagcagttcatgtgactaaaggcttaatgtgaaccaacagtaggaagtggtggctaaaaaagaatgaatgtagccgtgtgcttcctcagtagaaatattaatagtcactgtactctgcgctgaccgcactgcattgggaataatttgtttggttctgagcacattcaggagaggctttgacaaagcagagtagctactaagagggtgttgaatccaatccaagacacatttattagactcctgttttgggcaggcaatgtgctaaccagggcaggcaataaagacacaaagagactttgccagtctctaggctcaaggagttgaaaatttaaatagagagtcagacaggtacacgcatgactataaaacaaagcgccccacgaaaccaagaagcacaaagaaagggttgtgggaattcaggggctgggctagtggtcagatttccacaggaaatgaggacgagagcagaagaagccttaagagcaaagagacagagacaggaaaacccaaggcatgtctagggaatgctgagaagtctgggttgcctggcagaatagggtaggcctgcgtaggaaatgaagctgaaaaaagaaggtttgggccagagcgtgaggacattgactggtaggcagtgggaggcattacaggttggtgagcatctgaaaaaaaataatgatatatgaggatctgttggagaaatgatgcatattgagtctatagaaaagaagaccgaagtcccctggtaaacgtatctcagacttgctttgggttcctccagaagcaaaaatttatctcaaagggaaagggttaaaaggaatgagattttagatttcta

SEQ ID NO: 43963 - DNA, 2304 bp, Homo sapiens
ttttgtccacatcccatctcagaaatataactcttgccctaaaaatctctagagaagatgccacacttctccctctggtgactacctgtgtttccgagtcctttgttagtcaatcagccaataattatgtcaaaatcatcgacgtatgatagatattcaactacagtatttacagagttcttcgatatccagaataagaaaatcttgcacagaaccatcagagagtcatttccaagagtcgtttattcatgagcctctctctctctctctctgatacacacaatctccaggatactagaaagttttcaagggacagtgagttatcccatagatgaattcattccccatccactgcggactcacctgatgcgagctagatgctgaggcagaaagactaagatagagacaagatagagacaaaaatagagaacttcctttgggagttcccagtctattggaaggaacaggcacgtaaaaaaataatctgcatagtaaatggactgacaatggaacgctgggtagtaccgcaggctcccagaggagggagctagagaacaacctagtcagatcctaaaatggcccctaccagtaggctctaacaagactttttgccacatcttccacccccttgctctcattctgtctcctgtgaagatggagaacagttcatcagcatcttcctgataataactgcctcaatccatcataaaggccagccctaaggaacacagaagtcaccaagttcacggaccctgtctgaatatctcactgtcacagaagtctataaaagataagacttggaatctgaccggttgagctaatgggggatttccaagcactagctattccaccctttcatagataagctctttgtgggtggtggtgagaacacatcattctatttgtttcttgtgagggctactttgagcactgacttggtcttcatggcactttattttatgtcctgaaaaacaggacccaactgaaattcagaatcattactaaatgcaaagagagagagagaagcatgaattataagtgcaataaaatctcatttttttttctgtgttgctaatgaggaggaacacatttctttctgttctgagcatgctttcagagggaggcacatggaggaatccactgccagagacagtcttaagaacaggtggcagaacagtcctcgaacagctgtgagccgggtgctcagaaaggcatctttgaccacctccctgtcgcacaagccctgctctggacaccagagtccctaccacagggagcctcctgagatacagagcactgttactgggggaggataaacttatgcttccgtccacagtatcacatttctgatgacgactaactaccacccagaacagatccagataatgaggggctgggagacagacctggtaaaatgtaagcaatggaataagctggcagcagggagtgccctcagctcaaacggggtggtgatccaagggcacaggtccctggagaagtgtgttagctcgctagggctgcctaacaaataccatagactgggcggtgtaaacaacagaaacttactctctcacaattctagaggctagaagcctgagatggggttggtctcttctgaggcccctctccttggcttgcaggtggccaggttctccctgtgtcttcatatggcctttcctctgtgtgtgtcttcgtcctaatttcttcttcttataaggacaccagtgatattggattagggcttaattatttaaccttaattattaacacctctttaaaggccccatctccaaatacagtcatattctgagatactgagagatagaatttcaacttgggacacaagtcagcccataagaaggagtgggacaggaaacatgggatgaaaaaggagggacgctgctggaaagccaccagtgcaggcactcacacgagtttgaccatatggaaggcttcagggcagagatgaagggtcacagctgccacctctccactgatgactttcaaacctaattattcaactatgaccgctcccttgtattccagttccacgtttccaatgggctactggacacgcgccaccggtatgtcctgccaacattttaaacaaatacaggaaaatgcaaatagaactcatttctgatttctattattgtcatcactaaccttccaggaatttttcattccttccctctccctgcaaatctaaaatatcaccaaggccctttgctcttgctttcttgtgtctcttgatccatctcctttccccaggctgatggttactacatctcctctggtcattat

SEQ ID NO: 43964 - DNA, 1507 bp, Homo sapiens
atttctcatttcctgtccagctgcctttgatggattttccttaatcacctggaccctcacagctctgccactttccttgctagttcggattagtttgatgtttatgtgtctgtaataatggaaacaataaaaaccaccaacctccctgctattcttcaggtgctttacatacacattatcatttaacgtgcagtttagtgctgtgcttacagcatggactttggaactagaccactttgtttccaatcctggccctaccactcatcagcttgtgtgaccgtgggcacattcattaacatctctaggactcagcccttccatctccctctcccacaagccctgctctggacaccagactccccaccacagggagcctcctgagatacagatcactgttactaggggaggacaaccttatgcttccgtccacagtatcacatttctgatgacgactaactatcacccagaacagatccagtgaaatggcaatttaaaaagtacttctttataaagttgctgcgaggatcatatgtttagaagggtcccggtaacgtagccaatgccacataggtgtatgacctcttccctatcttttgaggtaggtgtgagactacggtgctcagaaaagtggaacgactttgggcaacttgggaacaacttgcccaaagtcacacacttgatcagaggcagaggtaggatatggaaccggatcaagtccaaccgtggactttccaccctgctgcgccgtctcaagtttgtccctgattggttctgaatccctggcgcccattctcatcccgcccatccgaagataaaacaatcttcctcccgcgccccgctgcttcccgggagctcccaggaactctagagaaaacaggaaaactgaaaagtgcgctctgcctgctgtgccaggcatgtccctcagggggagccaacaaggctttatttcgtcccggcagctggcccctgggcacggcccccagcccggcgtcccagttccagccgcgctgcaggggcgcgagggtgcccggctcgcaggtgtccgcgcgcaccgcagggctgcccgagtgcggctggcggaatccctccccagctggggaggaaggcagttgttttcttcctggtggaacgttccacttgaaactgttccacaagggctgttctcgcctccgactccgggaggaactgtaattaacacagcaacaaacgcccacgacgctaactggcaaagggagtgtaacacgagccgctgctacaaccgaactgggccaattgctttcccttcttgcctcccatttggtctgttttggttccgcagtcatccaactgtagcgtttcttaaaacatgtcagtggctggtgtttgtgttttgggttgaacagtttcacacacgtcgctggagcccgtgctcgaccagctgctgtgctggggatttgctttctgcggctttgggagtgtcaggtagcaaaacgaagagagtagtcgactagaacggtggcggggagga

SEQ ID NO: 43965 - DNA, 2409 bp, Homo sapiens
gtataatcacatattgtattccagccttgtccagcgcctcagttttccgaacctaaagaggaaaacgatgtttgaaatcagctggccgcaggcccgcgggtcgcccgcagtcaccggtggctgagtcggggccggcggttctccccgcgcgctcggctccacccacacctagaggggggcgcccgggcagccgcgggcgagcttctcgctcgcgcagcgtcgcctacaggcctttatcctgaccgttagagaagaacccaaacctctgccgacaaaaagcaaaagcagcggagaccgcgtatttccagaaataaacgcatcatcacaaacacgattccaattcaatccagccgacagtcgtcttcacctccaaaggttgcgttcttattcgcagaaataacacgcagtcgggcgtaaggtcccggctctcaaaaggcaaggtgtacgatccatccatccacccggctgcagggacaccatttaaaacgggcatcatcgccatcgaatcgcgggcgtcctctgtggggccgcccggagatcggctccctaaagctaacgacgacctgggacagccagcgcggcctccagccgccgccgtcggcgacctgagagcccgtccgggcctgagtgccccccacgctcacgaccaccaccgaactcgggccccgctcctgtcggcctccaggaaaataaagacagaggagagccggcccgcctgtgtcgcagggcaaacgtcgctctgaagcatcgacaatactggcaacatccacagccgccctgaggggacgggcgtagaggagagctgccgcctcccggctgctgggcccgggtgccgcgcggcgcggccgaggacgcgagcccaagtggcggcagcggcggctgcggcggtggcggaagtggagtggggaagagggggtggttgttagtgtttggcgccggcggagggagtcattcctgcagctgcacttccggtcggcattttgttctgagagggagagacggaacgagagagagacacacacagggctccttccccccgccctcccccccctccctccgtcggtaccgactcacccgacaccaccaagccgcagggagggacgcccccgccgacaggagaattggttcccgggcccgcggcgatgcccccccggtagctcgggcccgtggtcgggtgtttgtgagtgtttctatgtgggagaaggaggaggaggaggaagaagaagcaacgatttgtcttctcggctggtctccccccggctctacatgttccccgcactgaggagacggaagaggagccgtagccaccccccctcccggcccggattatagtctctcgccacagcggcctcggcctccccttggattcagacgccgattcgcccaggtaaattcctgctctttatttcggcggcggcggcggcggcgccggcgccaggtcctcagcgtctctcctcctcgctcccctccccgccgtttccttagcggccccaggtctcttccacaggcgagtctagagttcgctcctctctggtggcagccgccttgggtagcggtggttttgtaccctctcccggccggctccggtggcggggactgggctcctgctgggcggccggggaggcgtaggcccggcggagagtgcaggccgcgggccagcggaatctacttgagctcggggattaggagagctccgggctgagcggagcgactgctggtcggtgacaggcctcgcccgggagtggagccgtagctagtggggaggcggaaacaatacaactaacagcaaatgtgccctgatcgtccccatatttacaactttcccggtccgggagtggggaacgtcccagtgaaacaaacaacctcccttcttccccctgtgaccccatgaagggaggaagtagtttcagttagtgagacaaacgtaaatactcagacgcggatccagtggtaattctttctctttctaaaacttgtttggacgttggaaagttcataaagactcattttcttttttaaagaattaaatcgtccacatgaatatttaatacagaaaaacatactgtggtagacactgcacatctccccctccccaagagcttttatcttgttgttttgacagtgtgttgttgcacatggactttttattcaaagacaagtataaagtacttgacaggtttactctgccactttctatttgtatgcgttatgtaagggcagttttaagcgactatacgtaaaacactcaggtacttcctgaccaaaacgtgtaggagcatacaaagaattttaagtgttctgagaattgtgctgagatacgggtaaaaccacttttcttttctttttccaaaaaagaaattaagttatacttaaaatccttgggaggttaaaaaattgtagaaggtgcca

SEQ ID NO: 43966 - DNA, 725 bp, Homo sapiens
cacgggtacaaattaagagttatatggttttacaagtatatgttaaccccttggcgctggcggtcacggtgcgtctcattgccggcaatggaagtgtgccgggaaatcccaactcccggcgtcaagggattaaaagcaataaaaacaataatttcactaaaattcttttgtgtaacacttggtcttttttcccccctcccaatgttttagtcattgagaaggtcaaaacgaaattcagactctacggagttggcagcacagatgaatgaaagtgttgacgtcatggatgtcatcgctatttgctgtccaaagtacaaagatcgaccacaaattgcaagagtagtgcagaaaaccagcagtggcttcagtgttcagtggatggcaggctcctacagtggctcctggactgaggctaagcgccgtgatggccgcaaactggtgccttgggtagacactattaaagagtcagacattatttacaaaaaaattgctctaacgagtgctaataagctgactaataaagttgttcagactttacgatccctgtatgccgccaaggatgggacttccagctaatgaatttgtacatgcagccaaatttacaggaatttttttaaaaggcagaaaaacttgaaataccaacattctggcaaaaaaaaatcagttttatgaagagtaagtggaacctgggatgcaggaacaaaagaaggaaatgttgggcaaac

SEQ ID NO: 43967 - DNA, 1264 bp, Homo sapiens
aaataaaattgcaaataaaataaattctcacaaaagggttaaccaaatgccagagaaacgccggcattagaaaagcatcatttgcagctcctaatgaaataacaaatccagtcaatagtatcagcgctgctaaaattattgagtgaaaaaatactgggaactttatgcactgacataccctaaatccattagtcaatcttaaaattgctaagagcgaggaaaattgacgttctattcctccggatcctgctcgagaagctgggggactcgggtccggtgccgaggtgtggcccgagcctggcaccacccacgccggccgggtgaccccggccccttggggctcccgcgctccgtcagcaggcgacgctgggaggctggggtaggcccagagcgaggacgggcccggactgggtagtggggatgtaccagggccgggtgcggcgggagacggcccgggaggcggaaggtcgcggacctgcccgacagaagagtagatgaggggagaccgaggacgcccgggtccggggagcttacgaggaggccaggatcgcggggtaaggaatccgcgggcagttacctccgccaggggcagggtccggccagtcaggcgcgagaaggctaggcgaggccgactgcgcggggtgaagacgccaggccgacagctgcgggccctaccgccagccctgacgcgagcctgcgtcctggcgacggcggagggcgggcagggggcgcgggcgctgccacggcgcctgctcagaaccggccgggaacgccgcgggcgggtctccccggtcctccgcccctccagccctgctctcaggcctccgcccgggccctctaagctgccagccgcgcccgcctccgggctcctcgcccctcctcccgcgcgctcccctcctcagcggccgccggaccccctcagttcacttctcccagttaacgcgttcctcggacgctgctagtttgagcgcacaggcattgggcggggctcacgggggagccgcttaataaccgaccaacatgaaactcaagggctgccccttcctagcggggaccctgcacagacccgaaaataaggggttttgctctgccctcctcagttcacgtgggcaccttggaacactgaagaaggcattttccgaactcactgtcctacggacttattctccgcactgttttcgcctccttcgccctgttctcgtgactgacaggagcaggggtcacaagcaggcagcccgagagctctgctcacctggaaaagcat

SEQ ID NO: 43968 - DNA, 1614 bp, Homo sapiens
ggcgcctgtaatctcagctacttgggagtctgaggcagaagaatcgcttgaacccaggaggcggaggttgcaatgagccgagatcgcgccattgcacttcagcctgggcgaagagggaaccgctccgtctcaataaataaacaaataaatataaagcaaagcgtatctttaagataacatgctaaatttccaaattaacttcgtttgctcttacgatctactcaaacactaacaggagaaatgaacaaatttgggacttggatctggagatgcttctcatatggccttagccataagcacttgagagcggcgagaagctcattaaggttgaggtctttgcctctttctgcttcaactgggagcttgctcttcactcttgccctctcaagtatctacaatgaagaaagtgaggaaaggaaaaaacctgaaaagaagctgcttgctgttctccaaaaatgcagccaacagtgccataaatctcagcatatcctcgccgggaccaacgctggggataagtagcaaattaggaagtcaggcgagagtcctttaggttgagaaagcagggtcactatcactcacttggggcagacaccataagcagctcggaaaggtccgggtacatgcggtcctcttgcaactgacggtcgatgagccgtccagcattttccagagcttcctgcagggctgcggcagatgtagaggccggcatcgccgcgcccaacaaagaagacggcatctcggaaatcgtagacaccagggtccagaaaaagtcaaaaaccaaggagaaacaagaaaagatccaagaagttagcttagatccgccgcctagggcgcgcgcgccaaacgagcgccttggcgcctcgacatgacgcacttccgcttcatccggtggggaactggaagacgccgttctggcctgggaagaggaagctgttgggagggggctagaggttgtgggtggagctaggaggctgctgatgctttcgagggggttgagggttttggggtgtggcagggtaaaattagggtaggttatttagggaagggagggagggaaaggaagggaaggataaaggggagggaacagggaaggagaggggcgggatggggttggatagggtgaggaggaaggagggaggagggatacggtaggtgggagctaggtcgtgtgtctggcctaggaggttggtcaggttccgttggtttaagcgcgtgctcgacctgagtcttggaacttcccgcgtcggtatccgctaactgcagctatatgagttcgcgcatgagcgcgcagtttggttctccaagtaactgcttttgtgagagtagttaagaattggtaggtcgctgtcacagagagggatataaaccagtatctcactatattcttcgcgggcttcagtgtaaattagaattcatcaggcttttccatttgcgtgtcgctgtcttttgactttgttgccccttagtataaaatacgtgtttaagaagaagctgagtgcaggtggaccgctgccgtgctttttatcgtggcagagatagcagacagttctaattcatctttccattcccagcgctagtataggaactcgtatgagataggaacccaagagttca

SEQ ID NO: 43969 - DNA, 1772 bp, Homo sapiens
ccaccttggcctcccaaagtgctgggattacaggtgtgagccaccacgtctggctggagtacttttgcactgggaatggaagggataagaatgagctcatatgcagctgtatttacaagtggtagctttagataggaaatgaataatgcctccatctattagcagagacatttcctagttttgtattgggagatattgggatagggccttcagtagaattgtaaagacatagaacagctgttgatggttgtgagagaaacattactggaagaattatggaagtattacgggctacaaaatgtaaatttgtagaaacaatcattctgcgtgttcatatcctattattgagtcttattcaggagcctaggtatttggatggactacggtgactgtgggggagaacgggggaggttattttggaataaaagcacttcattgtagattcaacaaaaggacactcaggattatgctgagagagtggttcaagtttaggatattgaaaatttaagaattcaaaaaactgcaagataggaggttgtgtggccagtaagtgtgatatctagagcctaaaacatatttggtgataaatatttgtgaaatcagtaaatattgagagttcaggattttagaagcatattatgaccattcatggtagtggcagaattagccatagttggcactgctgaaatatcttgtaacaagtcatcagaattgagtaggccaaggaagattgaatttgtttttgaggtattcaaatggatattaaaattactcaggaattagacttggactttagaatccttgatttatgcaagcaaatgactaagagtgtgttagggttggcaaaccatggccttggggcaaatccagccaccaccctgtttttgtaaataaaagttttattggaacatagacacatccattaatttactattccctgtgactccctttgaattgcagtggtagagttgagcagttatagcagagagcatgtggcccacaaagcctaaaatgtgatctgaccctttagaaaaaatgtgtgcagattcctgaatttaagctgtgagtattctccccagcaaaatgtattcacacaaaattttgttgaccatttcaggagatttgataattcctgaaaggtggtgaatggactctagttaagaagaacttttggatctgagttcccagtatattccctactattttctgctgcatttcgtctcttcttgggggtaggctttgttagctcaacatgccaaagacatgggtactatcattcagtaactacagatggcactgttacaaagggagctgtttttataacttgtcattggggtagccacaagagtacagacagattacagacagattatcagcaatctctctctctctctctctctctttctctctctctgtgtgtgtgcgtgtgtgtgtgtgtgttttgaggaaaccagtgttggtcatggataattaatgtcctctctcaaagtatagcatattatgagaaataaatagttgcttaattctttcttctaggctatttccagttaaggctgttaaataaaggaagagatatttttcaggagtgcctatgtttagataagagaagaagagagaaaaagtagtttatttggtgaaaaagtgtttagtcactaactgttctttaataggtgtctctttaaaaattgttccactaatgttagccatggtactgaatctgtttagacccatttaagaatccttagttgaacttcattttgttatgactaatt

SEQ ID NO: 43970 - DNA, 827 bp, Homo sapiens
tgtgttcatccccaaaacacatttgtctgcccaaaggggaaaacgacctgacctaccttaattaaaatgggttcagtgcatccctgtgcttgtatttaatgatttactaataagtgagttacaacatcttttttacttcagattaagacagtttgtttcgtcatgttaccttaaggcagtctctttcctccatcagcctgttgttgcaatgtggaaatgaggggtgttagatctttttgtttattaggaaaagctggaaatccctaattttttgaatgcctgtaaattgttgtaaattcctcttcatttcttccaccgtctctcttactcaaattaaaaataaatgatcctaagtatagttgggagtgttaaaaaagataaatgaaaatacaattttatttcttgtttttctctgacagttactacttggttaatgattgtttttatggttttagttgaaagggctacgtcagtaggatcatcaaatctgagaggtttttaacaaggaaaaagtgttattaaaatactgagactatgaattacagtgtaatcttcttgaaggcagagattatgttttacatctgttcccacaagcacagcacaatgccagggacccagaaagcaaccaataaacatttgcttcaaattgattttctcaagtgagtaaattggaactcctgcttttttgaaacaatacagtcctcataataaacaaaatatttatactcattttttgttattatgagggcactttctttaacaaagtgattttaaaaagggaaaatggttttagttttgtaatagagcattacaaaagttaaagttgc

SEQ ID NO: 43971 - DNA, 2822 bp, Homo sapiens
tgaaggagaaaaaaagttattttatgctgtccatctcactccttgcactgtcatccctggggatacaaggaggtgtcattcactgagggccattcatttcactcagcctcagttttcttgtttgtaaaatgagataataattacacataccccaggaggctttcttttaatgatgaaattggaaaatgtatgttttactgcactgaatagcaacatgttcagtaactgtagctgttgctgttattatcatcattattattatttccaccaccattaatgttgccatttaaaattcttactgaatcacaggaggcctttaacttagctaacagtgatttgacaaatagaggtctttttcctaaggttttagttttttccagataaaagtgagctaattgtgggccaaattcagcctgtcctcttttttataaataaagttttgctggattgcatagccttatccatttgtttatgtattagctatggctgctttcatgctacaacaggagaagtgaacagttgcaacagagtctgtatggtcctcaaagcctaaaatatgtattataagcccctttctagaaaaagtttgctagaccttgctctaggtatatgtttctccagtgaggtccagagaatgttagttcaatccatgctagtctgtacgatctgaaaaaaaaaaaaaaaaaaaaaaaaaaaggttctatagtcaaataagctttagaaatgttaaggaggttgatttattctaggactactacttaaaagactttggcttttaatatactcatgtttattgtgaatcttcaagacaaggccatggtgtgcaaataaactctagtttcgcaggcttacttggctgtagtcccctaatatgatgatgttacaaaaacaaacaaagcaaaacaaaacaaaacaaaaaacaattctctaggaacccttgctcttgggctttctctctggaaggactttctttctaaatcattcctcttggtgatttaggtgatatcctcatttggagacctacagaatatcatatgaaattctgtgttagttgtatcatttttttcccagtaaaaattatattttgcttagcatcagaacagtaaaatataccagatatttaagtcatctaatcagataatatctgcctttttgaatgattctgtatgatgtctgaagattataaattagagtctcaaagtccaagaaagacaggatgtttcatttcatgccttcttgaaattctaaaagcatgggtcttctgtaggacttaaaatgtttttttgcattcagatttctgaagcataaatttagagtgcctaagtgatataccaactggtctcaactagggtttataagaagagagattaatgtgaaggtaacttgtgcattagccataaggggtttgttttatagactaaagtaaacaccttcaatttcaagttgcaagcacacagggagccagaagattccagagcggtggcatcatattctgcctgtgactcacacatctaagtggttgagctttctcccgcagctgcagcttccagctggtcatcagttagagtcctaggtagtcacacactgtggtcacctggtttgagatgaccaaacaggcatataattacaacataggccagttatgaatgaaggctgggttatctctttgccaaacacagataaaaaataaatgctaagtcatagctgttttctgaaatcccagtggttgcaatagtgaacctggactgaaagtagagaaccctcctggaagattccaccctggttgtaaatgcacactctctttctcatttgtgagcttcctcattaatggcatagagcattcttagccattttggtgccctccaaaatgcctggtttatagttggtgcaataaatgttttatgaaagaatatgaggtcatacatgttttccccctttcccaacttgcaaattatttcaagaaaattctgtattttctttttatttatatatctcagtgttgtgtgtataacaggttctcagtaaatgttgttgacattgtaaatgtagattccaaaaacttccttatttcacttttacattatggggatgctgaatggacttttcagaaatctttgtcagatcccactgtcttttgtttttaaattatttctttaaaagaaaggaaggaaggagagagggaagggggaaaacatcttgacctggaacataattatcttttttttaaaaaaaaaaaaacattttgttttctttagagtcaggggtcttgctctgtagcccaggctggagtgcagtggtgcagtaatggctcactacagcctcaaactcctggactgaagctatcctcctgggcaatgagtgaggcagtcccagattctcctcttaccacctgtgttgtcagaccactgctggtaccacttgtgttagtctgggtcctctgagaagcagacaccaagacaggattaaatgtgtaagagatttactggggagtacctagaagggaaattggggagggagccagagaagtctggagagagtcagaccatgatgtagaccatgcgtttgtgaaggagagaggaaagaatggaatattgaatatccatcagctgatgaatggataaataaaatgtggtacatccatacagtgaaatattatttggcaataaaaagaaatgaagtgctgatacatactgcaacatggacgaacctcaaaaacattacgctaaatgaaagaagctgtcacaaaaggcagcatgttttatgatttcatttgtatgaagtgttcagtttaggcaaatctacacagaaactaaattagtggt

SEQ ID NO: 43972 - DNA, 1771 bp, Homo sapiens
tgatatctggggcctgttcatatcatttccccaccatgcctttggtttctcacatttcctataggtaagaagtctggcacagcgtggctggattctcttctcagggtttcaccaggctaaaatcagagtattgccttggtatgtgctcagggtcctctttcaagctcattggttgttggcaggactcagatccctgtttccttgacatgtggcccccttcatctttaagtcgatagtgacatgtgaaacacttctcatatctcaaatttctctgagttcctcttccctcacatttctgtgactttcttgtcggcactgtagctcatgcaactgcttcagccccacctgcaatccaagataatctccctattttaaggtcagctgactagtaaccataattacacctgccaagttcctttgaccatataaggtattcatggacatcacactagggggcagaggtcacaaggataaaaattcggcttaccacagtgcagtaccctctgactgaaatactctttcttgccctcacctcctgctcctgcaactgctaacttctactttatctgttaggtctctgatttatttttgcccctcttttctccctcattgtcaagtttgggttaggaccttctcagtgctcacgtattactctgtatttccccattgtagcacttgtcgctctgtgtgctgatctgtatcctttctggggactgccaagtcttttagaagctatgtttatctgggcacatttgtgttttctctgcttaactgagtgtctgccatacatacagttgatatccaataaaaaaaccgttgaatcaatgaattctttgtatccatgaaagatggaagcatgataactaatataaaattccaagactgttacccagaggaagaactgagaagccagttttcactcaatatatacagattattattattatttaaatgaactggcctgcttttgtaaggtggtgtactcattactggatttttttaggtgtaagcccagggattgggtgtcagggatattatttggagggcaaagtacatgagctctgttttgtgactcattcttcataagggttgctacaagagcaatggagatgagctcacttgcattaccatacctgtggctcccaggagggactcacatgctgtcattaccagcagtgcccctgtctttcgctatggaattaccctaggaaagttggtaatggcccagaaccattgtgtaattagccagcatggcatgtgtgtgtgggtacacaggtacacacacacgcgcgtgcacacacacctattatagaggttactctattaatgacagctatgtaggggagaaagtttttaatggaccaaatgtctttgttcatatagaccacactttttgaggtaattgacttcctagtaccttgtgccagttactgagtcataactgagtggcaagattggtgtagaattacaagtctttaactgtgtagaagcaacattagaagcaaaaatactattaagataaatcagtaagagaaggattataatgaagtatttaagaatagtctttttggtttcaaacccccagctctactacttactaactgtgtggccttggacaaggtccttaagtttctgtacctcagtttctcaaactataaaatggagatgataataatggaacctaacttacagagtgattgtgaggactaaataggcaagataggaaagcatatagtgcctaggatatgataagcgttgtgtaagggttagc

SEQ ID NO: 43973 - DNA, 621 bp, Homo sapiens
gctttaaattttgtttcttcatttcgtgttttagaatccttgtagtatttgattaataactggtcttagggtaattgagccttaagtatcctctgcctaaatcagattgctcactggcctctcatttgctgcttagtgactcattgccacagtgcatggggctctggaatgactgtttagtttaaggggtcttatttgcctctccctgtttcggcatgaaaggagggtaaatatgcttctctgtaagaacatatactaatcagctatatgtgtgtgtaaaggctctggagggtacaggatgtgaacaggaatagaggtgaggtgtccttggactccctggaaagcaattggaccttggtctgttggcttgggcagttgcctctctctaacatttacaccctcagtgaagagggagagagtaacagtaacctgctgcccctggaaactgcctgtttggctggatgtcttggaatttatcaggcctacattgtggatcttttccaattctgcaccctgctcacttgaaaacatatttgagaactagtaatcttagactgctgagccagacctctagagaaccaagaaagagaaataactctaatactgtgcccttaatattgt

SEQ ID NO: 43974 - DNA, 1678 bp, Homo sapiens
gaaaatgatgagcctcatttgatagcacccatttagaaggcactttctgtggaagctttgctttaagaaatttacttatttgtatttgcttctcttgaaaaggataactctgtactactaaggagaagtgcaatgttctaagcacatttttggttaatcccacacattcttgggccatagcccctcggcaacactgccaagccaactcagttccagacacttgtactcttgtatttgaaaagtggacatatgccatttggggtgtagaccacccaggttgctttagtctgagacataaactaaaattttaaccctgtgacctttagagtgaaaaggttgggtaattttattatttaagatcttaaaatttcacattattcctataggttttgtaaacttgtgtcctgttgccctgttacctctccaaccctcttgcttgttaataaccactgactgacagacttgcttttccataagtttaagcttttatcactgagagcccatctgttgccatccctcagaaagtcaagtacttgtgtagatggagtgcatgcacagagtatgttcctgaaagtatctcatgttttcaacatgaaattttctgtttctaagaccaagtaaagaaaataatttgcttttacacccgttaggggagcaaaattatgtgtggttaaaacccagcggaaggcaaaacaagctgagactctaactcaggactacatcatcacccgtaagtcgttaacatgcctctcaatcatgcatctctcttctactctcatgtggttttgattgcatagctttagagacagagaaagccctcagaattcaggcatatattacaaaattgcccattcatgtggataggactacgagtcatgtaacagctaacctctgtggcttctgtgactcatcacagggacagggttatttcatgcagctttcaacccaaaagggaaaagcctgttcgagtccaatacattactttatagcagttttttcaagagtaacagtctattccaagtgtgaacaagaaagagtgctggtcttggaatcaggaggcctgggtttgtccagttccaccactgagtggcaatgtgatgttgaacaacttaacttttaatcagggaagtgtggcgaccagaggaagggtctcttccagctttctctgaaattctatgaccatgtgctagactgatccacaggaatttgtatataaaattaactacctggggtatgagtagaaagcttactagggcagagtggtttctctcacgtatgtcacacaacctcattaatctggcagatgtgtgttcccagagccacaatctcaaacctgcaacaggtgacagctaggaaagaaataatggatgctacagcgattatcattagtggatggccctgtggactttatcagtgactcagtctggagcccagggggcgctgtactgctgggttttctcactggtggtgggtctcatatgagaccaagtcccttggagcttatgaccagtaaagagatcccatgacactttttgcaagagtagaagtgttaaagtcagtgtcataactagtctagctcatgtaattacatgcggcctacttaaattcctccagtcgtttgaagtgaaaagctattttccccctcctaaaaatactgttgtgttgtgttgcccaactg

SEQ ID NO: 43975 - DNA, 1169 bp, Homo sapiens
acatgttgcagatctatttattcactttaaaaatttgcaaccctatctgctcagtgtccaccaacagttacagctcctcctggaagcctgtgccctgtagcctatgccctgagcctttctcctgctggtctaccccaggtaccatgtcctttcttttatccagctccaggctggctgaacctcacgaggatcacacatgttgactttctctttcgcctgccagtgtggcctggaggtgagacttgtgaatctgcttcagggccagatgtgaggtcccaactagctgtgactgaatttccttgcatcttccaagatgttttttattgtaaacggtcaacaacaatcaacgttattcctttaatttatgtgcagtcagctttcagttctcctttactgaggatcacagagctgtaaataatgagaagacaaaacagcacaaaaagcaaatgttattccttttatctctggagatgtctgacaagaagtctctcacctttgtctccacatgccttggaaactatgtcataaagtgtgctgtgtcaaataagacacttgtcaagcagattctattttacctataggaacaatgttgcaaatgggatgccaaggaagtcaagaactaagcatcctgtaagtcatagctatgatcaagcatgtatcatgaaatatagagaaagcagtggagttatgtgaaagaacaaagctataattagagactgttagacatggagagcatgcagaagatcaactagtctgagtcctgtgttttacagatgagaaaatgggggccctgagggtcagccacttgtgccaggatgcactgttagttaatagtagagttgggaccataaccaaggtcattgacactggcccaatgctccgttaactctgttgtacttggggtcagtgtcctatgatcactgattgggaaagagacaggtctaggctgggatcccagctctgccctgtattgtgtgaccttgggcaagttgttccactgctctgagcctcagtgttcctgtaaagggctgaattgtgtccccttcaattttacatattgaagccctaaccccaataccttagaatgtgactatatttggagacagagcctttaaagaggtgattttgttaaaatgagactgttagtggcccctcatctaatctgaccg

SEQ ID NO: 43976 - DNA, 921 bp, Homo sapiens
cccatacttgatttaatattctgctgctacagaaatcctgaatgtgtttttgaacaaggggtcctgcattttcattttgcactgggctctgcaaattatgtagctggttatagtgataggggagggaggcagaggaagctccctgttaaattaatacagcaggagggcactggcttgaggttgtctctatactttgagttcctgtgtaaggaactgcaacataacttagtacgtaaacaaactgaaaacctagcttgggagtataacaaacagtggagtctcagccaatcacagccagccaactgatcagaccatgtccatataaagcaattgcagtcctgtaaccaataaagctgtttttgtactttacccccagtttctgtctataaatactcactgcccactttgcagaggagagctgtctaaacctctcctggttctgagtgttgcccaattcatgaatctttctttgctcaaataaactctgctaaatttagtatgttgaaaaattttctaacagccctgaacacagccctgatagctgatttgcatttgtcaccttaggattttgtctatgtcttgatgctggcacctctatcagaaacctagggatgcgtttgggcttgtagaaaacaatcttctaacagtttatctccaaagctatgtcagtgaacacaggcctgaaatactaggatttggataggaaaggggaaaagtgttcccaagcaatactcagtatgagcaggtgaagcaaataccaggaagatggagatggcaggtggggtggaaattgggggattcttgtcttccttgctcagaaaggggtagagtggagaggaaggaggaggagtggacaaggttctgtggctgccagggtgtgtgatccatgatcaagggatggccctgaagccagggtaggga

SEQ ID NO: 43977 - DNA, 1385 bp, Homo sapiens
ctcacttacctcggatcgggtctccgcagaccctaggttggacattaactccaggtgccccaagtcccagccaggagacccatccgggctgatggctggagcgcggagccccgcccaacaggtcaggggcaagagttcgcaatcctggggtcgcgcggggcagcaagggcgcgctggaggcggcggccaagactcccgccgccgccgccgccaacagggcgagggctgccggcaactctcccgccgggcccccgcacccccagaagccgaggtccgagcagccgccgctgctttgggtggggggctgacagggctgcgcgcgtcgcgctcttggctggggctgcgcgggcccggggcgctgcgggcggctcagcggcagctgccgcgctctgcgcctcctctgggcgcactgcctgggagcacgagactggtttgtctgatgctgctgccggagctgaggtcttgcctggagatccgaacgagacaccacgtcaaccggcgcggggagtcccgtgaagacatgagggcgccaggagcgcaggctggtcttctagagcccgggctgggggtccggggtccggggtgggggaggggaggcgcggggccccgggagggaggggtcgggaggcgtcggctgggcctggcggtgggggaggagaggagagcagcgaggaggccctggagttcccgaggcggggggccggggtgcgagtgggcgacgcgaggcgcccctccctgggctgcagggagagcgctgagagcgcggagacgccgcggggctagcgccttctcctctccgggtggatcaaaaatcgagaggaatgtgcggcgctctgcgcgggccagccgaaaggggcaatccgaacttgaccgcggcgcccgcgccgggctttgcccccgcgcgccgcactgggagggtggcgctctgccggtgcagggcagcgccgggctttcctcgcgcctgtcgaaggccggccttcccgctcgggtgtctcgccctctcgcttctccgcagggcaggaggcagtggcgagaaaaggagctgccggccggagttctagcaccgagaaggagaggtgcggagcggccgggtgagggaagccgagtatttgccaggggacgctgcgagtggggatgaatttatagggctctcactccgtgacgtgccctccagtggcttttctgattcgctttctgacctaaacacacattagtttagtccccatgctaaggccaacacggtctccaaatatctgctggctgaagtcagaggctttgcatatcatgtattacatggcaggcaatgaagaaggcttctgaggctggccggctcctcagtcctaggctccattttcatgctgttgtaatctaataccagacatggg

SEQ ID NO: 43978 - DNA, 2343 bp, Homo sapiens
gtattatttggtaaattactgccctcctgcaatgctgtaagtggaaccctagtgacctgaaagagttaatgcctccctgcaagcaattaacttactcctggggcataatttacactctaagaggatctggcggaccatatgtgaagcgcttggaattctttgagagaaaggcagctctagaaatgtaaagaattaatattacaccaggtgaatttgcagacctttcttcgagcagtctatcatgtaacttcccagaaaagtcctgtaaggtaggtcattgttatcctttccagaggcattctctagccaatggtaagtcagcagataatatacccagcatgaggttaggcaatacctatttgtagaatgacttcactatttgaaaaataatgggtgaaagattgggaggtacattttagaaatctgagtaaaaaacaaaagctaaagttaagataattgtaataagtatctactttacaatcttgaatagtaggaatgtgacctaaatataatgggtcaattttctatactaactcagggacaccaacatattagaatgtggcatctgtttcaaagtggtcatctgagaagactatctatatatcctaatatgcacctgtcacttgaaacacttttataacctgcaaacacaattgtcatccatccaacaaatatcatttagccatctcccttcataaggccctgtgttggcagttgctgagggacaaagaaaaagtcatgagacagcatctctgtattcagggatggcagttctctgggttttgagggtggggtgaattttgagcaaagatcaaaccgtctgaaatcaatcctagtgaaagaggagggttaaaaccaagagaagataatttagagactgctcatggctcagtggtaaattgcaacgatggcctcagttcttcactcttctctgtatctatgctctttgctatgtgattctgcagttcctcttgctaaagtgatggtgtctgtttccccatcctctgaatctgaaggggcattgtgacttgtcttgggcagtagaatgcaatggtagtgagagagtgccagttttgagccaagactcacaaggtaaacatgtgtctgcttcctctttcaaagctatgccattgccaggagaacatgcctgggctagcctgctggaggatgagaggcgtgtggaacagagcagtattgctccatttgtcacaggcaaggtcagtttagatgagctgagagccaactgatttcccctccactcttcatccccagacatgtaaatgagcctgtaaagatcaacagcgctgcctcttcaaccagtctggaataagcaaggaaggcttattgtatacccgtgggattttgtggttgttatgcagcaacattatggcagtagatcactcacacagcttgtaaactgattccaaaagaggaactctcaatgctaaacaatcacaacatttctggactaagtgactggtgtctccaggtgactaccaggaggctgtaacatatgtttggagaataaatgtcccaatgtttattgggcatcctttctctgttctactgcacttcatacttattgtatgaaattgcttgtatgcatagccatggctacattagaccaaatgttctgtaagggaaggaacaacattttaaatgttcacctccttagtatctggcatataactacttgttaaatgaatgaaaaaatgaagactcttattagaagtcacaccttgcattgtgtgcttttagtaactttggtctactcatgatatgcgttgggtgtgtaatatgtaatcttaaaaacttaattaatgcaattacttgacaagattatatatgcacattacacctttcaaaaggtgcaaaggtattttcagtgataagtgattgtttctctcatgccatcttcaagccatccacttctctggtaacacaattaccagtttcttatcaattctcccagagaatgtgtaatcattaaaatgaagctattgtctaggaaagaaataacattttcagccattacttttttataagttggcacattttactattcgttttcttttggaggctggaccaattggatgtagcccttatgttctttgctaaaatgttttgaaagctgtttccccaagtttgttcctttaacattttttttaacttttaattgacaaatgataattgtatgtatctgtggggtataacatgatgttttgatacatgtatacattgtagaatgatcaaattaggctaaataacatgcccatcacctcagatacttaacatttctttgtgatgacagcatttaaaatagttcttttagctattttgaaa

SEQ ID NO: 43979 - DNA, 1132 bp, Homo sapiens
ttggaatatttctactaaaactgttagaatttaaatataaaaagcacataaagagattttcacttcagattacatctaaatgcttatgtatatttttggatgagtattcagattatgtcttgttcacattactgacattattgctggttggatgtgatggtgatctgttccagcagcacaatcaatggacgagttcaaggttgccagatggcgaggaagttggcattcagctattcagctcttatgcttgccaaggccaaggccagagatgaaaccaaagagcagattttggacaaacacagaggccaaggcccaaagtctgtgtgtcacatatgtatcattcttagtagctaaatcttatgactggagcagcagttacttaaccaatctcccagagaaaagtgtctgaaaacacatgccctggcgtgactcacctccaggtggtgaaattacagataattttcctcattgcttatcagtattttccatgtttttctataataaacatgcattacttgggtaatgaagaaaaaacaggaaagtttaaatcgtctataatttacgatgaataacaacagcaacaacaaaaagcaaatttacaaaaacatcacattaaaaaataaaaatcctcagagaggtacactgggcaatcccctttggtgaaacattgccaggccttatgcgagtcaggaagttttccccaagatgtatcctcaattcctcttgccgttagttaagccctttcatcaaaggagaagggacagctgctaatcctagtctaaatctacctccaggtcagtgtttacttccttccctctgtcttctcatttttaggccaaactttccttgtagtgtccattcaccacaccctcattctgaacaattatagaattaagaggaaaggcccaaatttctccttcaagaatgtgcccctgtgctgtgtgattgcttcaagcctcattggcagaataattaaaaaaaaaaaaaaagaagcttattagttggagataagccctgaagccccaatttatagggaaatcctagaacctagcaaataaatagcaccagaatggttagtactactcaatcctactctatactggaaagcttagaggtagaaaaatcacaggag

SEQ ID NO: 43980 - DNA, 1314 bp, Homo sapiens
atgaatttatagcttttgattgtgtaaaaactgatccaagtcaatctgttccttcaaggataattataaaattgagagaggtgaggtactgagcagctcaaggggcccacagccctcacatgtcccatgaatcaagggatgccttggccagcagccattcaagtgccccaaactggaaccccgaccttgccctgcggacacctgtcctttggctcacctcatctccctcttgcttcctggcaggtggaatgaaggaaattgctctgcacactaacaggcaatatatgagagggctcgtgggctgtatctctcacttcaccctgtccaccgattaccacatttccctcgtggaagatgccgtggatgggaaaaacatcaacacttgtggagccaagtaacaccagctggccttgtccaagggacagagccttctattctgagaatcccaggggccctcagaccctgcctgatgctatatgcagaggcccagggaccaggtgtgtttcctctcaccaagaagaaagtacacactgatgagaaactgagaaccaagacaggcatccctgggtggcctttcctgctgacactccacgagctgacccagcagaattctctgtgtaggaagcatcggactttgtccattgaatatgtagcggctgccagagatcacacatcaatgcaaattccagagcctgtctgctatagctcagtgactgtgttgtgattcatagtacattaaaaagagagagagagagaaagaatcccacagggcactattaaaatacttctctccttccctgactcatgacactcttcctgacagcagaatgactgtgtgaccttgaacttcacatttcccacattggcccttggattgttcggattaaccccttccactcctcactggctggttcactgtgttctgactagtccataaaaataaagatggaaggagatcaaacacagaatcataatcataatgcggcccccttccccagagcttacctcgaatgtgaaatccctacttcttataatgcagagttaaggagctgagcccccatgattttgtagctgtacttttgtatgtgtatatttttatagctgcagattgtccacacagtatacttttggaagtttgggtggatgactctgaattcttgcacacctttcctaaaaatttctcccaagagagacttgtttgggccttttgtggtgtcagtggaatggataggtaacttgggtgggcaacttggggagctgaccattctcttttggtaaatgttgacggctcaagaggatgaatatgaagctttc

SEQ ID NO: 43981 - DNA, 713 bp, Homo sapiens
ccgccccaacccgcgcgcccccgccgatccccggccgcgcgcccgcgcgcgcgggtgctccaaggagtcggaggaacgcggccgcgcgacgggccccggacgccgagggtggtgcttcctccgagcctccggtggtgaggccgctctcagaaggtcatggaagcgcaggggagagcgaggcggccgagcccaggcaaatcctcgagaaaggccgagtgcgcgacggctctgcggggaggaccgcgcctccccgaatgcggccgctgctgccgctgcaaacagtgccttgaggagaggaaagcggggaaccgtgttttcgccgcctctgtaaccactgcacacaagaaaaccagcttctgggagagggggatgattgttgggactttgcgaattacctaaacagcccagggccgaggcgccgccgctcgcgtcctggtcctcctgccgggtgtggggctcccctgcccgagatggccagcgggcgcgccgagagtatcctggagccatctagtcttgcctcggaggcggggtgggcttatttgtgcggagaagaaacggatctcttaatggggtgagatttttcctccgtacattgttcccatttccgcagtttcacttggcctcggttttctagcagagtaatcaccaaatgaaattagctggagagcgtttgatggcgcagaatcacggtctgaagatgtttacgctgtatg

SEQ ID NO: 43982 - DNA, 547 bp, Homo sapiens
ggcaatatttttaggtgaaattttatgcaagtttacattattataattatacagttaaattatcctgcttttgcaaatgttaggacaaaacatgaccatgtaaaccaatccttgagcctctctctgggtctatggaaaagtctgtgtcattagcttcacagtaaatccactctgactacctcacaggggaattagaggatgacacaacatacagtcagggccactggcacaaaggtaactttgtgcttattacacaagggtgacccctccagattgacacagggctcagggccagcaaagcaagggctagattttagctctcactatttttcttggttgggggcctttggcattggcaaaactggaggttgctgatatagctgggggttggtgcactccaccaaggtccttggccagcagggcggaggtgagcaggaaccacattcaagtccccttttcttgccaagttgtgtgtctcgacatgcagctgcatatacccaagaatagggcatgtttggcttcacacgaaatctctgtctttctgcta

SEQ ID NO: 43983 - DNA, 2113 bp, Homo sapiens
gtggcggtcgtctgtagtcccagctactagggaggctgaggcaggagaatggtgtgaacccgggaggcggagcttacagtgagccgagatcgcgccactgcactccagcctgggtgacacagtgagatgccgtctcaaaaaaaaaaaaaaaaaaaggttgaagattggatggcatttttaaggggaaaagtaaaccatgtgtagcatgtcgtagcattgggaaataaaggtttcgggactgttgtagccgaagaaactttgtcggacagggcgtttctggatagaacgcgagtaggggaaaaatggggaccgtttgattcggttcaaacacgttttcgttgctctggacgccaaatggaaacacggccaaaatttagttaaaggacttctcttgcctgaagattttcggacggggatctcacgggtttggcctctgggttgggatgacaagtgcccctgtgggatacacagccccaggcctcatcggtcactcggcttacctctggttccgccggctggcccgtgcgtccttggccggggcaggagcagcgctgcgcgcggggcacggagcctcggccgccgagttttcggtttccaagtttccttcccaggcctctcccacttcctcttctcaccagtgcccgcccgcccgcaaagtccgggttgtgaggctgcgcctcccccaggatcgcggccgcctccccccgggactgaagggagggaattcctgtgggtcccaggagtgccaagagtgcgcagcaagacgggaaattgcaaaagacctcacccctctgccctcccccgcggttttccagtaactcccgcccctccgcgcttgccccgcagctgattcatagccccggcccgggccgcctctgcacgtccgccccggagcccgcacccgcgccccacgcgccgccgaggactcggcccggctcgtggagcccttcgcccgcggcgtgagtacccccgacccgcccgtccccgctctgctcgcgccctgccgctgcgccgccctcggtggcttttccgacgggcgagccccgtgctgtgcgggaaagaatccgacaacttcgcagcccatcccggctggacgcgaccgggagtgcagcagcccgttcccctcctcggtgccgcctctgcccagcgtttgcttggctgggctaccacctgcgctcggacggcgctcggagggtcctcgcccccggcctgcctacctggtgggtgaaaactaaatgattcattccttacaggccgcacagtgccgagtcgcccatttctcagactgtttgaaattcaccatcccagcgcctttttctcaaatgatggtggaatgtttgttgagtggaaaattcccacttgaatccctctttcctctctcccaacacatcgtgtggaggagttcattgcttcccctacctctcctctcgtaacccttgactcccacctgagagagccatttttctgggaatccgtgtatctctcccacctggtccctagcgtagaagcgggaggagctcaagcacaggtggagagaggaatccccgggcgactctgcaatagcgtccgtccggggcgcttaccttcttctccagccacttgagtggaagtggccctctacattctggaaacctaggcacggaggggttcagtaacttgtccaaggccatatggctagctgtgagggcactgaaatccgagcccggctctcgcaggccagggctttacccctgacaccgcgattcctttctcgatagttcttcatctgcccttcatccacctacccatgcatgcctgcatccgtccatccatcctgcctgccttgctgcgggaggcacagtgctaggtgctgctgatggagtggcttggtaacagacctgccttgaaaacactttgggaacaagatattcaagagaagtaaatggaagggtctatgaaggcagagaagatagaattgaatgtaggatacttagtttgagctagaaggaattctgatggaggagaaagaaatttttaggttttattcccaagattaaaactgactttggaacatgggtcaaactacttatcacctcttagtttccttgtctgcaaataataatggttcatactt

SEQ ID NO: 43984 - DNA, 2648 bp, Homo sapiens
cttctaagcatatcattattaacagatgaacttgccttgtagggagtgtctggtgaaggggagataaaaggttataattgcatttccaaagggctaagtaggaagtggggaacagagggaattggggaaaagagaaaataataaaacaatagtaactcattctccttttcttagaaaaatggggtactcggttacacagggtctccaggaaatcccaggcatctaactctaagctttcagcccagctcattctctagtgaagttcccttttctgatccagcactatttactatgtgccttctacatacaagccactctattctcagagcaagctctgctgctcatgctttcagcttcttttgtttagatcagacatgcatttccctgtttttctatcaaccaatcttcactgctgcttccagctttctctgtcaagcatgccttctttggtaattaatcctgtctttgccctgacctgtactatttggatttcttgtctcaatttctgctgcatttaaccaagtacttactaaactcccactcaaactatttggcttaccacttaatcacccagccagatacagatctgaagatttattccaaataacctggcttaatttctccaatcaacgaggcagagccaagactttcttcagttaaccctgggtacatgtttccatcagccagagattatgactgcagcaatattttcctctgtctgttgtgtatatgtacatacagatagagatagggagatgaatacatagtgtgtttttaaataaaagttaaattatagtatatatatatgctcaggatttttttattacttaaaacaattactacaacatatgatgagtgtttttctttgatattaaatgttcttctagaaacaacattatttttaattgctgcatgatatcccttcttatgaatggacaatggtttatttccttgagtagtgttgtggatggtcagagaaacagggtggggaaagtgggaggagagtatgtgattaagtcctggtctgattcccaaacctggccttcttggccatactccagcattataaaaagagagctggacagagacccaggagccctaggttctggtctgattgtgcggctgtggcaaagtcacttcccattttttaacctcaatttcctcgtctgaaaaataatgggattggatttaataatctttatgattctttgatcccactgacttaaccttggcattttccactatttcccaaggaagtcctagattgcttttaaccagattatttttgactgatgtcacttgagcacctgagtcattcagcactcactgatagcgtatgttaatataaggcgttcttcttttgtctggagcttccagaagtaaagtttagactgatagttgactcatgcattcagcaaccaatcgctgaataccataactggtatgttcttagtcttggtttctctgagctgagtaaggctgagtctcaaccttgtttcactcacagtctacagggagacagacatagaaacaggctcttacagcatgttgcaatcagtgctccaaacaagggcttaggaaatctaaggaggaattgcacattctgaggtatgattatagtggagtgaatcagatagcttaaggaagtatttcttttatattataacttattatttgattttcaaactaatacatgtttctgaagaacatttacaaaataccaaaaagtataaagaagaaaattaagatcactcaacctcatcttccagaaataattactgttataatgactgttaacattttatttttacttccctttatttgtttaaaaaaaatgtcctttaaaaatcataaaatggggtacatgttccaatacatttttaaaaagcgcatgggaaaatccaataaaaatatatatgatttaaatttggcaatagaatgaaaagagtaggattatagaaactcaatttctgtgttatgccagcatttttatcatgagtaattagtgacattgattcatgatactcatttggtgagtaaattagcaatattagtacattcacaatgttatgcaacaatcacccaattcagttccaaaacattttcattaccccagaaaggaaaccactgcttaagcagttagtcttgattcccctctctctcagcccctggcagctaccagtctactttctgtctctatggtacttattattctggcaatttcatacaaatggaatcacagtataaaaccttttgtatctggcttctttcacttagcatgatgtttgtgaggttaatccaattgtagcatgtatcagtattcagtttcttatggctgagtaacagtccttcgtgtgtgtataccacagtttgttcatctggtcatccactgatgaaagtttcagttgtttccacctcttggctattgtgaataacgctgctacaaatttgtgggcaattatttgtttcaattcctgctttcaattctttgggatatctacttacaaatggaattgctgggttatatggtgattctattttaacttttttgttttgaagacagggtctcactctgtcactcaggccggagttaactttttgaagaactgtcaaaacgttttcaacaaggtggagccattttacattcc

SEQ ID NO: 43985 - DNA, 3549 bp, Homo sapiens
ctagttaaaactaggtagttctaaatgctactcccattttacttgtattactctgaaggttaaatagttgtaaataagcaaaagaaacaacaaccctaattttaaaaaatgttatctcacatactagaattccatggcacagtcttttacatggcaatttagacacaaacacacacacacagagctacaaaaaaagtagattgacatgtatagaaaaggaaagcatgctatgatatattgggatgtggaaagcagcaaactgcaagtcaatacacatttacatacaaagatatatatacacacatacacatttatatacacatatcatgctgtcatttaaaaaatacctttttgcatatacatctacagtcatgcactgcataacaacttttcagtcaatgatggatcacatgtagaattgtagtcccataagattataatactatatttttactgtatcttttctatgtttagacacttaccattgtgttaaaactgcctacagtattcagtacactaatatgctgtacatgttcatagcctaagagcaacagactataccacatagcctggatatgtagtacactacaccatcaaggattgtgtaagtacactctatgatgttcacaaaatgatgaaatcacctaacgatgcattcctttaccataccctgtgtaataatggtaaataaattacgtataactgtataataaatggcaaataaactgagcatgatagtaaacacttcattttattttgctcatttaaatctcacaattcccaagaaaatacacatacacatttataattataccagaaaaggatactttctagtggttacctctggagagtggtatttctgtcagaacagggaggtgggtgggaagggtatgaaagggaagaatttcactttttatcatatattcttctgtaccattttaattttttttactcagcttataataccttaaagtttttaaaaagcagaacaaaataaatattcttttaaagcttttaatataaatatatgagattaaatataggaaaagagaacttttaagatataaacgagctaaaatattttcatctttaaaaagcaggtctttagattatgagcatgttgtcagttataaaaatagaatactaagattatactcatcagcagtctgttatacacattactttatccagtgagatgatgtcagaaggcaagcatgggtgtgtgacattcacatggttaaaggatcacatcactagctccgtttctttataccttaaaaggaagtttagttttgaagctgaagttcaccctatacaacattttaatgtcactgttctattaagataacttaatcctaacaggcttatacttaacaacaaaacaaatgccagtaaaaacaaaaactcatatttaaaatgcatcatcttcccaatctaatataataccattaattaaacacatattatgtgacacgcttttgagtagagagggatatgagggtggaaaaataaatactacgtatttttttgtgtttgagaaactcagtttagtaacagagcaacccacaataaataataaaatagataaaatttagtaggcatatctatcaaataatggaaacacagaagagggtagcaaacaaactccactagtcctggcatcataattatttttcttattttcttattctatagagctattctcagaaattgctgagaattcctaaattttactcaataagcaaatgaatgaatttacaggttttataggaatactagttacctaaatatttataaacccaggtctctaacaaatggaattcaagacacagtacaattaaattcagtgttctgtgctgcatatttgaataaattttataataaaatctacacacacatttatttacagaaatggtccttaatggggggcaattttgtctcccagggaacatttggcaatatctggagacatttctgcttgtcacaactggtttggggtgggggtgctactggcatctagtaggtagaggccggggcagtgctgaacaccctaaaatacacacagcagcttctcaaaacaaataatcatctggctcaatttgttagtaatgccagcattgaagaaccctgatttacagtaatagtttaccaactgacaactcaaactattaagcagactcaccatcttacagtcagctaaaaaactagagaagtgacaaaaaacaaaaaaacacaaaacacaaaaaccaaacatgaggttgaatcaaggcactacctattacagagcacatattatgtgtcaggcactagactgagaccttgcctctacagaaagcaagattacctctgagtaaagaaatctgcctaagattgccctgacagttaatcacagttgggctgcaagtctccatctgtttcatctaaagctcatgcttttcccagcacatcactaagcagccaaaatagattttatgaagtccaaagttcatggactttattcatgggacagcccctaagatcctgactcagggcgtactcactcttagaatagacaaattctaataagtttggctatcaggattttaaaatcatggcaacatagcaaagaaaggggctgctacaaagcttgcaccaaggccagagggatatatgaaaatcattttaaaaaggatatggtaaaacaaaaaacaaacaagacaaaaagtacaaaaagtttagagccttcattacagagatacactgcatactctacagtggtacaacggagaaaaggaaggagagggggaacagagaaggggggagagggaactgagaaaagagggaggaagagaaaggtgacaaggaagggtgaagaaaagagtgagaagatgaaggggcgaaaggaagaagtagagaagggatgagaaggagaaagggcagaagagagtgggggagcacaaatcaagaaagagagaggaggtggagcgaataacttagtgaaatactgtgggggaaatttagaccaacagaaaacaaggaaactgaagagagaagaagaaagaaaaaaagggaaactaatcctaatgcaagaaaacctgggacctagacagaaataaatgaagaatgagaagggagaataagaggtgttcaacagattcctagaaatgaaggccagaggtgttcaacagattcctagaaatgaaggcttttaagccactcctgttccaaaaagctgtgtatcttcactgtccaatgtggttagtagatactagttgcaagtgactatgagcactggaaatgtagttagtcttaattgaagtttgttgttaagtataaaccataaacttgctttcaaaactttagtatgaaaaaatagtaaaataacatttaataatgttttatactaattacatcaaatgatgttttagatatactggcttaataaaaatattaaagttaatgtcatgtttctttttacttttttagtatggctaccaggaaatttaaaattacacatgtggctcacattatatttctattacgcaacactattctagatttttaagattg

SEQ ID NO: 43986 - DNA, 4563 bp, Homo sapiens
tccctgaactttcagaataaaatattaagttataaaaatgtactcttgtagctaagtgaaagctgaccattcagtttataaaacagtaatcttacatcgtgataagcaaaataaaacaaattagaaaatgcactatgctttcactctagccgttgtcaacaaggagcccagctttaacaaattactgtagataacagtcattacgtcaggtacgacatagggtaaaaaactgatctcatacagaatgtctacaacaagtttttttgtttacttcctaaggtgttttatagacctcagaaactgattctgtacagctgaaccgggttacactccaagctacagcccgtgtgaaatatgacttcgtcggaatcagtaggctcaatcctgtttaccgtggaagagaaaagaatcttgtacgtaactactaaatcttcaacgagataatgtcgaataaactctagtactgtaagtgatagaggaaacactggctagtaacgggattaggtcattaaaaatatcacccgagtttccccagttcggaaggtgtaaacaaacccatctccactgcagaaggtaaacaatgaacctgcagcagggtgagggggcggtctttagccaactacagtcccagcggcccgggaaagggaagcagaagggaaacagcataaaccagacatttagcagtaatgaccagttctaggtttcactaccaagttatcaatgctgcgggtccccacaggacggtgggcaaaggggaaagcagtcacgcagtcggcaagcaccgagcaggtccggcttctgctccggggacggggagggcaggatgtggtcgctcttccctcaaacatcctcctgcaacctaaataacagcctctacctccctccagctgcccctagcttgggctgccggactccgggataggtgcaaaccactctgccggagctcgagcccagagggtcgccgggtctgccgagttccactcggggctcccccgcacccgcagcagcccgaggcccggagaagggctcgggcgagggaagcgggcgctgggtagggggatgggtccggcgaggcggccccgggctcggttcccgcgggccggcaggcggggctccggctctggcccccgcaccccgccggtcccgtgcggggcccgcccctgcctctggcccccagccccggacccggctcctccccagcagcgcgccctcgcggcgcccgcggcgccccgcgttacctcgggtcagatccagcgggacgttctcctcgccgctgtcattccgccctgcgcgaaacagacacacagccccaattaggattggctcgcaggccagctgcggctgccctggctccggccagcgccccggctcgctccccaacccagggccaggggaaggcaagtgccaggggtggcgggcgccgggcggtggggagtgagggttgcagcgggcttacctcgtactcggaggttcttcagagagcggccgcggccgatcgccgccatattgacgggtttcagtcacaacaccggaaacctcgcccaatcgcgcgagaaccccttcccctccccgcgcgccgcgcccgccccccgcggcacctcccccgccccctcggcggcgacggcggcgggtggtgcaggctcggccccagcgctgagggagcactgagccgacccaaggtctgcaaggagttcgcggcacccgcccgcccacgccggacccggagggcacgtccgccgggaggggcagttcccacgaggaaagtcccattgatgcgagttggcagtgtagaggatgctcccctccggccgccgcggaagccgtcgtccaaatgcaggcgagcggggaggaggaggccgggatgcggccggcgggccacctgctctcgccggcctgccagtctcctgcttgctctgaagccctgccatagacggccccgctcccccgtgtatccactgaaacatttttttataaaaacgctgcgcacagttttagactcctttcctggaatcgctttgctccaactaagttaacacgtaacaaagtttgttttccagcctcgcccttgatcttcagaatgcccctctcggctaggagggcttctccaagtggaagtggttaggcagttttgtttttggccgccaggcgtaggacgcgagaagggggtgcagcggccggggaccagggcggcggtccccgcggtgggatcgcgccagcgccgggaggccggggagagggtgttctctgccgggagccgaggcgaggctgctgggtactgtgtccggcttttatggctctgcagctcctaggatcgtggctcatgcaggtgttgtggattaatctattttatgcataagcctattaacattagggattttaattctagaaactgcttagttaatacgtatgtgtacacacacacacacacacacacacacacacacacacacacacacacacacacacacacacacacacacctggccactgacccagcagctttctcttgaactacatttactttaaagagaggagcgatttgtcctctccagttcctcagctcatctttctattccatgagactgaaagttaattaaaagtggagatctagccttaaccagttctgttttcccagctcccagttaatgcaatatctggcacaaataagtattcaataaatatctgttggatgagtaagtgccctggatttctaatttattccaattctctgcttactttaaaaaagaaaaaaaaagcaatattggggatatttgttgaagttgttaataagagtgaacatttggaaacacttaaatgaccaaaggtagggattatgtaaattatgtcaacgattaaaagtgaagaggtagacttagtaataggaaataatgttcatgatattaaatcaagcaaaatattacaaatttcctgttttataataaaagtttaaatatgtacgaaattaaaaatatacattataaaatattttatatgtacatgtatgttgaaaaaagtctgaaaatatacatgaaaatgttagctgattttctcccctcatttgtggaattacacgtgcacttttttgttcttgtttgcttgtctctactttttaaatatcctatagttaatatatgtcatttgtaaaataagtggtaagaagaaaaataaaaggaacataaagtagcatcatctggaaaataaaataggaacactgcttccttagaatattgccaattatctatatattccagttctttttttttttttaaaccaagtctacaatcagatatctgcggctgatactgcacttagatttaaggatgtaacacaattacagtactttaaagaaatgtcttctggcattaccagtagtagttttaatgtcaacaagcgtgctccctccgttatagctttaaaaatcttggtgcaatttatttattctagttactgcctaaaacaaaaatcacaaaacttgaggtctggcagagggttggatttcaaccctccatgtatcaccacatttcacccttaaagaaaagtagagatctatcagtagaaattataccagattcttacagttgttctgattttcaacaaatcttttatcatattataaaatccctctatattctacattaactccttcctaatacaatttaacttcattttctctcggtgttttatgaaagttgagtacaactaatctacttttaagttacttgaggtacataagtgcctaaatccagtagtattttaatcattataactgtatgctattaaagacaattattcaattactctatttcttgcaggagaaaaaattacattcaatctttcatcgaaactagttttttctctgttactatttcagtcgtttgagtggttaggttctccatatttgctcttagagtgaatggcaggtctggtgaaaaggaacaagttattagtgtttgcaagtgacactcaactaggaagcagaagtttagataaattttagtaaggaatacattttataatgtgtttgctttttaaacagtagcactactttattgtttatagtcagattgatacttgttaaaacccctaaattttcttctttgatacttgccaattgctagctattcctccttttgaaacttctttttcttccttgcatcttttagccgacccatatgacttactcattttgtttacttcttactacttctccaatttttattttgattctaatctggtcattgagaatgtgacttcctcttcttagttttcgtttcccagctaggtttcatttgctgtgtcagtgactgtttttttttttctggtagtattagtcattgataaaaaatgttctataagaagatcgagtccaggaccatacctttggaagataactgcttaattctgaggatacaattactccattcatagtcactcccttggttctattctctaccctcctgcatgcagttaataattctagtatataactagaattctagtaataattctagtatgtaaaccatattttatcggtttgggatacagttgtaatactgaacagaa

SEQ ID NO: 43987 - DNA, 2608 bp, Homo sapiens
gcatttaaaaaattgaatttacgataaaaacaagtggaatttttatatataaacttcgatttcagcttctcttgaaaaggaggagaatcaacactgggctcacaactcatcagagctgagtcatacgtacatcagcaggacctacgtgggaaccaaatagcaaactcaaattgggaaatttgaggaaggtttcattcagtgattgtttacaaatgtgtgaacagtatgtcaggaagccacaaagtaaaacacagtaccctagggctggtaaacacaggaagtggttgcaatcctgaaggggcaagtccagggagaagcactggaacctagagagccagcacaatgtggaaaagcctgtccgacagagctgtggcctttgagtgaaggacaccgccaccttgtaaggatttccctgagaggatgccgaacaaataaacatccaaacttcactccccgtccctctcattgagtgctattgctcccccacgggcccagtgaaactggcagctgaagtcaagggaacctcttgagtccagtccataaaggttggtctcaaaaggcacagaacaggatggagaaggttggagagggggaatccagaggaccaaacagaagatacccagcataattagcaactcattcccatggacagagcttatattctacagtttgccacaggcccctccctaccttctctactgtctccataccaaattaccatttatcatcatgccaatatgatgtttctcacaggacaaaactaattttctaccaatatctgtatcaaaagtgagcaaggaatgataaaggaccaaattattcaagaagactgagggaaaacaatacatcagagaaatattagtatgtgtttaatatgtaagcagaatataccttgatcttcttttaaaatatttttggttggttctggtggctcatgcctataatcccagcactttgggaggccaaggtgggtggatcacttgagcccagaagttcaagaccagcctgtgcaacatagtgagacacccatctctacaaaaataaaaaattagccaggactggtggcacatgcctgtaatcccaactactggggatgctgaggtggaggattgcttgagcctgggaggtcaagagtgcagtgcgctatgatggcaccagtgtactccggcctggccaacagagtgagactgtgtctcaaaaaaattttttttatataccctgtttcactcatgaagtcaagtttgctttccctgaatttttttttttgaggcagagtcttgctctgtcgcccaggctggagagcagtggtgcgatctcagctcactgcaacctccgcctcctgggttcaagcaattttcctgcctcagcctcccaagtaactggaactacaggcacatgccacgacacccggctaattttttgtatttttagtagagatggggtttcaccgtgttagccaggatggtctcaatctcctgccctcgtgatctgcccgcctcggcctcccaaagtgctgggattacaggcgtgagccactgtgcccggcctccctgaattttttattgggaaattatctttccaccactaagtgtagtcttgtttgggaggataattctaggtgactttttgctactatgggagctgaagggttagaaccctcccttcccccaccacatggtcaggcacatgactcaagcacagtcaatggaattctctctgcagggactttgactcatgagtaagttacttaagggcaatagtaaatttctcttgcttgctgccaatcatgaataataactgaatcattatctaaactgaggagggagaccattaataggttgatatttaaatatactttccaacttttggaaacttttctaactcagtaggctgtggagagagttatagaggaattgctggttgcagatgaacccccaaagatgagaagtacctgttgagcatttatccatttctcaaatttgcaaataaagctgaagattgtgcttatgctccagactactttaggagaatgtacatatagcctactgttttcctggagagaacagaatggaaactgttcatgattgtgcaatgtcatcttgtacagatcatgaccttcccaggatggcccacagataaccacgagcaaggcaaaatcacaaaggctggctatgttggcctgaaggacgataagtattgggccgcatttactccagaggcctcagtctggtcggctgaatttttgtcaggcttgcatcatgttcaacctctttctctgaccaatctttcctcctccccttcctttcacaaatattgatccttaatagacatctcttccctcaaactctatcccatctgtttccagaaagcctgatgagcgacatcattgcaatcagcttggtcttgattgcttcagtgaatctttctcaggtggccaatgacttacatgttggtaaatcaaatagagatttcttggtcatcaatttatttaacctcttatggcatctgaaatagtaattaagaaaaaattacagtggcagcccacaggattaacacagtccttgcagacacatcattcattgattctttaattattaaatatataatg

SEQ ID NO: 43988 - DNA, 3155 bp, Homo sapiens
ctatgtgacatttaaactttcccttccacgctttttaaaaaaattttaagcatttgcaaaagttgaaattaaagttggaagttaacaccaacgtactgccacctacattctctaatggttagcattttgcatccttgctttatcacatctctccatttatccattcacctgtttttttttttttggatgagtttcaaagttgcagacttcagtacctttttttataccaaattttaaccacccctaaattccttccacacacgcacactcaagacttgtccataacctccaagcaggatgttattcatttaaatatgaccccattttccacacctagatactgcttccagtccaaacatgtccaaaatcagctgcctacgcagaggacaaactttaccaaaccttatcctgactctttctacatacccagaactgtatactttaaagccaaagggaaactatctgaactgcatcaccaactccaatgttttcaggaacaaagtaggtaacataaaaagcaggcttgtggaagataaatccagtgggtctattaatgaagaccaatccagtctcagtgtggaggatgcaacaagaagaaaagagctactcagagaacttgagaaaacagaatttactgtcaaggtaaggcttccacactcaaccagctagcttcaaggagccttgaattttaatcagtatctctcctttgtttccactgatgatctaggtcacttaaaggtccaaatgtattagaacagttaacatagtaagtgctccgttaaatagaatctttctttaattacaagtatttatgggggcagtatttatagccattcagttaaatacagatcttagcaatggaaaggtaacacagatattacaaatgcaaaaatatggtgtgtttctagtttgtgcaaattacctgcccaagaaggcattttttcctcacctatagattgactacctgtctgcaatgaacccaaaggagaaaccagtattcacagtgatcaaaagggagacctagcatcatttcccaggaatgtgtttgcagccctccccacctttttttggtgtatgtggcttacaaattaaaaagaaggacttaccgtgtggaagggtagaatagtgagaaaaatgagaatattgaagagtcaaggagtctagaatattacgtacgggttttcatgccgaattagccatcaagacatggttatcctggctgttttatgggaatgccctacctctctccttgccctgcttatcaaattagctcagggtggctaggttttacaaccatctgcagtaggcatggttggtagctacaggtggactttgcttagaaatcggaagctacgacgatttcaccctcacagtcttttttgttggtttgcttgatgattaagacatagtttggaaattccctgtcttccccttctctgcctcctagatgactaatttgagcagtgtttattgcagctgtattgtgttgggtggctatgttctgctattgaaaaaagtccacccagcctgaaatgctgtctcatgtagttgtgggtacatgtgataaaattaatttctctcggatgaatgtcctcttgtgataaagtgaatgtaactacttttatttcaaagttgcaatgagtaaaagtgatggtagttcttttggactatgtccataccttgaaaagtcaaacattttcatgtaagttcagcctcccaaacatctgtgaaagtgttttcactgttttcactagatttcacagaaataatttcatctaaatatctgttatagatcagattcagcagatgttaatttcatctccatgtcttttcacttctgccagaacttgcataagggctgaatttattgttggcttatcagtttctgtagctcaaatctgagtatagaatattctgaactctggtttaaaattccattagctagttttaaaaggcatatagtaaaactctaaaattttttatgagaaaagttaatttttaccaatgtttttaaacagcatataacagtttttgggaaaaagtaggacttataaagcaaaggtcctaatatgaaaaaaagagaaataccctttaaatactttttaaaaagtctctcttcccaagatacttattttgacttaggttcgtcttgcagaatttttttttttttttgcatgtagaacttacaaaatcttttagaaatattttgtgtagattttgctgtgtgacaggcattatgctgaagatattcacacataaacccatgcaactcttaaaataaacttaacaagtaggtatagtgacttatcgctttttacatatggagaaattgaggcacagagaaggtaaattgtaatgagaagaactgaaatagaaatcaagggagtcaagctccagaagagatcactttaaactttgttcactagaagtttaccaattttcgcttagaattccaaaacaccagcataagtgatgatcagaatgggctaaacagtaaatgaataactaaagcagactttgactggatgtttcaatcatttggagactaaaaaaaaaaaaaagtacctgagccaccaggccagccaaatcaaaatctctgggcttggcactcaaacagctgcatactttaaaattcaacaggcagttaaaatgggcagccaggttgaggaccactgatccaaagcgtctttagctgtgtctgggtttgggagatctcaaacttgagcgtgcatcagaatcactgggaaggctttgttaatacacaggtggctgggccccacctcctttcttatttagcaggtattgggtgcggcccaagaagttctattaagttcccaggtgatattgatgtgctggtttgggagcacactttgagaaccaccgtcttaataggttggagtaggggtgaagtgtggtaatggagacctggaagtaacttgattaattctcctagtgtctcatctaccctgatgctgaaacatttcctctcctttgttgatttactcaataccattaatcagggatgaagggggaaaagagaaacgaaagatatgaagctagccgggcgtggtggctcacacctgtaatctcagcactttggaaggctgaggtaggcagatcacctgaggtcaggagtttgagaccagcctggccaa

SEQ ID NO: 43989 - DNA, 888 bp, Homo sapiens
atctcatcttggacacacattatatttttctgggaatccaccttaacctccccgtgtaatttagttttctatatacatattcttatagcatcttgttctcatatttcattgaattaattattcactcatcatttatctattcatcaaatatatattaatttcctattattggctaagcatgggagttataatggtgttcaaaacaaaacaaaacaaaaaacatgatccccaaagtaagagtttacattttagctaaaaataccagtgagcttggggactttcctgttttgttcagcttgaatatcaaatacctgaaacataataggtactcaggaagggtttttttttaaatgaataattgaataattgaaagaggaggaaggaagtccttagtcatggggttttggccaaatctaggcctgtatctctctagggtgtgatctcctggggaatcatccacatggtttttgagcaaggattgcaaggcaggcttcctggctggaggtggcatttttgtaagcctggcccttgcctacaccttccagaatatctggaggtgtgatgagcttcatcttctaaaattgcaggctaaaaatgtattacatgggatgccaaaacgtctagaagaacctgctttcttggaagtctgagtactagtgcatatctgaaaccacatgactaagaaattctctgctggaatgtttccataaaactacagcctcatctggaactgacaggccacatcaagaggcaatagcacatacaccttaatgccctatagcagtgggtctcaataccaagtacatatcataatccttagatattaaaaataggaattgtaaaattgtgatccccattctatactgattaaatcaagctctctgagga

SEQ ID NO: 43990 - DNA, 4156 bp, Homo sapiens
ggacaaatacacaaattatcctatttggccaaatgtagttcataaataaatatctgttcacttgcatggaatataaaaatgaaaaacttaggcaaatataaccaaagtaggaggaaaaagtgacattttaaatatctttggtttgttagatatccaaaacttttctattaatgaatgtttggatatttttccagattgttgagataaattgaattaaaataaattaaataatagttgctaacatttgtgagtgcttatatgtgtcacgaattcttcccttaagcctttgtatttatcatctcacttaattcttatatcatcccttagatatctactactattattattattattatactttaaagatgaggacctgagccacagagatggtaaggaattgccctcagattagacagcagctacttggtggcagagttggaattgaaacccggacaacttctctccagagcccaggtaactagtcactttcaggtcttctaaaccccaatctagtactccttagttatttaaaaagtgaagaataaattaaatatgaaagtaactccactaaaacataccacataaagtcaaaggaagaatgacaaactgggaaaaatatgtgtaattcatatcagagacaaagactaatttatgaagtgatcatagaaatatgtaagagaaagacaggagactcaatagaacaatggacaaaggaaatgaatagttcgcgaagaaaaacatatatatggcctttcaatgtatgaaaaaaatgtgcaatctgactcaataagagaaaggcaaattaaaaccgtgccaaaatacctattttttttttaacctatgaagttgacaaatatcaaaaggttggcctgtggttcctgtcgcaaggctgtgagaaacaagtactcttactctgctggtgaaagtgcaaaataatacaaatagggcaattttagcactgtcacaaagtgattatcttttgactcagatcactctgggaattaatcctcaggtacacctaaccacttacaaaatgatatataaacaaggatattcattgcaacattatttctagtgcgaaagattggaaacacccaaatgttcatcagtaagaattaatcagctatgacaatgaggaagttcccacatattgactcagaaagttatccaggacatgccatgaagtaaataaaaaaaaaaaggaaagtaaaagaaagtaaaaaatagtatatataatatgatatcatttgcaaaagactgggagagaataagattacgtatgagtctatggtttaacctacaaaataagtactggaagaatactcagaaacttatatatgtgacaacctgtagaggtaggatgaggtgggagcgaagaagtgtttttaaactctttatatatactttacatataataacacaaatctcacggaaagttatgagtagggaaagtaagatactcaatgtataccttgttttatttttgatctttgaaccatgtgcatattttgttatttacaagttagagagaaaaggtaatgatagctacactcacagagcacttcctgtttgcctggcactgtgctaagcatgttgtctttgttatctcaggtattcctcacagcaggacacattattattcccatttagcaggtgaggtacaggtttagagaagttaaggaatttacttaaggcgcagagccagtaaattgtggagctgggatcgaacccaggccacctggctccagaagcaacgctctgagctactattctactctcatggtggttttaaacattgatgctctaccttgagaaacataagagatgatgtccccctcatggccagttctcatgggcacattaatctttgtaaaaaaataaaagaaaaaagaaaaaaacaatagttagaaatccctgacagttctccagtaataataggtcactgtagctgtggcatgagatgtcttcaagccatgggagagccctgaaggctagctgtaattccaacccttccgtcctaaacaagaaagatagcaaagtgaaagcacaggaaggttattattttttttaaatacctggcatttattaagttcttaccatgcgccaggcacagatgtcataaggacattacatgtatacctgtttaatgttcacaacgaaaaccttattagacagatgctatcattaccattgtgatgagttgaattgtgcctgcccgccaaccctgaaaggtatgttgaagtcctaaccccagataattatttggtcctaagtgtcaaataagactgggaccttatttggaaatagggtctttacagaggtaatcaagttaaaatgacatcgttagggtgggccctaatccaatatgactggtgtccttttaaaaaggggacatttttataaagacatacacaatgggaagatgatgtgaagatggccatgtgatgatagacacatagactgaaatgatctgaaaccaaaaaataaaatacaagggagtgctggccaccaccagaaactaggagggacccttcccagagtatcggagggagcacggccctgccaacaccttgatttcagacttctaacctccagaactgtgagacaatacatttcttttgtttgaagccatccagcttgtggtgctttgttatggtagtcccaggacataaataaaaccacatcttacagacgagggaagcgaggtacagagaggccaagcaacccgcccaaaatgacactgttggtaagtaaaggcaccttgacctgagcctgggaagtctagcttcagaggattttaaaagttattttgcaaatttcagttagctattattcaaacaaatcgtctcacttcatgactgagggctctgaacactctgttttgacctcaacccccgtcaaagggcaaagcacagagcattcagagcagggcaaccggggcaaactcaagagggcatagcaatgggagcccacgaaaccaaaccaaactcagccgtgcagctgctggagctggggtccagctaatggggctttccggtcctccctgaaacagctgagtgtggccaggacccagggggtacgcacttcaaagcaatcaaagcttccccacagcctctcatttttgatcagcaggagctgcaatctaggaatgtgggttgtttgaattattattattattttttagcttaagaaagggtcaggtgaagttcaagggagctaaagcaacttggaggaactgcctttccaaatcccttttgtgcccagatgcccactaaacaaaaatatttcctgaatggtacaatgctttacagataatatggaaagaggagggatgaaggaaaggtctggtcgagcactggatccagggcccatgttcatctgtgtagcacctctgggtgccccctcctgaaagatacagccctgtgaataacccacttgttgagtggagcccaggctgaatggcggcctccaactgcagccaagaggcaggcaaatatgtactggagacgggcatcaaagttcaaaacagcatttgggtaaaccaagagtcaaatgactaatgaggaattggaagcaggttatggttatgtctgagcagaggaacagggcttgggcagacatttccccccagccacactgttgaagtgaggaatatttcagtactctccccagaacggatcatcctgtattgaattatacaggtcgatgtctactctgatgactccaggatggaaggaaggatgcctcatgtgaccctaacctccaccatttctaggtacagtgtagctgttcaataaaaacttattatatgggtgatttgtttcctggatgacttgccatgggctttgcaattccgattaggatcagagaaaaaggagaaaaagtatctttggtagaagcatgagtgacaggtctgcatcactgcaattctggaatggaagaaatatgacctaaatcccaaatggccctaaacaaaatgcatgcctctgaacacaactcaggatgtcaagggaaagaaacaaaatagttaacctttgcctaatgtggaggcaaaagggtgatgtatccaaatgttaaaggtgtcaggcattgaagcagagtgagggaaagattaatttccttaattttaaacttctcagacatcaggcactaataa

SEQ ID NO: 43991 - DNA, 2026 bp, Homo sapiens
gtgttttgaaatgaggcttatgtttctgtgtgtatgtcagagaaataaagcatcatcatgcattagactagagcagtgaaaatagtaacattttcatttgtataacacttaaaggcttccaaataacaaaataaatgtttattgaacttctaatatgtgtcaggccatatttatatatgcaatctcatttaatcctgaaaataatctgttttacagctgaggaaatggagacacattgagattacatcatttgtccagcgtcagccagggacgagtaactgcacatttgtacttgctatgtctggctccacatctcaggcttttcctaccttgctattactactattgttattattttaagtacgtcatgttgcttatagggtactttactataaaattcgttactgagtcctgtcaactccatagaaggtaagcttttattctagtctcacagatgaggctcagagaaatacctgcaaggctacacagaagaggcaggggtgagatttgaacaaaccatgtctttaaactctgattccagggttttccactctgctgagggttttcgccattcagttgccctttgttcccttcttagtttcaattttcttgggaactttgtgatagtgaactaagttttttgcttaataatacttttcccagtttttaaggcaaacatagacatatgtacattaaaactttgaccagcaggcagaaacacttaatttttactgatttgatataaatatgttgagggtcatttccatttgactcttttatagtgaaggaaacagtttcttgaaagtcccttagcagtaagttaagggatcttagtatccagggatctcattaggaatgcctgccccattccatagctgtttcttactgactgtccaaagatccacaggtcttgcaatgccacagtgaaattttagagcttccactaaggaggcagcatcagacacacccgagaagcatcctctactcaattccagcccagtcatgttaccctgtaacttttagagcagcaatgattctgctttcttgtaagtaagataaaataatggttgaaatcaaccaagtgaataaagaattgacagaaaactccacaaccaatatcacaaggaaaaattagtcataaagaatttcagagttgggtttttttttcccttccatttttaacaacctcatctttcatctctgcagaaggccagcttctttgccactgagcagcccacaccatggtcttgctggagacaagcacttgtatgatttcagtatgtggtagaggtttagtaattaaatgcaggacacaattccaagcaagggcaaatgaggggcttggccactcatcaggtgagatgacaaatggctggcccttgtccatcagcgttgctgtaattacaacatgttaacagagctgctgccagtacatagccttgtatatgtccctaggctgatattgtacatatcagcctagaacatgagtttttatttttagcagaagggaattagttcaaaacataccatttcccagcaataattatttgttttattgtttagcaacctcctcaaatcgtaatagcttaaatatttaccaggggctttggggcagctcccatcttttcccagattttgtattaaacgtattccgggaatatgggtcagagtcctcactcatcaggttattccacggtcaaccacactcctgggttagctacatcctctgttccttccccccttttcttttccttccacctcaggaaagacacaaaattaccctctgtttggctctctctagacaccacagttaatattttgatggtaaagtctgagatcaattgatgaaaggatctctctacttcaacacacagttttgtaataaaataccatgaaaaacactcccttaagagttggggtagagtgcagctttttttaaagcatggatgccagtcttgcctgagtaagacttgcaacagtaacagatccctcctcaaagggttatgaatggcatcaatggaataaa

SEQ ID NO: 43992 - DNA, 1354 bp, Homo sapiens
tcctgcagataccaaaatctgcggatactcaagtccgttatataaaatggcatataacctatgtacattctctcatacactttaaattatttacagattacttataataactaatataatataaatgctgtgtaaatagttgttatactgtattgtttttatttgtattattttaattgctgcattatttttattttattttctattcacatattttccatctgtggctggttgaatctgcagatgcgaaatctgaggttaggagagccaactgtataaggaacaggtgtgtttccactttgcagggacacttcagtaactgccactctctgcttgatcaacagtagttccgactgcactgaaaggaatgtccgcctcttgtacacacgagcaagttaacctgtggcaagatctcacagattaagtcacgtggagataacacacaggctcaacgggttagacgcacggcagagcacctggataagccagataatttgtgcaacatattcttatcagcagccttctctagctcatctgtggcttactttcaattcccctggaacctgcttttgtatggagtgtatttctattccacctcactattgttagaaagagaccaaatgtttcagtcaaggagaaaggtaaggcagtaataaggaacattccaaaatattatacaccaatagataatcctaccccaaaatgtcttattccttagaaaagttaggtttaataccaagacttctatatccatgcaaagcccaccttgggattctctttcttgtagttgcaggtctttttgcagtgaatgagaaccttgaacttttatactaggtgagacagtttaagagcgccctaatgctaaaaacatctgttcatcagcccactcacctcatgcaacagctctccagaggggcctgtgccagcctagagcagtccacacagtcgtgtcttggtgaggtcaaatatgactgagtaaaaaacaagaggcagccaagggtaaaaggcatgaaccaatagtgcactaatgagtgattttatagtggatgtcagctgaggttgttctggtacaggtcttatctactagtcttccttacactcccggaaagggagtgtgtgtgggtttgagacagaagaaggtgtgaaatagatcagacggtaatttactcacggtcctatttcatggatttccactttctcttcactgttgtgacaatccagaatctattatagctaacattttctccacttcagactggtatgttttatagcttgcctctaatgtcaactcaaagcaggtagaataaaccgatggtaccacatgatattctgccactccagtttattgaaatga

SEQ ID NO: 43993 - DNA, 1152 bp, Homo sapiens
actatccttccttcatgacctaaagaaggaaggacctccaaagagaagtctagttcattcaatttagtccatacaatccatcttgactctgagtgtagtttactccttctattggtttgggtatatctccccttgaatggaaggtgagaatgatctctggtaagacttctagctcttaaatatctacttactgctttattacctttagaatcacctgcactcttgttaaaaggaagcatttccttggcaccaaagagaaattccttagggctgcagtaggacccaggaatttgcatttttaatgatttacccagttctctgaagcagtttatggaaaggtactacaggaaacacagtcattgtagaactggagttgagggaaaatgatccagatgcctataagctcaatcttattgttttcgccacgtttaagatatctatctattaaaaataattacattctagatgagccaaatcacagtttagtagtcctgtttggatgagacaagattggaaaaaaaatgggcttggtttttgttgttgttgttgttgtttttcattatttctattgttctacccctaccagctggcctacctgctctaaaatggggagagcgttcctttccctactaaattcagtcttttgagatcagaataaagttgctgtcaccttctgtagagaaagagttacactgagccctcccaggatttcagctgagggtgattctacctaatcacttatctaagataaagttcatgagacagaagaatcaaccttcagactcattttgagctcctactgcctatgaaggagatctttaatagttgttaaaactttcagatttaataccatcagactctttcagactaactttgagattgctcacagttaaatggtagagaagtaatgatcataatctgttttgctgacttggtggcttcagaaagtcaatggaatctgaaccctttataggaaaccaaattattactaggttgttttgcaaccacttcaatatgaaagtaaaaaggttagaaacctgtgatgtgttgttttgagttttacttcccacacagaactgaaaaaccaagaacatggaataagataaaaatccacatccccaagggtatattactattttttgatgtgtttag

SEQ ID NO: 43994 - DNA, 2318 bp, Homo sapiens
gggtagaaggcagctcacttacagacttagatccatctgtagagaataattggtttaaacttaatagtcaatattcaaatgtaatgcatttgaatattgtcacttgcatccataaaacttttagcagggtttttaatgagttgaatttaaaaaagggattgggcctagaaaagggatctgaggaccaaaagtcccctagttaattcctttgattacctttccaaactggggctctgttgaagaaagtgtctagcttatgttaagcaatggggtctgtttgaaagctctaggatggtaaaaatttcttacaaagggaagcaagtgagtgcagcacaaggaggaagtatacaattttctcactcgttgggtgtagtctcaggtcccttcagttcaaaaagtgcaaaattagtcaggaaatacacccaaggggtgttatcacaaggcaaggattacaaatgaaagctcaaaaacatataaaaaggctcacaagcacagttccccatctaaaaatagctagtttgttatcctggttctcagggactggctgtttccttcattagaagattgaaaagagaagtaagatgacacatgtaaaaacaaaggaagatctaaagttatcttatagtcctgactcctttttaaggcctcagatagaacagaaagctgtaaaggaaactctgctatatgaataaaattagcttccatttaagtgaagatctctaacttggattttggacttaatgcaaatctccctgaaagaatgcagagacttcccccttctgtgggactagcatcagatgactgcaagagattctggagcttgcaacatctctcctggtttctgagaaggctctgagaaatttattctggaagactgcatgagtcatcttagaatgactatgggctttgcaataataaaaatcagctgttgcttagtccttagtgattcatataaaatgtctagtgttttgaatccttcaattgccagcatggtggacaatgattagtctaggctttataggggtaaagttggttggcacttcttatatatccttatcctttctaccagtaggaatgtgttggcatcagcaatggtactacttaatgattccaaggttttgaagcaatatcataatacaagtgtcaaccatcctcccctgtgactcccaagcctaccttcttaccctaattatacagagcaggcaggaaaagtgctttgccagtctcaaaatgctggtaaaaggaataacttgagttaaggacttagtggtagccccattcaacagatggtagggaatttatttttaacattaaggggaatgggacaaacacctagtataccaaccactaagaacacttattccgaaaggcctatgaaacagaatgtgtctctctttttttttttttcttgagatagagtttcactcttgttgcccaggctggagtgcagtggcgcaatctcggcttactgcaacctctgcctcccaggttcaagccattctccttcctcagcctcccgagtagctgggattacagccacccaccaccatgcctggctaagtttttgtatttttagtagagacagggtttcaccatgttggccaggctggtctcgagctcctgacctccctcaggtcctgcctcggcctcccagagtgctgggattataggtgtgagccaccgcatccggctgaatgtgtctctattttatgaataatgaaatggacacagcaacagaaaatcaatccgccataagccattgggctcaaagtgagcatagtctgtgttttctcttctcttatatatactgtctctcttgtcttttcttgaatcccactgattttaacctggattttataagctactttcaaaaagtcatcatcccactgacattaacacaccattaatttttagcaagaagccacatataatagacacagggaaaggaattaaggagactcaagaagaaagcaacataaacatatttgtttagaatgtccagtactttgtactggacagagaatgtgcttccttgtttctttgaactttctgcctgcctcagctaaagtgcggaattaggacaacatgtgaaatattaacctctaagacagacctcggggtccaagagggcagcaaacagccttcactgctatcttcaaagtagctctttaagaataggggtcattaccagcgatgctgtagcaaagttagactgtttctgatactttatgcaaatccttcctttaactgcttttttggattcttatgcttttaggaaggctcttctgctctgcaaagaccaaactgagcagacagta

SEQ ID NO: 43995 - DNA, 1182 bp, Homo sapiens
caggcaggcaagcaccatataaaccatgctccctgcgccgggggatataaaacaagtttcttaagtcccttgggtagatacttccttaggaatgccggtgtaagacaaaagttcacattttaatgccatatgttgtcagtcaccaggaaaaagctccttatgggcacaagccaggtccccagcctttgtcacacagcaaaaataaacacccttcgaggagttaattaggcggtcagcagccacctcagtgtcctaggagggctgcccgcagaccttttacacacacacacacacacacacacacacacacacacacacacacacacacacgacacaaaaggaggcgtttgttaaatgtcacaagctgggcatctggagtcggattcgaaaggtaaatacattccgcggaagcattcctcagatgtcaggccacaaaactgctggtttccccaagcacagggtctcatttctaagattccccacagcccaaggtctgtactcaaagaagggtagcggggggcgggggggtgagagagggggagcaaaggagagaaggagatctttaaaaaaaaaatggagccagagggaagaagggtttcgaagctactcaccggctagctattgcctccgtgaagcgagcatgacttccccgcgcccggagcctccaggctacagcgcagcggatgcggcgggcctcgcttaaatagccgccggccgggagcttcggagccgcgcggccactcccggcgagagatatggttctaatcagatgctggcagctgaggactccccaggaatgtgccaggatgtttttgctgcctgggcttggtaactccccctcaacgtgtctgcagagtcttccaaacttaactgtttattaactcgcgctgcagcggcgcagaggaccccgctcccctgagctccgcgagccccaccagctgggggcgatcgcagggacccagcgacgggaggggaaatgtgttcggggagaagtcaaaagccccagaccgacgcgggcggggggcgggtgcaaataaggacaggaaagggaagctctggaggaaaggggtgggatccaccgagcttcgtttcacagatccgttccctggattgccactgcgagtgatgtggcacacggagtcatcctaaccaacccgttggggccctttgaacaaaggactg

SEQ ID NO: 43996 - DNA, 1323 bp, Homo sapiens
attatcaagtgtgtaaatgcatcatctttgtgagtcagagatgtatagtgacgtatttacaggtgaaatgatatgataccttagattaaaaaaataacatagctcacctctaaaaatgagggaatagacaaaacaagattgttgaagcagagtgatgggtatatatagattcaatatacagttctatttttatttatatttgaaaattttcgtaacaaagaaaaataacgatcactgccaccattaggtgccccatggagttcattcatccatctgttcattcattcattcattcattcattcattcattcgacatttttcttatgccagttactgctaggttacctgtgggtgctgcagacaagtcgtaacctcactctaggatttctatgatttgtcttggagagcttcctacattaaactattttgtagaaaaaacagtattatttcagcatgtagaaactcagaattcagatgcaatatcatagtacctcatgattgagagagtttggctttgtttccccagttcctcccacccctagaggtagatccaggcatctggaggctggaggagcactttctggggtcaagtatcaattgagtcacttttaccatcctctcctcaatattagaccttatcagaatgcccaagccaggcattcttttgatgtccctaggtttgatgtccctatgctcctcaagtactttttttactgggttactgatttcaagctggagtcagatgatttgctaaatgacctcatcttcctgtctgtttcacaccacgggggtgaagagagcaaataggtacaaagtctgtttggcttctgagccctagaaagaggcctgtattgctgtcatgtgcttgtctggtgagatgttccagagtctgttttcctttctcctagattcataaagtcaggaaatcaatctacaaagctccaagtaaattttctttcaggggcatttttggtagtcaggacatggctgcaaagggcaatactacattatgaaagcactgctgatatttgggaatgggggagattcccttctcttctttatcctcttgcctctcaacaatcagtagcacctccaccagtggacagaaataggaatgggatagaacttggaaacaactttgatcttgatgaagataatgctattttgcattatttgcacacaatttttttagtttaatatagcttttaaaaatattttcaggctgaggtgggaggatcatctgcatatgggaagtcaaagctgcagtgagctgtgatcctgccactgcactccagactgagtgacagagcgagaccctgtctc

SEQ ID NO: 43997 - DNA, 1546 bp, Homo sapiens
ttttgttgttgttcctttttcttattcaatcttattgcagtgatgactgcagtaacatgttgtatctctcctcttcttacaacttaactttgacactgctcccatccagtaatgggaactatgtactctccacttgcatgtacttgtcaataatgttaatactttgtggtttttgaggctgagttataaaaggtgatttttaaccttgttctcttgggacactctctcaattcagcaaccatactgttaggtagtccaagcagcttgcagataggtccatatggggagaatcagggtctggtcattaacaggaaccactgaactgccagtcaatagtgagccccaactagccagccatgtgaatgagtcatcctgggagtaatcctgcaataccagttgaactgcccagctgatgctatgtggagcagaggtaaaaccttcacaaggatccctgtgaaaactgaagttttataagtgaaattaactatttattgctgttgttttaagccacagcattttatagtgatttgctattcggcaataagcaagtgtcacatgttcttttgggttaatggaaaacttacttttgaaaaccattttcattgcactacatttctgaatgttttcttcctgttgtatgagctaaaaataatccaagaaaagttgcccaactcctgagagacttggacaaacctgaaataatttttgttttgtagtttcattcttatgctgctctattaaaaaatcttgcttgtctgttttgaccagaaatatccaggaaaaaggcagttacattcgtttactctggacttgctgcaagagtatgaacaggcaaagtaacctttgcactatagttaatgttttccacggaatctatctgaacatcagactgcttcattgctacaagttattcaacttctattaattctataattgaatagaagtttgatttaacttgtggaattttgcttctaagaaacctgcttcttttatttggagcacatctcgtttcagtctttctttgtgtgtcatattaatagattttttaaacatttgttttaaacattttccttaaaaatatattttttttcttcattcttcttattcttgccatgttcctggtcataaatatcaaggtgatggtttctagttatccaggcttatgtagctatttaacaagctcataagattatcaactacattgtccacctgcatattttgtcatggcataaataagccatatcctgcaatggcattaaatcatagatatgataggattcatattaactatttgaaagaagcatgtggacaggaactcaaggaagtcacacaggtgagttattctttattgacaatacggataagtaattgacattattactttctgtatctgggaacactaaaccctagtgtctagtgtcacaactgcctttaccttggcttccccaacccaattcccagaaaacaaagcttgtaacaggggcttgtgtgtgggtgacttatttaggaagtgaccctaggtaactgagatggggactggaataga

SEQ ID NO: 43998 - DNA, 1524 bp, Homo sapiens
gagaaatacatgttgtgtactgatgtatattttagtgaggtggtaggaggcttacttattattttctgttttctcatttatttgtgcagctgggaaggcaataaatggaaaggtgagtcagaatgacagggccttaatcactgttaaatcttacttggtgacattaagcaagaagctctctaggctggttttattacctattctgaacctcaatttggggtccccaagcctctttgacttctttaggacataaggagaatctgaacactttattacattttaaataaagcttaattgaggtcagttatgcctccctctattaggacacatggtctgaaataaaatgttctttactttttatgacaataatagcagcttaatgtaggcccacaagttgtctcatgctgaggaactattctgattgaaagtcattatatgcattaaattatttagttaataaatatagtttgttaataattacaaaacaatcttttaaagtgaaaggctttaggagaaaaaaggaagtactatatttctggtgggataaaagatgagaacccttgcactagatcatttctagagtgtttccagctctaggattctaagctagggattggcgaactttttctgtaagggtcagatagtaagcattttagattctgtgggtcaaattggctctgtcacaactgttcagttttgctgttgtagtgtgaaggcagccacagagaatatgtacatgcatgggtttgtttgtgttctaataaaactttatttacaagaacaagtagtaggccaaaattggacagcagattacagtttattgacccctgtttttggtgatccctgaaattctgggattgtttactcatcaagcaaaggaatgtagagacagaaggaaagataaacaggaagaagtccgttttgtgtctgttaaaagcttatgtgtccacttcctattccaggtacagagataataaaatgactcactatcaatcatattttaaggtttttataaaatattttaaataattgaggttctcatgttattctatttgtcataaagtcaagcctagattcatactggccgttgttgaggataccggttgggtacagaatgagtcatggcagctttattccaaagagcatgttgcagggctccaagctcagctgtccttttgagattcctaactgaggcaagtagaagactcagtactatggagagaatgtcccagaagactgtttttgctttctatggcagaagctcctagttgtgactaaatatgtaggttctctttcttcatgtttatccgaacttctcatttgccactgcaatcccggccacctggattacatatttattttctggtcttttgcagctagttatggttctgtgtctaaactttggccagtgggatttgaagagaagtgttatgtataagtttagagaagtgttctggaaggggggtggggtgcttttcttttctccttcttcctattggttgaaatgtgacatgatggctggag

SEQ ID NO: 43999 - DNA, 696 bp, Homo sapiens
tgtataagcacattctttctgggtgtaggggaggcaaggacatagattgagcctcatggctacatgtagatttttgtcaagggccttgctttggttggaagttgttggttctcaggcttgttatattattacaaataattcattcaataactgactaaaagcaagccttgccttaaatgcagcagcaatgactatgtcacgaaccactgattatgactaatctaaaatccaattctttgtacttaatgccagcaaaataaagaaaataaaagagaaaattaaatctgagagttcccagttcaagaacttttaaaaacacccttctagaagcatctgaggagatgacattctttttccccagtgtgtggcactcttcttccagttaagccacctgacccactgcccttctccaagttcctgtgttacttctcagtctcacctgatgactcatcttgaccggagtctttttttttttttaaatggaaccttgccccgtcacccaagctggagcacaatggcacgatcttggctcattgcaacctcagcctcccgggttcaatcgattctcttgcctcagcctcctgagtagctgggattataggtgccgccaccactcctggctaattttttgtaactttagtagagatagggtttaaccacgttggctaggctggtcttgaactcctgacctcatga

SEQ ID NO: 44000 - DNA, 1322 bp, Homo sapiens
catatgaagacatactttagacagtctattaatatatattctatagcctgactcacaggttccaaatgccagctccaccacttacactgtgtgacttacgccttagtttcctcattcgcaaaatgaagacagcattagtatctgtgtcacagggttgttgtgaggcttaaatgagttactaagcacttagaacagcaccaagacataacgagtactcgatacatgctgcttagtttgacttcattcatatctgcctgagcaagagctcacagaagaatctctcccagggcaggaatgatcagccccaaactaaaatccagtttttgttctcagatacacaagcagaaaatagtaacagatcatttttttaatccaccttggtatatctgggtttttttctttccattttaccagactgaaattacatatcaggatgtctggttcaatactgggaacctggaaaccctactggctttctgctatgaattacatggattgggcaagataacctttgccctcaagaaagttgccacataatgagcagataggacgaacaaagatggaacataagtaaacaaatttagcaaaaagatttatttccagagcctcagatagctttgatctaaaatgcaaagggagcaactccccattttggcctgtttgcccccaggggactgaatcttgaagttgtatggaacgattctcattgctaacatcaaaaaagctggacacaaaagcttcattcaaggcacctcctctacaactgtaatcatacagttgaagtaaactatacttcattaatctttgggtaaatctttcctctagcatccaggattgtttctaagaaaaggctaaaaatatgacgaatttctctctctagattcattatgctaaaggattatccaatgcacaaagctcaaagactatctcacaggagcacacatagttccacaactaagcattacttaaaacatgaaaattccataaaaaatccttctgatttttactattttaaattggtaaagggctacttctttcccatgaaattactgccaaactgaaattagtaaatctatctctatttactctgctttcaagtattttggcagccattctgacatacaattcaaagcacttagaaaactgacaatacctgaatgtcaacaccgtggaagaggagtgcaaacttgatgttctgtactttattgtgattatcaagtaaaattaaattttatgttatcaaatacagcaatttctcttaatgtagtaagctgtataattaatgaactcagaaacaattaaatattgccattcaaatatat

SEQ ID NO: 44001 - DNA, 869 bp, Homo sapiens
gcactgccaactgactccaactccttttatggtgagaggatggattcttcgttatttccccgcccaatctggtacccacccacccacccacctaccacgtccgctgggcgcacccaagtctaaccccggggcgcacgcgctagcgcagacaccgtatttcttctcctttctcggccaaccctaggtagaatcctaaaacaactgccctctcttccacgatctagatgttgcggcccgcggacaggaggttcaagaaatagtacactccgagcggcaggcagcgaggcggaaacggtcgccggtttcagtggtggccccactggaagccgagttcaggagcggctaagcggtcgccggggaaagcaccggggcttcccagggtcccctccgagttcccactccgcacctccgagggcgtgaaaaccacgggagccgccccaccccgcgcgcccagccccgccccagcccagacaccgccccccgccagtcttccctgcggcgcccagggaggacgcgctccgcccccttccaatccggccaatgggcgcccgggcagcgcgcggtttgcctccgcctccgccagggaaacttggaggaggagaaaagtttgtacagagggtggaaaggcgagagcggagctccaagcccggcagcccgagaggaagatgaacagccccaggccagagcctctggcagagtggaccccgagccgcccccaggtagccaggagcggcctcagcggcagccgcaaactccagtagccgcccgtgctgcccgtggctggggcggagggcagccagagctggggaccaaggctccgcgccacctgcgcgcacagcctcacacctgaacgctgtcctcccgcagac

SEQ ID NO: 44002 - DNA, 588 bp, Homo sapiens
ccatctcaaaaaaaaaaaaaaaaaagatttacatgtattaactcatctatcctcacaataatcatatgaagtaggtatggttattgttttcagtactattttagagaagcacagaaagagtagaaaccaaaggtatcagctgggaattggcagagctgggatgcaaattcaggcagtctggcttcagagtccattctcttattcattatattatactgcttagtcacaagaactccactacagtctggataaaggtcaacctcagcactactgacatatttggctgagtaattctttattttggaagggctgtcctctataatgtagaatattcagcaacatccctgacctacactcactaaatccaatacagcttcctttcctagttgtgataaacaaaaatgtctctagacatggcaaatgttctctgggggtaaaactgccctccaagtgagaatcattggtctaaatctattatatgttgttttctctgagtatacttagtctctggatagaagattctcatgcaaacagattagttttaagattgcacttaatcggccaggcaccatggctcacgcctgtaat

SEQ ID NO: 44003 - DNA, 3115 bp, Homo sapiens
agaacaggatggcttatcccgtccccaaccccacaaagctgcttatgttcctaagcttaagttgtcccaagtacgaaataaactaagaggttcaaggtgacaatgaccatcactagttttttctttttattaggcaggtatgcatgtgtgcatatacatacaaacagacatacacacacacacgtgtaaacacaggcttacagatttgagaaaaaagaaaaatgtcctctcttctcaactgcactgtcttttattttgaaagcataaccattgctgccagcagaggcatccctcaatgaaatgtgctttgttgccaacgaggcctataaaggtttaaaggaacaagtgagctgttttccatgctaaacaaagcaagaaatggtgggtatttacttcactatcatcaacttattcaattcttcccccttctcatttctctttggtttacttctgttggcctgcaaacaaagggtggcaccacttagttcctccatttttagatcacaggaaacttggcactgaacaaatcaatagtctctcataatttctgcagcatatctcttaattcaacttcagtttggaacagactgaacagacacagccctactgcagctgttggataggaagcattaaaagataaaaacttggtttaaagtcactgtggttaataaatgaccaaagtctgattccgccagtttaaggacaatcttaacagtatgcaactgaagtagcacaaggaaggaagcaaagggaatagttccatggactacaacagggcaggatgagataatgccctatactgaggtaaagaacagctggtgatcaagctaaataagttagatagcacactcatttaccaaatagaaatgtcaatgtgtttagctactttactcccaattagacttctaatttactgtggctttaaatttaatgagctatatagttaacagcttattcactttataaatatttactgggcacctaccctgggacaggtagaattctagtaataagtactaaggatgcagcacccaacaagatataaaaggtccctactattcttccagatcttactttctaaagtgtatgcatgttagaaggggacagggaaagaaagataacaaacagttaaaatataagtgccgtgataaaagacaaatggaggaatgtgatagggagtgaccaagtggctattcggaatgggcggtcaagaaaggtcttcctaggaacgcattcaagctgagacctgagtgacaaaacgtggtcagacaactgaaaatctggagaaggtccattccaggcaaagggaagaacctggggcaggaccaaaccatgttttgtggaaaggaaataaaaccagaggaaaggaagtcagaggtcagggaggtgggccgaagccatgatcacagagaatacaataagccatagttatgcatgtggatttaattgtatgtgtgatgaagaatccacagagtttttatacaacagtgagacatgaattattgatttacatttttaaaagatcagtcagacccagaagaatagacagtaagggtacaaaaatgtacacaggaaggctagatatgagacaaccaaagtaatttaggtatgagataaccctagataaggatagaagtgaaaacagaaagaggaaaaaagatttacaacacactgaaaatgtacagttggctcaacttggacttggtatgagtgaaaaaaagaaagaaatccaggataatttgggttacctggaaaacagagcctgaggccaaagcttactggctaaatctttattgagtggataggatcccacgcaatcaagagtgagggaaaaacagaagtaagccatgaagaaagaagaataaatacaaggtctatgttaagctggcaacagctccacaaacacagatgattgttgatctggagagcaaaaggaaaggagcaagcaaagattaaaaaggagaggacatggagacaaggacaagcatgatagcatggtggtgtggaagatgagagagcagtgtatttaggaagactgtggtcacctgtgctgaatgatgagaagcacaataaatgacaacagagaagtgatgactggatttgacaacatggaggtcactgataacctttacaaaagcagtttcagtggattcatggggacagaaatatgactggatggttcatcaagaaatggagtttgtagtgcagtgggagcagagaaatggcagagcatttggagagaagctttttaaatggatgttatcagggtatgtttgcatgccagcaagaaggaccgagagaaaagaagaaacagattatataaaaatgagaggacaatttcagaacaacgttcctgagaaggcacaaggggatggggtctagagtacaagtggagtggtgggcctttgataattacaatggaatgatgacagatcatataggcacaaatacagtaaggttggaagatgtgctggtgagaaaataaagtcattctacactgactgtatctatgtttttccacagagcatgaggcaaaaccactgtcattaaatatactgatgtgagtaatctgcagaatgtgggtcacacagcaagatcaccctcaaatttacattagtaggtatactttcctagacaagaacaaaatgcatggtaaattctaatttatattcctgcttcatacacatacaactgattctaacagaaaaatcagaccagttagctagacagtcaaatatcaccatctagtggctgaaactttaaaagccaagatgtcaaagttgggactaacaccgtgactcttgagaaggtataacctagtttgtaataattctagaaaaagccacttgaacaaaataatttacaaaaatatatattactactacaggaaatataccaagaacatataaaatcctaaaatattatatctaaagtacattcacttggtgcttattaggtgctaggtagcatgcttttacatggactttgctctttaatcctccaaaattctataagatatgtatcaccatttgacctatgaggtagaaattgacaaaaaataactacccaaagtttatgcagatagaaatgataaagttgggatttgaatggaggt

SEQ ID NO: 44004 - DNA, 1267 bp, Homo sapiens
accagagtaagaaaccatgagagtaaaccacaatccacaccggtttcatgttaaactcatgaaaccagacaaattcaaccttttatataggattatatttcaggaatggcataacgattctaaacaacgacgctgtattctaaattcctgtactgttacaaagatccctatagtaggcgctcaacaactggcgacggcttcacatttacccagccgccagagagggcttgtcttgagtgtgtctgaggatgcagcacccaaagggaaaaaccactacatgaacaagatcaggaaatcacaacagcatccttctgggtaaaaggaggtattcagaggtgaggaatccaagaaacgatttacccaaaaacgccaccgcaagagaaaaaccagtattagtgactttcccttcatcggtcaacaataataaaaacgctcagaaaggctgccccggacgtcacctgcgcgttcacggaccgccccgggccgcagacacctctccagcggggagcggccggctcgtcccgcccgtcccaccgctcagggaaggttgcggccgcgcagctccgcgaaggtgccacggcgggcccgaccctcagactcgcttgtccctggagaccaaccctagcgaccaggctctgccggatcccgtcgggtttcaactcctattccgaaggtcctttctcccctaatcacaacacccactcgcctctttttcctcctcttcctcagcttccaccgccgaccgggcagccccagttacccgataacggctcccaaggccccgtgtttacattctttcccactggaagcagaaattatcacgcccaaattcctacctgccttccctggattcctggtttcctaagaaacgggtttggcccacccctgggcgttcgaacagtccacagaagcgggcaaaggaaagacgactcagtctttcccctccgccaatctcttctccgggaccacaaatcccagaagtcaccgcggccgcccccactgcatgaccttctgggatttgtagtagtcagggccacgcggctgggcgcgccctctagcagcagccctgagtgaccgcagcgcacgagcgcgggaaaatgaggctgcgcgggctgaagagcgcaccgagaggagccgcccccgcggtaccgcgcagcctcgcgtcccgtcagtggggaacaaggtgaggggaaaacttattttacgggattcaaaggattaggatatgctccttccccgaaggggtttatagcctagctgatgaggt

SEQ ID NO: 44005 - DNA, 980 bp, Homo sapiens
gtgaaagcagtatgtatacaaagcatagattttatagtcgcacagacctcggttttattcctgtttgaaggtacttactagatgtttgacttgggcaagttaaagaaactacaaccttctatttactcatctttaaaataagaataccacatactccataagggtgactataacagatacatggaatagtgtttgtaaagcactttccacaatgcctggcatatagcaagtgattgataaataaatggtagcctttattatttagggttatttattttccactgctcccagacctgttcccccatctgtatctaatcagccctgaattatttgttttaatctctgaatagccagttttatctcagctctgattggtgatacctatccatgtagatgcaatagcattcctttatccaggtacataagtgctaaataaataatagctgtcattttaatgtatctagctcccattcccatatacttcaatccctccaacccgctccaccactcctaccccaccaccactaccaccaatcctcagatttctaccttccaaagttcaactcatttcctgactttggttaatgttcaacagattactatcagacatatatacacataacaccaatccttgacagtgatttcacctactacaggaacacttgtttggtcacagaagaacacagaggaaaaaagcagcttaatttgatgtgagttttaataaacaagggctctttttttaacaaaaacaattttttacaacataaatctagttcctttacaatacataattaaagtatacaacttactagttaatatttgcagcatactcactttgtacccaaacatactgacacactctcaccaacctggaagacttggcattattagcaacattttacaggaaactgaggcacagaaagatgaaataacttgcccaaagttacacagctaatgagtggaaaagccaaaacttcaac

SEQ ID NO: 44006 - DNA, 1843 bp, Homo sapiens
tgcacccaatacacctttcttaaaacaaaagttcgaatgatgtgcacttaaagagtttattagaatacaaataacctttgaaaataagtggaaatgaactgtactaataaagtaataaatactatctggaggcaacatctgaactaacaacgaagtttcgcacggagaaactcctgttaattcggaaacactaaaggcacagtctcattcagaacgtaaaccatgcatcgcaaatactgaaccagtttatactcattaactgctccgaaggaaaccagtgatcctttccgacgacatggtctttaaaaaaaatgatgtcggctacccacaaagaaaccttacttctgcggaaacacatttcgcactcgggaaacagcaggggccggtaaatcgacagcctcctacagaggacggaaataccgacaacgccaaggaccgccaaggaagcgatgggctggccctgagccaagggagcacaacccgggcgcacaagatgccgcctccccggggatcgcgcccggcgccccctcccagcacccagagcgcgccgcgccgcccgcctgccccacctgggaaagtttgcaccttcgcatcccagcccctcgtacctaccagcccctcaggccgcggcgccgtcgccatggcgactggcccctaccccacccccacccccacccggcctgtgctggccgcgccgcagccccgcggcggctggggagagctcccgcaggatccgggacaggggctgcccagccctggaaagaagggacgcagcgggcgggggaggatgaagaggtgcggaaagcggaagtcgtgcggctcctcagctggggccaagcctagtcccgcggggttctcacccttcactttgccgaaggtgccgacccccagcgtgtcacccagaatgtagtggccgatcttcacccgcccgtcgtgtttctgcttctcggctgtcgccatctttctccaggaactgagtctgcgcatggcgctgcgggagggggcggagggggcgggcagggccgcgccgggggcgggcggggagggggtggggacgcgggagggcagccaccgagccgagtcaccgccctgcgccgccagcccaggccccgcagcctacgtcgggcgcagacgctccccctggcggggcgggcgggggctgccaggagaatcaccagtacccgcctcctcgccccgcatcctcgggcctgagcgcccgcccaccggcacgcggaggggcttcctggaacgattaggcggaccgtcgcccccaggctcctttctcccctggcggagtttctgcccgctgcgatcttccctaactaccactctgcggtcgcagaagaccatccagaggggagatgaggactgggaagcccgcttgagtgatgcacatctgtggcttgttacgagagccgcgtgaattaaagcaaggcaggggacaccgccctgccactgctttctaaccttgattttcatctttccttctcggatggaatctagaagccgcaggagttttcacttgcgtctgtgatggagtttcccgctccccgcccccccgcaccaacccgagctcttttttcgcttggagcccgtaagttgctagagggcaccacgatggctctaggagcgctgtcggtgttttcttctggaggtgatcctgaaatttcctccccaaagcaagctctgttgcgaggagcaggctggggatatgtgcaagtgaatgtgtattccaagagggggatgatacgcagatcttttggtgtataggaattaatacttttagattatcagtaaaatgtatactttcactggactgagagagaacaaggcttacggttac

SEQ ID NO: 44007 - DNA, 3113 bp, Homo sapiens
ctaataaaatccaaactaactgatgtcaaggttacagcggcagaagataaaagctttcaacatctggcctgagcccaggagttccgagattatcctgggtaacatgacaatatcccattctctacaataaatacaaaaattagctgggcatgtggcagcgcacacctgtagtcccgggtactcgggcggctgagatgagattacctgaggctggggagactgaggctgcactgagccgtgatcgtgccactacactcaagcctgggcaacatagtgaaaccctgcctcaaaaacaacaataaataaaaagcttccaacatctcatccccagtaaccatcagggtactgttatctttttacaagtaaacacgagggtttcattcaagcccactggaccaattatgatcgaacatacaaactgtacctgaatctgcggtatacaatttttaggtgcctcattcgaccagttccggtggtatttcgtcttttagccttggcactccagttatctaaaacataagttcagaaaagatttcaaacggtgttctcccacacaccttgtaggtgttgttaacacacgagttttatgccacctcatcggcatacagatgtacgagttttaagataggcaccaaataaagttcaaacctatgcccccacttaagtgcaatacaaacaaaagctaacacagttggcctgaaaaatgttacttacactttctcttgcgcttggcagggtagccacatttgccacaggtcgacttctgaaggtggtaggccttagagccacagcggcggcacaacgtgtgcgtcttattgcgacgctttccaaacgatgacgttcccttcgtctgcacattaaaggaataaatagttctgaaacctggcaacttctagatttactcgagttctccgggaaaccaattactgataaaatttaaaggcaatcgtaaagatcgaaactgcgggagaagcctctttccacgaatgccaagtcagagaccactacccgcatttcacgttacctaaaaccctccgcaagagttgcaatgttctgaaatgcaccttatctttacagactccggccagagagcatcaccaatgaattatttcattgttacacagagccaaacattcccaaactccttccctcggctcccaaccaaggctagagccgtgaaaggtctccaaaggttggaccgaggcaaaggacacaatgcggctctagcaccacaattacggcgggataggtcccccaggcaccagttagcagtcattcttctggctcttgagggccaccgcatgcctctttccagcccaccagttccccttatccggaatcttgccagccccccaagcacagcaaacagagaggcacaaaggacgaggatggaacgcgattcacaaacaccacagtcacaactcaccatctcgcttctgcggccgagaccagaaagaccggaagagaaggcacttccgctatatcacgctcagaagcttccgcccagggaagcacttcctgcggggcgcggtgcagcgttctcgagcgtccgtcgtcgtagtgtaggtggggtcaagaggaggatgcggtaccaggcagggccgatcgcgtttcagtgccggaaaggcgggcgggactcccagttttctggcgaccggatgggcgagtcttcgtcgggcctgcttagaccctgagggccgtttagattacagttttgcttttcgtgctgctgttgctggtgctactgctactactgatcggtttcgcacgttagcagtcagatctgttgctataccgtcgattactgtcttctaggcacatggagaacctggaatgcggggctggccctgcccaggggtacccgcaccgactgagcgtccccggcgtgtaatgaccgtgtgcgcctgggataatcccttttaggagaaagcaacttctccagcagcctcctcattccgatcccggaggcttttggccgacgctgactttccctgcgagaggtcgctaggagtacggaggcatggagctggagcttagaatataaagggaaaagcagacagtgattttgttgttgttgttactgtagtaaatcagaggcaagttatctgatcccatatttcattgtgccaaggaatcacacatggaacttgttcaatatagtttccaagggcctggcgccgtggcttacgcctgtaatcccagcactttgggaggctgaggcgggcggatctcttgagcccaggcgttggagaccagcctgggcaacatagggagacactgtcgctacaaaaaaaatacaaaaaattatccaggcgtggtggcgcgcgcctgccaacccagctactcagggggtggaggtggagggaggcttgaacccggaaggtggaggttgcagtgagccgagattgcgccattgcactccagcttggatgacggagtgagactctgtctcaaaaaaaactgagaaaactaaaaataaaatgttgccagagctgctttccgttctaggagggagaatctgttttctttcctttctcagcttctagagactgcccaaactccttggtttattgctcccttgcatcttcaaaaccagtgatactgtagttcccccccgtttctgtgggttaagttccaacaccctcagtggatgcctgaaaccacaataccaaaccctatatatactgttttttcggtacatgtgtacctgtgatgaagttaaatttatgaattaggcaccataaaagattaacaacaactaatagaacaatcataacagtatactgtaataaaagttatgtgaatgtggtcggtctctttttctcaaaatatcttattgtcctgtactcaactatttttaaaccatggttggccatggggtaacaaaccctgaaatcctgcaaagggaaaccttggataagtggagactactgtagtctttctcacattgcattactctttattctgcatctgtcttattctttttcctttccttttatttttatttgtagtagagacaaggtctcactgttgtccagactggtcttgaactcctgaatcttcctgtcttggtctctcaaagggttcgggtgccctgccatccttctcctact

SEQ ID NO: 44008 - DNA, 4021 bp, Homo sapiens
tttcttttggttaatattatttcttttttgaatgacttacaattttttgacaaattttacattgtttcatgctggatttgatcctaatgcacagctaacttacgtagaataggttaaatcttttagtgcaatcaaaagctaccattaatctagagtttatattatgtccttccattctggttggtacgaaatgatccctccttatgtgaattttaggaattgttaggctttctggtttctggtacttctctccctcacttgtacacagctcagcttccagtcagcactcagcatagatcagcaacggtcccactctgctgagctccagagctctcattcctccttgtgcagctcctttgtctcaggcaatttactctataaattctaatgccttgactccccaaactgaggttttagttcttcaattcagtgaagccaatggacactgtttgaaatccacctacctgtgcagtggcctggaaatcgccaccgggaagtaagccgtggcaagtctaagtctcacctcatttgtttcccttctcttgggggtcataatccttcaatgacttttgtcaaatgtttaaaaaccattgactttcatttttttccagttgattaaggtggaagaggaaatctaattcctgtcactccataatggtcaaaagcagaaatttcttaaatataatagcatttaaaataagcctctcattcaagtccagacatgaactgcatggcggtctgcttcacaaaagtggaatgcaacatcactgagggtatttttttttatttgtttatttttgagacagttttgctctgtcacccaggttggaatgcagtggtgtcatcatggctcactgcagcctcgacctcctgggctccggtgattttctcacctcagcctcctgagtagctgggactatgggtgcgtgccaccatggccagctaactttttaaatttttggtggagatgggggtctcattatgttgtctaggttggccttgaactcctgggctccagcagtcctcccgtcttggcctcccaaaaggctaggattataggtgtgagccaccgcccccggcttctgagggtattttcttatttccatgctgtgcaattttgggaacaagcacctatcttgggaaagaagcagcttcattttattatcctagtcatttaagcttaaattctcagttttctttgattcacccctttaaatcttccaagcaaaattatctctgtcatttcttttttctttttccttttttttttttgagatagagttttgttcttgttgcccaggctggagagcaatggtgcaatctcggctcactgcaacctgtgcctccctggttcaagtgattctcctgcctcagcctcctgagtaactgggattattacaggcatgtgtcaccatgcctggctaattttgtatttttagtagacatagggtttctccatgttggccaggctggtctcaaactcctgacctcaggtgatccgcctgcctctgtctcccaaagtgctgggattacaggtgtgagccactgtgcctggccacctctgtcatttctttatatatttccttagtctaaaaacctatcagctagtgtctgatttaccagtttatctactctgttaatcatgtcctacagcgctgattttatcattttactatattgatcaagaaccccttttagttgcccactgtcttctgaataaagattaactcaatttgtcattcaacgtttggtccctttgctatttggtcatctttatctcttaataaaacttttctgctattgtcgaaagggcttcattctgtcctctgttgaatgtaacagatcaggaaactgccaccatcaagccctgcccacaggcctatctgccccatccacagggcaggcacattcccactgtttcaaccctgagcacagcctctgaggattggataatgaatggttttcttatgattccactggaagcagagtaaaggtagattcaaacacccgctattctctttgaaaaattgaaaaagtcctagttaacctgtactgcaggctaataagcagtttcccaggctctccatctccaagatagagcctcttttgaccactgtgcagttaagaaagttctagggtattgactattttaatcctcagacccagaatatttggaggtagtggtaggtaatgtaagagaagggatttcttatcttgtgtttttcagtggctcccaaattgaaaaagaagctatgagtcacatatatttggaaagttatattccccaaatttatcttgcctttaggataaccacataactcaataaataaaatccaggacagttcatccagaaggaatacaaataagtaaggatgtttttgttggataaagaaagtctgacaaagtagaggtagaaagcaagtgtccttttttcaggtcatgacttggtgattttttacacacacagacacacacatgtacacacacacacaaacacacacacacatacattcttgtaatgaattccactgtccctccctcatgttcctcgactctgtcacattttctgcttgtcatggtttaagggataccagcaatgcataagaaagagaaatctgaagaaatgataattcccaggctgcagctacataaaactgttatcagaaagtttttctctgccaggctcctgatgagctcacaggttactagcccttctaattgactacgcattctctatttctatactcaggaaatctgaaggatgatggtggggttggagactaactcaagtaagagtaaaaaccattagaaaactttgctctaattttagagcctggtgagtgcttcagaagtgcctctttctgtactttatcctttgaaacagtggcagtaactgggacaactccagttgagcaatttctctggcttctttcactggaagcctatttgtttcttcctgtctgtgatctttgttcttctttttttctggtaaaactgcctccatggcagggtcagccaaactaaacaggcctgatttaccagcagaacactggcttccactgttgggttaaagggcagagttctgagtagcaaaataatatgattcagagttcttcaaagcagtgcttagccactaggcagtccatgaacattacaaaatctccatcctaaagtaaacaaaaattgaaaaatgattatatgtgcaactaatagtgagaaaaacaacaggagtgagactaaaagaaatctgtaatttcttcaagaatacttgaacatgcttttcctctacaactctatttccctgagactctcaagtagactgtattagtcccttctcacactgctatgaagaaatacccaagactgggtaatttataaaggaaagaggtttaattggctcacagctctgcatggctgggaaggattcagaaaacttacaatcgtggtggaaggggaagaaaacacattcttcttcacatggcagccggagaaagaagtgctgagaaaagcgggaaaagccccttataaaaccatcacatctcataagaactcacttactatcatgagaacagcatgagggtcattacccccataagaactcactcgctatcatgagaacagcatgagggtcgttgcccccatcattcatttagctcccatcaggtccctcccatgatgtgaggattatgggaactacaattcaagatgagatttgggtgaggacacagccaagccgtattattctacccctggcctgtcccaaatctcatgtcctcacataaaatacaatcatatctttccaacagtcctatcaagtcttaactcattccagcattagctcaaaagtccaagtccaaagtctcatctgagacaaggcaagtcccttctgcctataagcctgtaaaatcaaaagcaatttagctactttgtagatacaatggaggtacaggcattgggtaaatacacccattcaaaatgagagaaattgaccaaaacaaagaggctacaggccccatgcaaa

SEQ ID NO: 44009 - DNA, 568 bp, Homo sapiens
tggatacaaaactaccatcctactgttggttattactgatatggctttgtttccaagggaaatggactaatgatttggatgttttcttcaaaggctgcacattttttcttgcatttcttctgaaataaatttttgccttaaacttttgtttctatttcttgtttcttatgaatctgtaacatataagtgtatgttgcaataatcaaacttagggaagtacatctagtagactgactaaacaaaaaaccttgccaaaagtccctgtcacttacagaggttggacttgtctgttactcattaaataaatatacttgtgtgcaataacatcattgctctagcctggaattaggcatatctgcctctatttgaatctatacaaggggcattttgccactagaaattccagaagatgcttattaggaaaaaataaaattttattacatttgagtaaaaactattgccagacagagaccaggcctttagtaaagagcaaaataaaataagaaatgaatttatccatgaaaatgggaatatataatctaaccttacgaaatgagttagaagaata

SEQ ID NO: 44010 - DNA, 2271 bp, Homo sapiens
tttgtaactttttgaatataactagaaatatataaatcaaaaatatatatttgtgtgtatgcatgtattttcacatatatatgtgtgtgatccctactcacagatctcactattttgccacatagatgaatgtgtcctttcaactgtgtgtgtatctatacacacactaagcctgggtaaaaacaaatagcatgctattattgcctgattcttgcttcatatttagaacctagtgactgatgttggcaatgtagaaatttttatatctcttgttaaaatttttcttggagaaatatcagttaagaaggtcagccactcaggaagctattttttttttttttttttgtggttagaaatatgttggatagcaggattggagaggcagagattctaaggccagcagattagaacaagattacagtaagcaattctcaaaactctcagtctctggggaggcaaggagaggactggttgtcccgagccggcaggctttgctcatttctcagaatcactgggacaacagctctggttggcagagggccacgtcgtccttcagccaaagtacacatagcatgtggtcctccccatctgtaactctagagtctagatcaactgaacaaaaggtgattttgtaatgtcacccttcatcaatcagaacattagaaaatgtgattatcagtgggagtttttggctgacgttttcttgtaggcaaaccaagagaaggaaaccatttctgcacatggataagaatatgttgttgaagcactttcatcgaaatcagcactaattagaaattcttaggacagaacatcacatcagtttatagtcatccaacatatagatgaggaaaccgaggcccagagttgttaaataactcggctgtggtgtagtgagataatgtagaactggttctagttctacattagaaccagctgagttatttagaactcagctcctcttactttcagactaatggtttttccattttactggtgtcctcgggtttggttcaatattttctgggttttattctaaatcaaataaggttgtatttgcaattgtggctgtttgtctttggtgcctcgagttttcatattatgcaactctggcagcattaagtgaagattctaattttctaaagtccaatatgaagcaatagaaattgatagcaaactatctgccttctggccaaaaatttaagaggggtttctttattatgtaaaggggagagtataggagattatctttactgattttttcttatgtttcaaattaaggctcagtttttctgttttcatagccttctcttatatttcctaacatcatctaaaacacaggttcagtctaatgaatttagaacccctggtaaaacccccagtgtgctcatgattgggtattcctgtagtaggaacactagaagaaagagctatgtgatctcctgaggtttcttccagggtgtctcatttgtaaggtagatgtagtcctgaatcagcatgaaatcatggaaaaagcctgggttttgaagtctggatttgaatcctggttccaccatttgctagttggtagacttggtcaggttatgtaagctttctgggactcgtttctcagtttgtaagctgagactggatggtaatataggtctggcttctgccattaggctctgctgacctacccacacgtcacacagcctatgggagagaatacctagctatattcacttcacctcttactctcttacgttttcacacccttgttgcttagccctctctttttttctatatttgcttaacttctttccttttggctttatcgctcattatttgactctgggtttgcttttcatgctggaagactggttttgtttctctagtgttttggctttcaacccacccataggcatacttttatcacaccctctttctccatttgctcctgacatttctgagtggttactcacccattcaaggcctacctccaggaccccaccctggcacctcccagcttgatgggcttagaccagtctgctctaatccattccaaaactttctgagagatgtatgagaaataaaacaagccatgtttatgaagggcccatagcattgcctggcacaaactatatttggaaatgctaacttttacttctcaggagtgaggatcatggccacatacctcctgaacatggtagctaagtatcagagatagggctggtaggagtagtaagaagttaatgaggaagatggacaatgatgtatctcattgctccctctgac

SEQ ID NO: 44011 - DNA, 616 bp, Homo sapiens
caaaatccaaaacacttctgataccaacattttggataaggattactcaatctgtatacacttttgctttcagaattctcagaaggcacaggcagtggaattcagaactgggtaagtacaatatcaatactgggagcaaaatttcctttttgtgttcttaagacagtaaaatacataaaataaaccccctcttccccccacaaaagtgctaaatggaattttccctcaatggaagctgagacagttgattttcagaaattgaagtaattcagcattactatgctgttaagcctgtcagggaatcagagccctctattgtgattcatatttcctggaaatgcccatggttgcctacctgtttttcaatacaagggtcacagtctgaccatggtccaaaatctcccaggaggcagttgatggggcatctttgccagttacattctctagtctcctgcttgctgcaaatctgttcacaaaagttttcctggtagtacttatctactactatttgtctgtaaccatgaagaagaagttgcttagaatgagtgtattcaccatatatcctgctccataatcaaagtatcattgagcattaactacaataaatagaaaagaa

SEQ ID NO: 44012 - DNA, 982 bp, Homo sapiens
gcctcaaatgcagtggcttttttcatgagcttctgcacatctgaaggaagagtatcaatcaggaccgaggccatagataacgtattagtaacgttcttcttgtacaatattcagaaaatgtcttcatctaggactcaaggcagaaatatataaatatgattaaaaggaggttaacccatcttaatggaaaccagattaattgctgtattagtcaagattctccagagaaacagaacaaatagaatgtatatacagaaagaaaaagattattataaagaattggctcttacaattatggagactgacaagtcccaagatctgcaagataagtcagacccgggaacccagaagagctaatgttgtagatccagtctgagttcaaaggcctaagtatcaagagatctatttgcttagtttcggtcccaggaagagctgatgtctcagttcaaatagaaaaaagccaatgacccagttcaaaggtagtttggcacgaggaattctctcttactcaggaaagggtcagctctttgttctattcaggccttcaactgactacatgaggcccatccacattagggatgagtaatctgctttacttaatgtgctctacttaattaagatttaaatcttaatctcatccaaaagcacgcccataataataattatttaaattaattaaataataatatttgactgaatgtctgggcaccccatgacccagtcaagttgatacataaaattaaccaacccaatttcccaaaagctgggttttcataaatctgactcataaaatacagtaagtggaccattagtccacttattttttatcagtatgaaatcctttttcaggagctattcactggagttttaagaaaaatagttgcctgacacaccactaatctagaggtcatatccagagtgacatcattttatgagagatgaccactggtaaagtggtatatgtttcccaactgtcacataa

SEQ ID NO: 44013 - DNA, 1757 bp, Homo sapiens
agagataaattcgactgctaaaaatcagatttacaaaagcaatattcaaccatgtagactggcaactccactagtgtttggagctccccatccagatgtacaacaaactcttggagacttggatgtgttacacagggggccggtcgggtttccatttaggaccaggagattataatcactttattttagcaacctccttactacaaggccaaaactgacagtcctctctccagaccctcgcgtccgccctccagactgtgcttcccgcgccggacagggaagtgggagtgcggacgacaatccgcatcctgccagccagacgtcaccaagctgtcttccaagaggcaggcggagagagctgacttccgattgggtcagccgaggggcacggctggctccctattggcttacaggagggggctagagagaggcgtgtctcaacgtcacacccgcccctagtctccttgctgctcaggattatgggagggaagggaagtccaggagggaaaaatgacccggaaagacctttgccggcctgggccagccctcttccggagctgatgtctcctcccaccaaccaggagaggtccgccctaggccccgcccgtgccgggggatcaggtgattgcgggccaacacggtcacgtgaccggggcgcacccgccgattgtggccatggcggccgcagtctctagtgtggtgagacgagtggaagagctcggggatctggctcaggcccacatacagcaacttagcgaagctgccggtgaagatggtgagggagcggaggagagggaggcgggcggggcagacggcgctaaggtactggcgctcgatggctgtgagggctagaggctgaggcctgtgttcctttgggtcccaggccgcaggtggttacccgaggtctgtcgcttctgagcccctctgcgccatcgattgcccacttcccagaactcacaatgccaaggcgttgtcttcgaaaaccgcattattcagaacccatggaaaatctgtctagatccgtgctggtgtaaactgtctcggtagcgattggaagaagggcagaatctaaataaaatacagaagtttaaataaatggctaagatgaatgataacactcaaattagttatggtggtttgcatcctgtaaagataaaaagacatgtataacagttccactttttcattgctgcgttgtaatttgcgttttacgttttggattcaaaacaacattctatagaagagctttacattggtgtgtagactattctgccccatacatcatgccagttctcacaagggctctgttaagtattggcatacttgttttggaaaggtctaagctgttaggaaaaactgggctagggaattgcctcaaccttctgaatttaagtccaattcttttcattacgtctcagctgcctttaggttctacattattcctttttgagtttgagcaattactacagatagtttttaaaattctgtggactgactcatatcatcggactcataggaaaacagtggtggaacattttcttaagcgattgaatagttggtgaatttgttattaaatagggtctatgatgaaatgccttagtttcagtgaatattttttgccagattatcatttatcaggagtgttttgttttgttttgtttttagaggcagagtatcattctgttgctcaggctggagcccctctagtagtgggacaacaggcgcacaccatctcgcccggctaactttggcatatt

SEQ ID NO: 44014 - DNA, 1644 bp, Homo sapiens
gttctcttaaagcacttttaaagtaagcccaaagtaagtagaatgggcatctggtttgagaattaaaaaactcactagtgggatttcaacaccaccacatctgggttcttctagccgttttttgccgcccttgcaaattttaaatgtgcttatatttttgcatagtgggtccagacttctcattttggcaaaaggttctttgtaattggcccgctgactgcctctctagtctgtttttgctgatactcaagaaaataaatggtaacttggtgattgaggaaataacacacacaaaaaacaccccatacgtagtatggtagtgctgaaaaggaagcaagtggttattaagcccaagacagtggcagaggtctatcgaacaagcggagtcgcctaggaccaggcatagtggaaatgatcccggagagaacatcttgaatgaagccaggaagtcagcgggccagaggttgtacaggggctctgcggttggcgtggctgaggttgaggccacaagttactggggaagttaattgttgacaggagcttcgtactcggctcacagccacgcacagtgggcttcctcccagtacccgcccttgcccctgggcctaaccctgccctggaggcggactcgcgggagaagcgggaggcggaacgcccgagggcgccctcggctggcgcggagctgcgcaggaggctgacgcgctagcgtggctctaagacgcgtcacccacgctgcgggcaagccatggcgggaagcgagccgcgcagcggaacaaactcgccgccgccgcccttcagcgactggggccgcctggaggcggccatcctcagcggctggaagaccttctggcagtcagtgagcaaggagagggtggcgcgtacgacctcacgggaggaggtggatgaggcggccagcaccctgacgcggctgccggtgagcgtcggccgcaggccgcggaggacagtggggccggcccgggccggagggacctcccctggagccccccggggcctggggaactctcgcgccccggcctgggtctggctccgtccatgcagccattcctggcagtgtagtcaccgagaagctacagttgatcagaagcgtcttggcgtggaccctggtgctccgcagggggcccgaacatctcagggaagcaccttcatggggcccctggggaccctcccgatcgccctcaggttttccacccgccaaaacaggcacatgtgactaggacaccctgaatgtccggttacggaaatgagacagttcccaacttgctgattagcttgggaaagcattccagcgtccctgttcccagcgtctttgattccggatcactgtaccaaaacacttggagggccaaggtttttaccctctcaagaggacattgtgcctgtggctgttattgtgtatttgaagaaacaaaacggcccctcagttgaaaataaatgacttaagttacaagtgcctcaagttacatcaaggccacgagaatgacacacataacttattgttaaactttggggtagataggtaaatgaagagaacaaaaattattgaaaattattacaattctttgtctcatttggactattgacacctctctccaatgtgtatatcaacgtgaaagctgcaggttt

SEQ ID NO: 44015 - DNA, 891 bp, Homo sapiens
gggagttttttcaggaaatctagtttgctattttttctcccagtttcttatgtaattctctctcattctttaagttatagattaaaattcacctcctcagtgaggcctttgtaaatagctcaagcaaccaacctcctctatcccatatacttcattttctatcacttgctgaatttaaattatttacatattaattcattatttcttaaatttaatataaaatatatatgcataaatatggaaatttgtttaatttatttatttactaacatggccattttttggttgccatatgctagtcagaatggtgaaaagtactgggactttgactcattcatagcagtatccttaggacttataaaactgtctgttatatgttgctatccattaagtacttgtttaatgaatgactcatccaataagtaagtgagcacacagatggttgtttaccaaagggctttttatttgatatctcttaaataaacagatccttatctgtttgacaaacattagggttaaagcaagggttaggattaaagccaaattcttaggaatagctttatttataatttagaaataaatgtgctaattagctttaaggagccaagctgaaaatcatgtgaaagaattaccatgcaaaccacttaccaataaatttattttcaaatttagaagaattttgtaaaaaaaaaatgttaaagcactatggaattaggtaacaggaagagtttggagggctcagaagaagataaaatgatggggaaactttggaacttcttagagattagttaagtggttgtgactaaaatgctgatagaaatatagaccataatggtcatactgaggtctcagatagtgtgggcattcagtcaggctggtgggaaaaatttt

SEQ ID NO: 44016 - DNA, 2290 bp, Homo sapiens
ttttcctggctcaggaacttcaggctggggcctgtgtctgctctccctgcatccctgtcctctagcagatacctctctgctaacatgctgagtgtccttggtaaattactcattctctctgtctccgtcttctaacctccacaataaagtccttcgtagttttaactatcttttcactgtgccccagtgagcaggagtttggaacttgattgttgatggaaaggcaatatttggatggctaaacacgctttccaaggtatctcgctgatcttcctctcattcctggagatagctaacctttttgtaagtgtttctttgagtctgtggactgcacttaacgctcttgtaggtcctgctttcatttggaacgggcaggcggagaggaaggaagtgtattgcaactaccaatattttcctctaggaggagccgcgcagctcagttgagagtgacacgcaccaactccagctcctcgccgggaagacttcatcccagcaactcggaatgcttggcccgggcggcactcggcctctccgcagcagttctcgaactggcctccttgaacgtccgcttcgccttcgcttctgcaacctggatctgggggactgcgggccaggcgcggcgtgacccctggtgaacggtggccgccttttcccacccctgccctcccatcctcccttcccgtttcaccccgccccctctctcctccccaagcctgacagcccgcgagctgccaagcagggcgcagccatgggaagaggaggagggctagggagcggcggcggcggcggcagcggcagcagcagctgctacagtggcggtggcggcggcggctgctgctgagcccgggcggcggcggggaccccgggctggggccacgcgggccggaggccccggcaccattggccccagcgcagacgcgaacccgcgctctctgatcagaggcgaagctcggaggtactggagtggggctccgggagtctggctttattttcctcctgttgtgccagggggcctgagggtgaaccctgggactctagttgtttatgaaaacgggaggatctgtcttatatatttacacggataattttttattccggatgacttggctgtgctcccctcctccttgcgaagaagttgttttctgctggtgggttgttgtaacccaatctagtgtgtgtgtgtgtgtgtgtgtgtgtgtgtgtgtgtgtgtgtgtgtgtctggaagttggtgagggcggcagggagttgcgggcgacagacgaaccatcacactctggcgtctgctctggcccgcgagtagtgtacgtggaggggtttactccggagacagttttgttaaagtcataaaagttttgctagtgtgtttctgtttgccatcatctgcctggctgcggcaggaactgccgaggctgctgctgttgcgcggggaagaatccccggcagcgcgactggagagactggggaggtcgagctgtgcgcgtggacacagcgcgcagagcgcgcggtcttttgcgcgtttgtgcgggccgcagccgcacgttggcaccgatggaactggggtcagtagagtgacagccaccagtccgcatgaactggggtaagtggaaattgtggcgagccgacctcccccagcttttgacacactagtggttgtaaaatcaaccaggcttaaagttttgacagaactgccagaggctgcgggtcaatggggtggccgcgtgtctagggagagggcgctggcggcgcagagggtgcggggcagggcacttgcgagtgcgtggggaagtctatttggggcgagtgctttatatatagcccgaggggatgcctgctgagaccgagctgcgggggctctcggtctggcgcggactgtgtgtcctgaatgagtgtacgtgtgcgctgtgtgtgcgcgcgcgagtgtgcgcctggggaggcgtgtcggcgcctgagccagtagggtgtgcagggtggaagaggccacagaggtgccgcctgtctgtttgtgccgccaggagaccttggaagggacagagaaaggtaacggaaggccaaagtgttgggaagtcagagtagtttctgcataggattaagtattaagggctttaaaataactaaacgcattgccctgagtggctgaggactggaagtgaggttttggggagttctcaggagaactgcatgggagggcgtttgggaggtctaagggatgtgtaatatgtgtgagtacagaacttcggagacagacacaggttggagctatgaatttgaaattttcagggtgctgctgtc

SEQ ID NO: 44017 - DNA, 659 bp, Homo sapiens
tttcagcccttactctcctccttagctgagactttgtgccagacacaagctgcccagctgtagacagtgggcccagaagttatcagtgttacatgagcaaaacaaaacatatctacgggccatactcagcccatggattattattttgcagcttctgtagctgcggttaaaacaaagctctggggccagatcacctgggtttaaatctgggttctgcccttcaggcaaatgactcagtatttcttggcctcagcctcctctatctgtaaaatgaagataaatacttgtacttacttaacagggttgttacgaggataaaatcaatactgtggggcaaacacttagctctacagagggtgacacatagcacttaatgttatataataccaaaatcatgtgaaaatctgattttttcacacttagagaatatacagcatataaaatgatgggagagtgcatgtcagaccttcatgattattttctgcttcttggggaaatgcttatgcctctttggtcactgtgaagacagagaactcaaaatagtaagcatcacttactagctggcctactaaggccacaagaacaaatgaagtaaacactctgcttgaaccactgattttgtttgcctgcatgaaacacttgcacaggttgacagctga

SEQ ID NO: 44018 - DNA, 694 bp, Homo sapiens
ataataattatttttattaatttatacatatgtataatttatgttttctccatgtggctagctgttgatctaaaggagaaggagcaaggcaggaaaattatcaggttcagtgtttaactgggagatgaggacatcactaaaagaaaggtacagcaggttctactggtatgtacaagttttgattacaaggtgtactcttgccacctggtgtggtgtctcagctaactttagtttctgattaccggggtctctgagacaactctccagggtcaggtatagagctccttttgcccttggcatgttccaaatcgcttccttatgctcaaccttctgagcaatacaaggaaaaattccttgtattggcatgttatgaaggttattgaaatactttaggaaatgcctttgaccttgttttgtacttagaggatgatctcattcagaaatgggtagtgtcaaaatatggaatgtgctagtaaaataagcacacaattcacttaaagaaacaaaaacaagacaagacaaaacaaaacaaaacttgtttgggatgggtgaaaggcatggggctgcaattcatcctggattttaaggttagaagtggttgaaagaaatgtgatatttttacctaaaccgtggtcaactatacttttactttttagcaatgatgtgaatgaagaatggctttgaagactgttgg

SEQ ID NO: 44019 - DNA, 2251 bp, Homo sapiens
ccaaggtgttgttctagaggaaagaagagtaatggtcgacacaggcaggctgagggctaacctaatgatttcatgcatttagtggtaattcttaattaagatcccaattttattctgttggatttagtctataacccgctgaaaatcattcttgaattaacactgggtggatataaaagcagaaagccaaggactttgcactgttctcagctgtagctgtttatttagctggagaaaatttagtgggtggtccaaccttcataaccaggaagaataaaatagaggtgtaaaggccttggtggaaggagggcagtagcaacctttccatttcttcagttttatcgcagcctatgaaattagttccttaggtatgttgatcttgtaggagctagtattttaacatttgctccatcaagttgtttggtttaaatctaagaataagcccactgaaaactattcctaatttgtgaaacgaataacaataatagatgttaatagaaacaaagacttcatttggttagtttttagagggggcacagagaatgtagtaacataataagttagatttttgttgttttctttttcttagttctttgtagtctttataatctctaattggcatttgctcctgacttttctcagtgtacttccacatggaagagacaaaagtctcaaagctggtgtagaaaaacccttaataaattgcccattaattagccaccttgatttccacctttaaagcagttaattgaagtaagaatttgttagatttttctcaagcatagcagaaattaagattaatttcttaggtgtcattgctacttgcctacttaaaccaccagttcatctttatcataaatacttaagccaaaagtcacattagaggcaatatggcacagtgattgtggaccccggagtcaggtgagctggttgaaatcctggcttggctacttcccagctatgtgatcctgggcttcagggttcccttttgcaacatgacatgattgctgagctgcttcttagggttgtgtgtggctccggtaagataatacaggaaaagagctgaaagcagtatctgaccctggagagaaagtagggaagagacaatagaggaaagaggacaaggaagtgggagatgaagagaaagttcaagaaggaaagtggaagaatctcaaatagaaagttaattttcagtttttcctgagaagagatatatagacatcttcatgtggctttggagagccttggagcccatcagcaagacggttggaaattatactgaaacagaagtgtagacctatgtgacttatgtcctggccagttgcctcatgtcctctgtggtcaggttgatctctactggcactgtcaaaagattttttatggacagctggttggggtaaactttgaaacctgattgtttgcacttgagtgccagagtgtgtaattatttaccggtgttcactaaggatgtcagtgtagatttttagggggagaaaaaacttaaatttaaaatttggaggcatctttttcagtctgcctgccctggtgtttgttataacacttagtttggcatgtaacagctgaagctactggttaaatcattaagcatttattattttaaaactcctcttctcaaagcaaaaaataactatcatgttgaagttctttcctctaagaatgacatttactgtgagttttataccaatggactaattggagggttgagaaaataaattttggaaagacaacaataacttcagaattttccttggatggaggtttcctttttaaaacctgaactgagctttatcaaaacagtaactgaactttgaaacgaaacaagagtgctgaattgaaagctccaggaaggcagggatgtgtctgtgttgtttatgactataacctctgggcctaaatcagtacctatcccatggtaggcactcggtaaatactgaaggaatgagtacagtatgaaaattagcatggctgatccttggaaaaaatataagtcaaaagggaatagcatgcatgtgtaactaaaacatcagtccacatgcttgaaatgtcatcacttttttatggtcaggacctgtttttttctgctccaattaaagaagaaaattgtaatgtgaaagaagcaagaagtgaagtatttggtattcatgtgttttgacatctgcagtaagtttaaaataaatttctaaatcttattgtattgaaattgtatgagtttcttaagtggtattattca

SEQ ID NO: 44020 - DNA, 2701 bp, Homo sapiens
gttttccatggaggttgtactaattgacatcactaccagcagtgtataagtaatcctttttcactacctctacaccagcatttattgtttgtttttgggatttttttgtttttgtctttttataatggccattctggctaggaaaaggtggcatatcattatggttttaatttgcatttccctcctttaggtattatttaatgagagtcttttggtggtaaagtatcttagttttcatgtgtgctcacacacacatacacagagtctttagtgacaggctagttgggtatcaaattctgaattgatgtttttttctctaatacttttaaagtttatttgtgttctggcatctgttgttactaaataaaaatcttccaccagtccatttgagttcattagcaggtaatctgcctcttattttaagcacttttaaagatttttctgtatcttgatgccatatgatagatctaccttttattatactttactcagtaattactgtgggcttttaatctgcaaactcaatcaattattcgattttataaaattatcagtaataaccttttctataactgattatttgcagttgaattaaatcctctctttctggaattccaatcatatgtgtgttggagcttctcaatctgccctccaaggctcgtaactgctcttttaaatttttcagtactactctcaattttttttttaaaaaaacaacctaatattgcagtgtttggcacagaagaagttcaaagtacaactttgcactgccacgttgaccagctattctggcactggttattctttaaagttatttttaaggttaacgtaccttatcaggcagcaggtctcaaaacctagggaagcttaaaagcctaaaggcagcctggcaaaaatcaagctgattaaaatgctctttcccattttcttgtcctcctatgccctcatccctaaagaatagtgagagggccttccttaaaaagatatgtataaaatagcagaaagaaaaaggggatccagcaagcgtgagaagacatacttagataattcacagtaaatgttccaaataatattcagcctcactaattctcaaataaatgtaaaacaatggcagatcatttttatccattaaattagtgaaaataggaggaaaagaacattttgctgacaattgttaacagtgaaactgaaattctcttcttgtctagtttgaatctaaattaggacagtttgaaagcaattgggtgatatctatgaaaaatctcataaacattctacccttccatgtagcaacattgcttctgtgaatcaaccattaggcaaataaatggaaataacaaaccaaatttccccccacctcccaagagatgtttattgtaacattactgataatattgaaaaactagaagcgatctatatcagtgatccacccttgttttgactgtcactcaccgtaagaaaatattaggtatacaaagtaacccaacagacacacccatgcatcaaaaagttccatataaggaaaccgttcaatccattccatttatttaaacaagccaatgaacaaagctggctttgatccactaaattgatcctacaacctaagagtaggttatgactcagtttgaaaagcaccaatctgaatgtcctataaaagatatatgatggaatatgaattaaatttgatattcacaattttttacttttttttgtttgagggtagttggaggggtactatgtttcttcagccagcaaggaagataatgtttctagataactccatataatggagatttactgtaatgataccagatctgttctactatgcccagccattcttatgtatctgtctctcaatgcatcatgggtcctttatggattcttttgtgatgtcctcaagcttcctgtccactccctagcaacttgcccaaactgatagaaccggcctgaatcagtcaacatctgatttcaagcattttctcttggtcagcctttggtattaggactttattctcaatctaatcaattaatattagctgagctaggttgatttcatttgaatcaacaaagaattgctaaaagctgcatttcctagaaaatgtggcaatataattggcaggtacttgagagtctttaatgttaaatggaaaaaaaataaaaaataataagagacaactttttatacggagcatgttttcggttttctttagatattttgttagagacaaaaaaggaatccagaatttattttatactacattagtacttaacagatttctacataagcaagtattatgcatttgtaatcagaaaaaaatatcaaaattagctctgtggaaaatgatcatcttgcaagcaagcatcatgtacccctacttttgatttagctcatcttcttgatgtaaatatgaagtgtctgcgcttgaaattctgtttgaagtggaaatcttcatgtttgtcttacaaataccatctcagagtacattgctcagtataaaacttgttttggggggttgggtacaaaaacctgcaaagatatagtccaggctccttttcccaaagtccttcactttcctactcttagtataaccattattttgtaaaatttaataaggcccctaataacttggggtttgggaatttgatttgaggtaacatgcctcagagtatcacctattttttattaaaccaacaaatttct

SEQ ID NO: 44021 - DNA, 11306 bp, Homo sapiens
aacatattagccacaattcacaatcagcaaaattctcaaatctagtcattgtcaactaaactattaaaatgaattttcccctctaagtgtttctcatcttaaagggtttgtatgtattacatgtcacagtatggtttattgcatataaacatgggaaagcaagccaggcagaaggagtcttgtaaccagctaaaggcccagctaattcttgaagcagtcataaatcatgaacggtcttcttgtgttaatagtgtggacaggactgttggtcacacacaggaaaatgagtcacacagtcttgtgtgtacagcaactcactccacactcaatgatgggaatggtcatgattgttctaactgtgtgagcagctacaagaattatggcaaagctccagagctagaaagctggttttttttttatgtcacccgagtatgtaattcactaaatgtttagtattttataccttttagttgacttgtgagccctttctaaaggagatctatttccctctactagaaggtaatcagaaaaaccctaaactacgttttctaaatgctgtgttcttctgcccaattgaccaaaatatacttagttgattaggactttgaagggatgagatgaggggactaaattaagatgcaggaatttcagttttctaggggttttctgtaaactactttatactgctgacaaatggttaaatgtttccaatgaaactaagtatgctaggatttctaatgagcaatgaaattttagaattcatttactcattaatttcttcatttacaagatgtacaatgtgctatcttctgggcatttggggtactttaatgaggtagcagtgagtaccacaaatggtcacttctgcctttgttcttatactccttagagaagggaaaggaccagattcagataccctatcactgctttctacccatccagatcagagcctttgctgagttctaacgcttagccctcttctcagctgatttggctgcctccattgtaataggcctcatgagactccagcctaggcctggccttcagttcagcaggcagagcccagagatgtactgggcaaaggtcaggggatttattatatgagacaatggtctgatgtgatttaatttactcctctggtaccagatatgtgtgtgtgtgcatgagagagagagattgagaatgactgatttgggagggattttgtgaaggtttatatatcaaagcagaaagaccaagaatttagagattaatacatgccaagtggtaaccaagaaacttctgtgggatcccacctccaacccctccctctctgtcagattttaaccaaatcagtgtgatgtgatctgcttgcatatatgagtgaaagaaaaaggaaatttaaaaagttcttgatataaagcctggaggaaacaatacgaaaatccagcctctatttcagcaatatctgccggactattggttagtattcccttactgttacttattgtttgattaaaaggctgatagtcagggttttttttttcttacttttgcattttttagatataaatctttaatatatggctgtggccagatgttttcctttctcctcccacttcgttcttccctcttctgggttaatttctcattgttctctcttccccttacttctctgcccttttcctttctactctaagcgaaacttctttttttctgtgctggagtttataaagtattcttttaggcaaagaaagcctttggctgccttcctccttgtctggtcaccatcaagatataattttggttttcaaaggttgttctctgaaggaaggactagttttctgagcatttagagagcagatacattttgagaaagtcaacagagatagtaatttgcactcaggaaatacttaagggttttaattctgttccatgtgttacatttcaacagtttacattaagaaaagtattgtaaagagaagtgataccacaattgcatgtttattttgcatctttagtctgagagatggtcagtactttgaaggaaagagaaatagggctttgtctccttctgcttcttgctatacctcttttcagattaactctgatgctttgggtttcttactgcatgcctgattaaaacccatcccataatgcctgatgtgatgggaaccaccacttattctatctcaatggaaagtattcacatgagctttcaacagaaggacattctcccacctcttccaaacacctctttgaaaaccgtgtccatgggcctttattcatgtcttcaacaatttgtttaaaactggttgtgctaggtagtgggcaatataaagatgagccacaggagagagatgacaatatcactgattccttatagtgctgtaataagggtttattaaggctgtgatagaagtagagaggagaggcacctgacttcacttgggagtggggttgttgctaaggtgtttctaagttgaaatgtccttgagctgaggtttaggggaatgagtagcaaagatggattaagtgagaagagtataggaggcagcagggccagaggtgtgaatagcccagaaccttctgagaagattcctttgtggacggaagaaaggggaggtttgtggaaatggtggaagataaggtaggaagaggccacatcagatcacacatggctggatgtacctctctaaaagtactggggggtttgaaacagaggctataaattggcagtttaagaaaatcactgtggtgtcagtgtgaagaatacatttttgcaagattctaacgaggattattttcagaaatttaggcccaatttagtccagatgtcagggctagtttggagtaaatttctttctttaattactccagggctcttgtattgcttcaaagaaagtagaaagtggaactcaccctcattcagggagggtgggcaagcgaccagccagctggggaaggccaaagagccaggtcaccttgtgcccgcacttgttatgatttgtttgtattgtctgcctgatgatcaatgatattagctatgacagcacgtatgagcctggggtaagtgtgtcttcttgctacttgaagtgcttcttgaaaatagtggcaggctgaagacaacaaggaatactgaaaaagcccattggactggggacaggagacctggtgctgctcccagcttggccggcaccagctccgggggcttagacacattacttcacctctctgggcttaacttaccccatttgtaaaatgcaacctttagactaacactgttctcggggccatgttcagcctctggcttctgtcattgtgatcctgcctccccaaggttcccctgggccccatcactactaaccctaggcttctagacattctgattcatagagaaataggaaagcccatttatcttaagttaatgtcagccagaagtacagttgtgtcttaaggaatctaatctagtgaacatggaaaataattttctaaggaaaaaaattgtgattggtgttctgtcctgaactgatggcaaaagggaagcagaaccacttcacacatctcaatctctctgttttttcctttttatcctcttgaatttttctgcctgtttgtctttcaaaagtagagaggagtttgaatggggatgctgaggagactgagggtagccaccgatgggggaagctggactgtgggaagccgagttctgccacctgacaaaggggcacgtgtttagtgtttatttggcatagcagctgttcaggtggagcccaggcagaattttgatgtcgttgggaccttccatacctttctgaaattctcttgcaccaacacccggcaccctcaggttatgttctgctgcccaaagcctgaggctcaacttctagccctctcttttctcttttaccggaactaacttctaaaaatccagaaatgacaagtagatggtggtctggatgttcctgaggtggaaagagaacctctagtgcctctggctgacattatatccactgacagatcccctcccgcacgcatacatgtcacatgtttctgctcatttatcaaatacagcccatgctttggtgattgagagcagagtggggattataagttgatgcagtaggcctgtgtcttgcccttagaagtttacaaacagcaacacaggcaccaagagctcatctgttacacccacagggatttatcatcttgtgacttggatattgtggaatgttttatagtaaaggttaaaaaaaaacaatgtaggcacagaggagttaacagctaagttgcggtggggagtctggaaggcttcatggacgtggtgatatttgaacgtgactttgaagggtaggtagagtcctgatttgtctaacagtagccttgaaagtaaaggaaacttgaccatgaagaaggctgttgaaagtctggagaaaagagaaggtaggagactaagactctaggagaaggtactacgttccagggagaatgcagaggtagaatcctccctcatggtgacaagttaaatgtgagaagggatggagtaaccaactgggtgaaccctgatctcattaagcaaaataagaaatagaagaaatgaatctgcatgctcataatgtagggatcagaagcaggtaggaaatgctgactttattttagacagaggttattttaggtacctgtggacatccaggtgtattatttccctatgtctgaagcacatgtcctttggttctttagcattttgatgatgatgctccatgtaaactgccccctaggattttctataagttttcttcctcatttgagagtaaagttttaactggtaacatgatcacaagtggttgaaaagttaaaatgttattcatatagctttccaatgaggggagcatgaatggtttggtactgttttacaagatgtgaaaactgatttcacttaagtagactgtaacataaagtttatgtgtctgtccctttggcttcctggtaggtggacagtctctctgaatcaatagtggctcaggcttctgatttcaaacctctttggccagccaactggtttaggagaaacatggccaggtcattgaattataatttcctgagttatgttgtggtggtcccgtaggacagtaaacataagcctcctgggaactgaacttttaattcaggaggactgaaaacaagctcttctgagccaagatttgcaaggacatgttacaaagatagactggccttcctgcttccacaccattttttcctccataaatacatgctccttttccgtatttttcttctaccctagtctgttgtagattttgaccttggctgttactttcctaccaacacattgcctatttttaagtttcctggtttgacctgatgttaagatggaaagcaaagctagcaaactgatggagatagggccttccagcctttctaactttccctgggatcatcttatgttgatttacatgttcaaaaaatttttaaaaataaataaattgtatcagttgatccagaagtgattagactctaggggcctgatttatcttagccaaacttaagagatgagccaatacaccaaaatgccaatatatttgtttgttctctatggcactgtcaagcaatttcatttcatctgattactgtgttcattttcctgaaagatagtgaacccagaaaacaagaatcagaaggtcatttgacaactgtggagttggaatagagggaactgaatgaccctctattgggtcatgagggagagcatcatcaagctttgagaaattattgcacctgtctctgtgttgggacatttttttggtcccaggtagttggaagagacaaagctgtaaattatttactagtttttcaacatttccttatcacttatcgttaactgatggaactaagttttctctaaagtcccttatgaataaaattgctagacattgcaaaaatgcccctctcaatattgacatgcttcagtggtgattatcttcctgattaatgtttacagtcaatctcaagctctataatggactcttaaaggctgtagtagttttctattgcttccataacatattaccacaaacttagtggcttaaacaatacccatttattgtcccacagttccatatgtgagaagtctgggcacaccatggcccaactgggctcttgcttagagtttgcaaggcagaaatcagtgttgttagggcctctagggatgaattttcctccaagctcattccagttgttttcatgaactgagttccttgtcattgttggaccatgttccccatttccttgctggctgtcagctgggagccagtttttgctcctagaggctatctgcattgcatctcatggtttctgtgtgcccccttccagcaacaagattctatgtacccccttccagcaacaatattctatgtaccctcttccagcaacagaagatcaagtccttttcaagtttctagtctctctgacttccccttctgccatatctcattctgcttttacaggctcaggtgattacatcggtttgtgcagataatccaagataatctccctgttttaaagccagtgggttagccatcttaattacatctgcaaaattccttcacagcagtacctagattagtgtttgaataacccaggatggtaatcttgcgggggatcttttagcattccatctacccagtctcatcagcaacactttgaaatattgtcgttgagtgatcatttctgtggccggctgatttcatctatacaagtgtattctttttatttgccattttataggataatattttctgatcttaattccatatttcagtattaaaattacttgacatagatccataaatcatcatctgttgcaaaaaagcacattaattgattggttgaatggggagattgagatatttcttttctcttcttctgctcaggtgggggcaacttttgggggcagatgagttctgttgccacaaaagttatatagcacatttggtttgcactgaatcagcgattctcaatcctggccatgctttagaattatacaagaaaaatcttcaagtatcaatactcagtccctatcctactgatccaattcatctatgataaagccagagcattgatttttaagttctgcaagtgattctaatatacagccaaggctaagaactactgatatgttccaaacactctattttggagataaagaagttgaggctgaggatgagaacttagtcacataaagttccataactagtaacagacagaagttctgtcctacaaaaaaaaaaaaatttgatgctttaattgtatgtagagttcagtgctcagtaattatgtacaaagtgagtgttgagacgatctggaacaccctacttcttgctttagtaggaagactatttctttctactactttaaaaaattatcagatcttgcaaaataactgtatgaaggtctcttctcagcagctttggcctgccttgtgagtaataataaacacagatctattctacactaactagggagctggccgcttggacttctactacctctctgtgttccagagcttcatggtacaatgcagtagccactagccacatgtagctattaaacacttgaaatggaactagtttcaactgagatgtatgtgagtgtaaaaggcatactagaatcaaagatccagtatgagaaaaaaggtgcaaaatatctcattaatacttacattgattacatgatgaaataatatttgaatatattgagttaaataagatacattattaaaattaatatatcaatttttaacttttttaatgcagttgctagagaatttacaactatgtatgtggttggcatttgtggctcacattatatttctgttagcacttttctagggagtattttctattaaagctattaacaatgaatggtccaagtccaagctattacacctcctttgatcctgaagagtgaaggggtacactgtaaacttcctggagatgagacatgatattgatctgccctgtgtttgccatctatctggcagccagtcagtctggccaaatagacttctatttttacatagaagcttaaaggaggcaggataatgccccatgtcatggagagagcacactgcatagctcttgagtaatgtacccaaaagtagaccaggtgctattggaggttctaaggcatagcgataaatattacatcccttgagcaatgtaatacagcccttgaagaaactgccatgtcagcacttatgaattatcactgtctttgacaggccctatgcactgaaaatattatggtgtctacctctctttataattcacatccaaatattactctgtctttttcttgctccctgtagtttgttctgattcactgctaccctgattgtgtgtttagtttgcctagttcacaattgaagaagcatgggaaagtaaaggcaggccttggaaagatcaagcacagttcgaaaccctacccagaattattctgtctgtgtgagcttgggagatttacttaacctctctgagctcctctaaacttccattttctcatttgtgaaatgagcctttctcttgcaaggtctgtctgagggttgaatgaaataagaaggtacctggcacacttattttttgggtagatgttgtagtgaacatctactctgtggcaagcctatggctaattgttaggatgtaatcgtgagtgagacacagctactgcttccagctaagagaagagaaagacaaggagcctggtaacgtcgggacatgaatagccgtcaatgaaaggcagctattattacactgcacagtgcaggatttggcttataacaaaattttagaagggtgttcaggtgagggaattgagacccatagtgattaaatgactacctgagtcaccagctcggacaatgctgggctgatgtcaggttacgggattgctgactcctcctctagtaatgcctttcctgggagatcacattgcctcactcttggtttcccaacttgtttaccttcaaagaataactttaccatgttggactcgataaaaggaaagaggggtttcctccaatttttgctccatttgttattagggcatgctagtaactaactgtctttgaaaacctacgcttctgttaactccaaagaaggcaggaatacatgcacttctttaagatataaaaagtatttagtatactataaattattatagtaatcattgttagattatatctcaccaagataatgaatgtttttgtttgaagacttcactgtatgagaaattgtctcctataccttatttatctccttttagattaggtaaaacaaaattttcaaatttgagtctgaagaaaattccaacatctttaaatttgtttaaggaacattttccatgatctatatgatctatcatagtaatttaaaaaatcagattttagaatgagccacgtgtagaaagagaaaaaaagtagaaagtcaataagaggtttcatttttcaaattttgttttggaaaaaactacttggtagggacaatggtgtaaagtaagatataagaaggaatatactgttcaaataagcggccatgcaattgattttctctttcatgtaacaatcacatctgcattgtgaatccgttagtgcaccaagtgaatcaagcttagtgagttgacaaacatccacagggatagttgcggggaggcattataaagtgcaatgtggtcctagtgaaacagaatgcttcgttctttgagaaagttccactctgaatagaataacggtgcataccaatatcggagtatggccaagcatttggctactgacatgccccttcttctttcactcctccataaaggaagagacagagactcaggttcttgtaactcagttgccttttttgagttctcccaagaaaagttctaacttcaagccaagcgtcttgtcactgggatttctgtatctaatttttagttctagaaatccatgatttcacaaaacaaattatccaaacctaacgacaaccacatagaactttcttaaagtagacgagggaggaattagcccctaaagtatttcctgcacaattggaactcactatagaagatgtacaattgcctgtacacccaagcacaaataggctgtattattgccttatcctaggagatatacactttacattatgatggtccttccctttcctggaccttcatatgatgtaagtgcttgatttaggaatagggtcttacatattgtggctggcgaagagcacatttgctgattgctctaccacatgcctagatgtcctcttcatgatatataaatgagggtccctactctcaatataccccataggaacataataaaacataaatagtctatttgttactactaccaagaagacttcagtaagtgtaataactaacccttttggatacatgcagagggaatgccaaatgctttaaataaattatctcatctaatcctgatttttttattaaaaagggaaaatcttatcatatgaatattagagatgagtaaactgaggtttggtagagctgggatttgaacctagccctctgtgactccaaagcacattcacttaaccccaagcccaccctctctgtaaatgaagattaatgatagcatctgtggtagaagctaatgtctcctgacctgggaaaatatctttcaatgattattaactaaatgtgatcagctgccagtggatcagatgtcatcaaataaaatcgagtgtccagggtttactcaacagtactgtctcttacattttttatcaatgttagtagattgcttaatctttgtacctgttacctcacatgaagcctagatagcatcagtcccttccccagccagtttgtgctgggttcagcttctggcttgtgaatccagtcagtgaattaatgttggtagcttaaaaacagccctgagagaggtatttacatcacagaaattggcaaatgatacaaatcatgaccctttttttaaattccagggagacaggtgttaaacatttaccagtacaccactgtctatgattcaaatcgggacataataattgtatttctgaaggtaaacaaatgcacactgagtacccttggaaaaaagcaaccttccacagatacaatcacacctaagtcacctaagtctttagtgaattttttgtccccatcattctgcatttgggaggaccttttacaacataaccataatgattttatatgtcatttgaaattttaaaaaattactttatttgttcatttttgttatgaaagcaaatatgcccata

SEQ ID NO: 44022 - DNA, 1426 bp, Homo sapiens
tttagttttaattttaagcccttcagtttgatagctgatttttccctagtctgaccttctattttcgggtatgctccttcttttcacagtttcatgtgtttgtactgccttattcttgaagaaccattattttgattgcttttgcattaatctccatagtgccttgctcagtgttagcaggaactagtagtttaacaaatacttgctaattctaaattaaagagcatgaaacatattgttttctttgcctggagttggttatagcatgctggaaaaagtattatatctaaccttcatcttttctcatgtgtttatgaactgttttatagccaaagaataagttagtatatcatgggcctaattatgtaatttggaggcctcctctgctgggcagtctacagatttaaaattcatgccagctgcattacgctggttttgaacttgctttttcttgagaaagatggggagcagacaaaatgcctcaggctttgagggtagaaatggtgtgagttccattatgcaagaatagaaccccattttttaatccctcctgctgaaaatcttgccatgaggctatagccaaagaatgtgtaaatatcaaaagaaatttagagagggattttccctaggaaaatattgcaagcttaaaaaacccagtgggctaaggtccaatttagtagattcctccgaacaatgccatcctctacttagattgttacagaacttcttatgacagcatttgagtagactcctgtacctctgggttaaaaggtacatgtaataagtttaggtacctgggcaaaaagggcttggcagaggggaatagagggactttcttattctcacatctagtatatcattacattgtaatgttagataacattaaagttccaaacttcatgtgtccgcactctgacgtttcctagggacattttgtctcagctagaatctaatagagaaggattccctcatctagaagcttccatatggggctctgtgaagatgatgtggacagtgtacaatccaattgaatgtcacgtctcgtggcctggctcatgtgagggcactagagagagttctccagaggagtgcagatggggctacttttggaatcattcccactgagccaacatcagtggaagagaaggggaggagttagattctaataaagcccttatcttctgctgaatccatccacatttttttatcctcctcctggcccctgcacttagttagagtcgggtccctatgcagtgttccaggcggcagtgaactgcattcacctcctgtttgggagcatggcaattttaaatacttttttctgctgtaagagtatgcaaacagatttctggttaattttgtgttgaggattcttgtttgttttttgttttgatagagcacattctatggacatatgttcagcttg

SEQ ID NO: 44023 - DNA, 3792 bp, Homo sapiens
atgtgttcaagaatgaacacttcaaggctttccattcacagtgaaggtggggaaaaaagccacagagcttttgattgctgctgtcttcaccataatccagaggcaagaagaaatcttatggtgtgttctagtgcaatggcctgcgtccatgtacatcagcaatcctctgtccccttgtcctcctgatattgcagaatttatttgatgttggagttcagcaggtcacagcaagctggattaatctagatggtgccaatgtagataatgacacataaaaagtctttcaagaagcttttattaagtcattttacagattcaaggaggaatttcatgtatttatttatttattcattcaattttgcatgcatgcatttattcatttttttgttttagagataggaacttgctatgttgtgcaggccccaaacagttctactagcttcaaacaatccttcttcagcctgcagagtagttggcattataggtatgagccactgtgcccagcccaaggaagaattttgaatgtatattcctgcttttaaggagctcacagtctttagaagagaaaacagagaaataaacataatttaattgtgatcctcttagattattaaagggttttaatctaggtaataatactgttagatttttactttgtcagtaatactagtaataggataaaagtgaatttgaaagggatgaattagaggaggaagttgatgacaataggtcaggagagagataatctaagtgtgacagggatgataaaaaatagatggatcacaaacacggggatgttaagaagacagaattaccagtactcagagtctaattaacctgtggatttttgactcggggaactatcagtgccttcttttccatccatttctaagtttctgcatttttaattaatgtgatcatcagcaatgactcacgtttaatgcagtgaagtcctggtgcacagttcagcctattagcactaaagtggcacttgcacagaacaactctgtaggggaggaaacatgctgaggctggatgacagcagagtgtctaagctacgcttcttttgtactatttctctgaactcctcatgcctgtgtctaccctgggtcctgcagctgtctgctcagctctgcagtatggctgtggtatggctcaggctactatgcagtgagggtctacagcaaggacaaaggtctgaactccctcctcattgtagtctctggacatgtgtgactctatcccaaaaccttgacaatcccccagatattttgtcattgctagagtatgtacttactcatgggatacaataaaatatatgcaggatgagttgagaacagcagagccatgtgctgggcagagtctgggaggttggttaggctcccacggaaaatgagtgacctacccctacaaagaagctggcagtgtgagtgattagatttgtgccacagctaattagtaaattgaaggagtgggaccacccaagaatactcagaaccctgaatgttagttaaattcacacatgccagtgatagagtatatttctggtcttccgccttagatgccagctcttacgggaacagagccagtcctggttatataatagaatgtttccacaccactttggttcagtatcctaaattgtggctcttgttatggggtagacaggaatgaggttgacataacgtatttggtgtttggtgatggcaaagagtacctgttcatagacacacctggttgtccacctctggctagagaccaacccaagttcaactgtgcagaagtccatgttggcctttactggcccagccagcctctacctgagatcattccctacaacaaggggcccaggattcctcagtcaccccagcagcttttcccaaggaaaaccatctcatgaagaatttgccattgatgattttctcctcactgtgcatcgaagtcaatgggtttattactgagagttggttccttttaaaccttaaccttacactgtatatgatatagaactgtaggcaggccagggtcatcaataaagacatttttggggcctctacttggcttgtaaccacctgcttatccacagtactgtgcacctagcttgtcatcaggcagagtcaccagcagccacaacaaaagggtgcaccttcgtcttttccaagcagcaggcaatgtggctccattttaacttttctggcaatactcacatggattgttaaataatgctgtcaacagtgtcatcttcaaacccaaagcaaacttcctcatcatctgtagttagcagcatgaagacggtgatgatgtgtaacataaacacactttgaaatctgatgcaattgaccctacgaagagagtattccttagtgccctgtctggcaacttctggacagaccaggaggccttggggcttagagcacttcttcagcctcagctgcaaatccattttttcttgtcccttgttcccaggatgaagccacagtgtttcatcaggtacatttatcaggaatctctgtttctgtttatataacaatttaacttaagcctcaaccttcacagtgtacgcatcacatttccatggaaggattgcaggtattagaagatggtggatcatgtcttaaccacaggggaaatgtttcaggatgtttttatagaaactttcactaacaagcaggacacaggattggcagagaggtgggggtaggaggcaggtgaagggtggcatttgttgtgtttccctcttctaaatgaagttataatgacatctgtgtttcaagagtgtggcaagtttggactgagcttgaaataaatacagtttaattggtttcaaataactgaacaaaatgaccattccatgccctgtgtaataaaatgttatagaattaaaacttattagacgttaaaatccatgaaggatattttgctggatgcccatccttcagcattctgatgaggatcttcgtgtatttgttcaatgaataagtgaatcagcagctaaatcctgacctttgatttcctcagttctctcctgcaattgtcactgatgctctcatctccagtcctgagcaaggcaggagttgaattagtatccccttatagtgggaggggtctagaaatagctgtgccactttagaagctaggctttgtgggcttttccgggggatggaatgatttcattttcctgctttctactccacataccaccaagatcagaattctgccctaaacactaatgtgtgggagcctgatgtcctgcctaagtcttgtcaacctctttccaggtgactgaactccgaaccccatgcaccagtcactggccaacattctgcattaagtgacccggtcacccagcaccatccccctgacaccacctttatctctacaccacctgcctcctgcctgattaaatctcctcaaatattgacagacataatgatacctgaagatcccaaatccaaattttctttgcccctttggacattgaactttagattacaaaagaccctgactagggatcctgtggatagctgagtcaattttcttagccccattccttaaatatcaagtctttctaattttccaatgagagcacatgaaactctcaaggttaaaagtcaatttatattaataaaatctttaatttcttgatttctgaatatgaaaaaatgatactttgtgtattttttaattttttggcaaaaccttccaaatttgtggaaagagaaataatattgactactggataaccatgtgctatgtgtaaatattaacggattcaccttagtgggcactgac

SEQ ID NO: 44024 - DNA, 458 bp, Homo sapiens
taccaaagagattgacaaagagattcactaacctaccagaatttcccaaccttgttccagggtattctacattaaatactcattaccaaggaaattccacataaaagctgtcatgcttgatggagccatatttacatgaaacgttgcagcattttcttctttaaacctcttctacaatttgaccaattccatgttccagggagtactcagaggctgattaggacatgagttgttagcatgtgctgcactaatggttatgagtcacatttgttttggaagatcacccttaaagcctgtcactcatgcttgtttatgggaaatacaacaacttaaacatcagttaacaaatccccatgaatgcatggtcatatttgagtgcttctaacaaatgcttcctttcatttctcccttgacagccctaagaattaaaggctggtagagcaaactgggagacatcc

SEQ ID NO: 44025 - DNA, 1667 bp, Homo sapiens
agaactcaggacccacttaatagcaggactgaaagagctgtaacacgaacagggctgagacatgccttccctgcccaccacattgtaggtgacaagaacagaagagctacagccctttggggagcccagacctgtgtgacaccctctttgggggctctgcggtttctgtcatctccatgctcccaggcgtcaccacattcccctcgtccagatgcagttgcccacggtggaagccatttgcgtacatcagatgcagccgcaggcttgcatggagctggtgcctgtgctggtgcctggagctgctcaccccaccacggcagctggtgtacctggctgtacacagtggctgaaccccatgcttacccactcacgtatccctcattgctccacgcctggcttgcccttggcaggcatggggtccaggctggtagcgcaacccgagcatagcctaccaggccgttggcagaacaagcccattgggcccgagcaaaacttgggcaaatgtgccaccagccacaaaaaggaaacacaaaagtttccagctggaaaagcaagacctgaagaatcctgcaacagaatgatgctctggagtgttttctgtgttaggtgtgcttgtttgtttgactaaacctccaaacatgagtctgaagattaaccagtttgggaagccttgcttcagctttctactgacattaaactccttctcctctcccatttctgtcttcacttagaaatggaaacccactaattactcaagatcttaccttttccattcagtcaactaggcccttgcacccccattactttgcgttccaccttgacaattgctattgccaaacatcggcattaatctattttgacatcttctttccacctgctgccctctagtggaagtgctgacaagcagcaaaatatttaactgggaacagcaggaaagtgaccagtttgagctggccagttcacacaagtcagcgcaggtccccagcatgatgtctacagactacagctatgccagaaatcgttaggatggcctccagctgtttggacactatttgcacacaagttacatttagagcagaactttgtaaagaccctggcatttattcaagggctttttaaaggtttcaaaaatctacctggaaaacattacccttgggatatttttgtttctttgtccctcattttcttcttttgtcatttacccaaattcttcttcttgcaaaagaaggtggttctttcctgccttccctaacctttgaattttccaaatcttgcaaaaaataaagatatatatatctttaaataaagatatatatatatatatataaattcttacagtttagaagcttccagtcaccaggtgaaaggaattcacatgaactgaaaattgacaatgtaaaggacactgtgttctcctactgttcctccaagtctctttgcggtccgttagtagtcttcttttttccaggagacactgaagttaagagagtttaagaagattgtagtatgtcacaaagcaagtggaaaagctagcactagaactcaggtctggctgatggaaaacccttatgtattttttttaatgtgcttctttggtgtttagtgattatttagtcttccgtgaagtaataaataataacttgcatggtaaatgttattaaggctcg

SEQ ID NO: 44026 - DNA, 1874 bp, Homo sapiens
tattcaaaagccactatccccttaaaagcaaccacagatcattcagttttgccacatactcagattgcacactaactggaggatgttaaaaagtgttctattacaaccagttatccagtttttgccacttaaactctgctgtgagaaatgtgactgtagagcagccttaaaaagagatcatcttgatattaagcagtgttactcatacatgcttgttgacattctaacaggtgactttgaatggatcttcaggctcagaaacatggttgtgtccctagaactggtgaggctggaacaaggtgtacagaagtgaaatgaccacttgctttctctattggatttctttatccagctgtgcaattgtttcagggactacagttgattttcctgatgcaagcctagcaacttgtttttcagttcagcacagtaaaatatgaacaggagagaactccctgttggccacccacctcacaatctttaaaagggaactctgtacagaagcattctgcattaggcaaatgtacacttctgcaatcaaaatgaaaaacacttgagctgaatcgtttttcgttagctttagtttccagccctgattaaaaagaacacagggaaccctgcaagtttaagcggttttggcagccgaggaaacagctgtgacattgtcaagggttgtctgtaggagctgtgcaggctgctgacagcactgataatgcccagaaatggggcagacgcttttcgcatttggtcatcaaaggagtggcagcagctaggttcaagaagtgaacttttgaccctgtctgagacaactggctctcgtggatcttgttctgtcattctccagtctgattttctctttcagaacaagtgggtaggatctttggtttttaaactgtttgactgttattaaaagtaagctagttcttatagctgcgattggaagggatggaaggtgaggaagaagagctggtatttcccactatcctgcaggggtggggaaatctatcaacgactgttccactaatctgcggatgagttatctagggaatatcatgcagttgccaaagttttcagcatctaaaagcctccaaagttctctctgtgagggtctacctcccctgtctccagatccttcccatgcccctcagactcagcacttgtccactgtccttgctaccagggaatccctctgcagcccccttaccctcctgcccctcccaaaagagctccagactttgacctttctcttccacctcaacatctgtttgtgtcttaaactgatgtccattgaaagaaacagataaactaattaatgctgagatatgacttatgaagtattatgaatgtgctaactctctcaggggtatgtgcattttaatagaggaccagcagtccaaaggccggtctcactccactgtgcccctctaacagcaccgagtctatttccaggcagccagagaccaggcctgagaacttgccccagaccaccagcgtccccactgagaaagcaagcagactcaacagtttttcagtgtttcagggagcctgcagcagcaatacagttccttcaaagggtctgtggattctctcagctttcctagtaggttgctgtggtagtttttggagcaaaagttcacgatgtgaatcttcacatgctgctctttgtgccgagcaggtgcttgcaagctagttctgcccctatctgccatcttaatcctaacatctcccatgtttttttaatttaacttctattttggtttcagaggtacatgtgcaggtctgttatatagataaattggatgccatgggagtttggggcatacatgatttcatcacccaggtaataaacatggtttccaataggttagtttttatgt

SEQ ID NO: 44027 - DNA, 3363 bp, Homo sapiens
gtctgcctttttcatcattgtctgcagaacatatcacagtatacagcatagagtaggtgcttcataatgtgttaaatggatgaaatgggttcctacctccaaaggagatggaaaaaaaaaaacaggcaagtaaataaagtaaaatatgtataaattgctttaagaatgttttataaaaaaggacagtagcccaacagcattcacagtaggctggctggagtagcagtcattgaagaaacccatgaaaacagcggcagaagcaaatgtgcagctgctctgccttttcacactgtagggcagcacacgaatagtcctggagcaccagggcccttagactgtgggatttttaagttacctagttggcacagcattgactcctcctctggtgtgattaggggccaggatacaataaacatatgttatgttggaactttgatgccagcctaaacttgccagttcagtgtttgtggttgcaggtagtatcagctcctctcctgatatgattgagagactgaggtccaaggcttcaggttgaacagaattgatggccctaaggattgggttagaactcttccaaagcacttagcaggaagccagtttacttttcttggatgccagcttccaagaaaagatcagtcttgagcaaaatagtccttcactctcagctcagaagcctaattgagagggtatcctataagtaacacagcccactctgctagtaacctgttctacttcaacctgtaaggcccatgaggctagccagtgacatcactacaggacacagtggaggatgtttaggaatggctgggtgatgaccagggtgcagattgtgtttactcaaggctgattgagaaatactgttttcagtggtgtgcttataaatgtttaacagtggtgggtggaaggggggctctggcttgtagcatttttctagtgcccatggtgtaaatactcccaacatgaccaactttaagttaccaatgtgattgaaagtagagtttggaagcgaggcacagtagcccactgttatgtagtatttttgccatacagatgcataagagacataagtaacctgaagaacatagataattattaaatgtagtaaaatgatcatgaagtgacagatcttgagtgttttatcacatttgtttttaatataatttaattttaagttgccataatttaatttgtaattaagactatgttaataattggcttatggaatttctgagaattcaaaaaccagtgcccataggtggatccagtacaccactaggtaagaacagcctagaagtacttctaggctcttgttctgaaaggtgccaagactggcatccatggttccagtgccagggtcgaggaaagacttactaggtcctgcagtattgctcccaaatctctttcagtggccagggaaattatcagcctgaaggcaggctgaatggcttgcttacattcaggtcccagtatctacgattgacaatcggcttcatttgtaagtaccagatagtgcaactccatgtatccaggaggctgggaggtactgagagcagactgatagtgtcaagagacactgaaatgactgccagctctctcctgccatatccactactaagtgagaaattcagtgacatagtcactgaggactccaccactgctgggtgttggggagggcacactgagtatttcaagacaatccgggtaagatttttcttggagggattcaagtacaaaatagttaatatgcagaaatgaagcagaaattattatacctcagaaatgagtcagataatactaaagaaaggaagaaaggaaagcatgacttgattcatgtctttaatgatgaccaaagaagttgggtctttaaagatgacaagagaagactgatcaggtagcagtgaggtggaaggggaaagatgagagaggggacattcctggtagaggaagcaaggtagacaaagtgtaggaatgtgaaagagcataatgtatgtaagtattgttcaggtgacttcttgggtacctagatagtagagagaaattagaggtaagaatggaggaaggggagactcagggccaggttgttgagggcattttatgccatgctaaggagtttccaatttttcctttcagtaatagcaagaaacttaaaatgagcaggggtttgtgtttttgaaagaactgggaaaacacctctgggcaatccattacctggggataatgggtgaaatttcccaagttagtgcacaggctgctgggtagggcttgaggctttcctcttgcctcctatttcaacactgtggtcttttaggacttgtcctcaacatgttcttaaaaggaatgtttgctaactgccaaaacagtagtcttcatatttattctgttcctttccaaaaggtaaattgaaaaagcaacataccctcagccaagagaattaatcttttatcacctaagttactgcccactgcctttcagttttaaagttaatttagtgtgcataaatggctatgagcccctggaactctctttatgtttgcatcttaaatttaccagaccctccttctgcctctagttccagaattttctttgtcttattttcttcaagaaatgtatttctttaaattggattgcaaatttggaatacacacagtcaaagccttttaaaaccattcttttaaaaaaggacaagtttcttgagaacatttttaaaggaaaaagttaaaatagatgtcaatggaagatgcaaatatgaatataaaatatgaaaagcatctataggctggagcttctcagtagagctctacttcatttaaagtcatattatctggcaccatttcaaagcttttggttacttgattttgtagttagaaaaaaagtataaagttgaaatattgggctctttacatgaccattttgctagtagcagtggatgaagcttttctctaagagatcaatagctttagtgtaaacttggtcaataccttattggaagaggtgactatgtcagattaggtagaaactttaaaagccagcaagtttccaaatgtccttctggaattggcctcctagggccatgtggaccagagagatcttatcacagaagtcataaactgatatccgtgagccaaatctagctcatgggcatgttgtttggcctacagcacattttttttttttttttttttttttgagacagagttcactctgtcacccaggccggagtgcagtggcacaatctcagctcactcaacctctgcctcccgggttcaagcaattccctggctcagcctcctgagtagctgggattacaggtgcccaccaccacacctggctaatttttgtatttttagtagagatggggtttca

SEQ ID NO: 44028 - DNA, 942 bp, Homo sapiens
ttggggtgctcaatgtatggacaaactccttccaggagagattagatgcttgattttatcattggattgagctgggggagaaggcacaggaagtgcccacacactagtgcccacatacataccctttcaagctcccagaggtcttactaattacctgccccactggctcttagtccacttagtaatgctataaggaatacctgttgctgggtaatttatgaggaagagaggtttatttggttcatggttctgcaggctgtacaggaagcatgatgctagcatctgcttccagtgagggcttcaggctgtttccactcatggtagaaggttaaggggagttggcatgtagaaatcacatggcaagagatgaggcaagaaagaaagaggagaaggtgccaggctcttttcaacaatcggttctctcgtagaaactaagactgagaacttaaccactgccctgacaagggcaccaagccataaatgagagatcattcttatgacccagacacctcccacaaggtccacctcccacactggggatcaaatttcaacatgaagctttctggggccaaacaaactgcatcaaaatcgggctcccagttttagactatgtagaactttaatccttgggcagcagctgggaaagtgcaataaaacccctaccagagagaaactaggagttgggcaatatcgcctgttcactctgtactaagcctgagggaattggggtaggaagttcttgcacacctgtttaaaattgccaccttgttctctgtggtccagagataattgcaaatgctgagcctatctgcttccagagctaggtgaattggtgattatggtttggctctgtgtccccacccaaagattgatcatggggacggtttcttccaagcattctcatgatagtgagtgagctctcacaagagctgatgaagtttt

SEQ ID NO: 44029 - DNA, 663 bp, Homo sapiens
agcgtaactttcattattcatctaggtttttttcagggtccttgagaaatgctaagattatgccttgtgtttgagaagtagaaaaggaaaaagggaggaaaaccacctagagaagtgcttctcaaactttaaggcacacatgaatcacctggggaccttgcagattctgattctgaaggtcagaggtggggcctgacatcctgcatttctaacgagcttccaggggatgctgatgctgctggcccacagaccatactacctagagcagcaagctttataggccatagaggacattttttttttttttttttttttttttttttttgcatggagcacagattactgctctactctaggttacaattccaaggaaataatgactaaagaaaaatactgctgtttcaacatttctgagtcatttagtaagaatggaaggttaacattagcaatttaacatttcaaatgtggtgggagtatttattgatgtactaatttgcattttgttcctgccaaatctttttactctgttggctccagggagtttgaaagtctaggacagaatttttcttcctaggtttgtttacatattgtggaaaagaagtgagcatctttggagttaaggagagttaagacccaaggagaagaaagaaaaagactatgaaa

SEQ ID NO: 44030 - DNA, 766 bp, Homo sapiens
cttattattcattgggcagttagataactaacatatcagacatggaataataagtgccattgtccagatattaaaaacaaaattggtgttgtggaagcaaaaagaatgtagagatggatcccaactaggagaaagaaaaattgcttcctaaagaagacacagattgaccatgaaaggtggatggttctacacaggactagaaggtaggaattcttcatttgttggacttgctaattttttttggtgtaaatatacccactgttgttgatttaaagttgataacgtgatgcaactgaacacagaactgggaagagaaggtggctccagcacgctacctatgagtcaccagctgagctccagacttaattaaatcaacctcctcactactattttgaatgagtgaattcacaagtcttaaaaagatctatgataacattataagggaagagatagtcacttctgtcattctcccttacatctccatctcaccttccaatattctgtttgaatatccttccaatttcagtcatatgttcctggctggcctacctaggattaatattggcccagtgccaaaatgtgattctatttattccttttagcattgctgtgattaatctgcgctcctgttatcccatggcatagcaaactctcttactgattatggcctggtattgacacctctgctgttctccataacgaaaagcagcttttggggtggctagctgggcaggatgttttgctgctcttgtaacagtaggaagga

SEQ ID NO: 44031 - DNA, 1046 bp, Homo sapiens
aggcaggcactcaaacagaaaggtagtgcaattaattgcttcaaattctttactcagggctgcccttagtcatgatcaaataaaatgtacacattgtttggcacttggtaaaatgttgtttcctttccttcctccttcccctgatagactctccttaggtacaaaaaagatgaggctgtacacagagctaaaagtgtacacctttgaaaaaggtgtctttttcaaagagcaccttcaccccttactggactaaactcaatccaaagctcttttctctaagctttataacacttactgcctggatgagtcatttgtcaataaatacagaatgtttgtataggtggggttcttgtatatatgtacgagcccctagagtctctaacttaaaatttatttttgctttagaagttcaggaataaggaggctttgatgatcaattttaacaaccgcaatatataatacagtaactaatggttaggtgtccaggctagcccagggcagcctgtgtgattcatgctgctggtgaaccatggctggctgggcgaactagatctggaattctgtggtgcctaagggagggaagggaatatttcccacactatctcatcctgccctcactatcgctacccccaatctctctctacattctaccccacctactttgctttttctgtgaaagaccagctggggcaaatattttggattaagtaaaatttgtcttgggtaacttccctaaaatttagtttttaattgaataatcttggttaatccatgagtaaataagcttgtagagtatagtcagcctcactgtgagaagctgacaaaccagaaaaccagaggaatatacaccaattccttcctgtcctgcaaacctctgcttcttgaggtttttaaagagtgggtgcctaattgattagtcattagttattgacaggaccaaagagatatgcctggctcctcttggaaaaaccaaaagactgagagggaaaagtacaccaaaaagatacctaaggaggcagactgctataaagaaaataattaggaga

SEQ ID NO: 44032 - DNA, 1309 bp, Homo sapiens
tttctatttttatgtttattttgcaaattccaaaataaaaatagaataatccctcatgaacagatggtctcaaatttcatcctcaagtaaacacaattcacattctcaggggaacccatgagaatattatgaagtatatgtctatctcatttcattatatatggaatcctaccattccttttgtctttattactagtggccagagttctatcttgaaaggtgggaaatgtccttatatgaacagattagtttagagaattattgtgagaaaaccagaaaatatttgagttctagctaactggatattgaatgagttgtgctgaagtatgtggtcataaagggttgataatgaaatacttgctttccagtggcaaggaaaaataaatgtcttagaatttacaaggtcattcttgaaatcaatcaacgtgggctgaagatctcattgcttctgttatctggcacgatggtatttgtttgtgcacagctctgttgatgtgagctatcaaatatttcttagagctgaaatcatctaatagcaaacattgctatgtcccaatggagattccaagactctttggccatggaacatttacattctatcccctttcatcactcctgaacaaacaaaaacaaaaaaaggaaagataaccaataggctttttatttaattgaaaaccaaagagagagagaggaaagaaccagttagttgccattttctaaatgcaggcttttgtttgtttctgccttctaattctttgctcttgaagctatagctttcaagcttgtgtatacaggcccagagagaacatttgaaatgtggccaccctacccatgtccatgccactcttcctgcctttctctctgcctacttctgctccaccatcccaggtcaggggcttggaggctgacagcattacaagtaatatagtcgttcaagctcatataaacaagatgaaatccaaataataaccaaaatgtattttatttcaaggactggactactcagttccctcagtttcgctgaccgatttctaggagccctaggctcagctcttggttgtctcagaactgaggagagtactcatttgcaccatatgcatctgcttgttagcctgtgctaccaaaattgattcattacttggccttctctgaaaagaaaaatgaaaacaaaaatgcactcttaaaaataattattaaaatacaaccaggaggtatgtgcctagacatggctcaccttctaccaaatcatactttatgattttccacaatattatcttctattcctcctgcccctaaggttccatggagc

SEQ ID NO: 44033 - DNA, 1775 bp, Homo sapiens
ggatgagggcacttggagagctgtaagaggataaggagcccagggctctgccttggatttgtgtacctaaatgttacctaattagataaacctgaggaagatgtggaagcaaagtagaatggaacagaaagtgtttgaataataagaatttggacattgctgctccgtggtgacattggcagactctaagcctcttgcctcattttattcattcatgtatgacggggttatgctcagtcataagtcactaaaatttgtattctacatcccattagtaaagtaatttttgaacacatgatacatatgtttacatatttgtaagttatatatatgtacaaggttctaatatattctgttcattgtcaaacataaaatatatataaatttggtttaatataaaatataaaattggcattagtagacactgtctaccgaaatgagacactgtctcatttctgaaaaaagcacaatgtatactaagttaaaggttcattcttaacagcagtaggagtagatctttatttcaaatagtctttgggataatttcctattttggaagacagcttatcagatttggttagagttgatgaaagcttattctagggttaagaaaagtattagcccagccattttcttattgttgatttgggcttgcataattagttttaccttcagtatgaagtttctttacatgaatctttttaactcacttatttgttatacaattattagttaaatcaattttaaatcagtataatctatccacaaaatcagtcatacagaacctgcaaaaaacatgttctaacatgttacatgaagaggtaactaaagatactacaaacaacccctctgaacggtaacactcccactcttcctgcaaaattcctctcatagcaaatgcaacatgtgactcagacacaggctgactgaaggctttatgcaactcttacatgctcaatattagaaaactttcatttgtttcctattttatataaacaacacatataaataaacattttagtatcttctcattacccagtggattgtcttgcatggtccattttgaagacagtaaactgtagcctctatttttatttaatttcaaatacctgtttgccaatattcacagccagctcttgttaatgttcttttctgtcctgtgaatcctgatgtcgtatcttgcaacatcacctctaaagcctatctttgcactcctgtccatcccccattctctattattatgctgcctctgatggccagagaaaaaaatcttgaaaatatatattgtattgccctacctggcgaggaatcagcagttatacaattcaaagttgcagcaattcaccacattgtttagcaccctactatgtgtaaggaggaagcttgatttaaaaaatatatacaatcatgccttcttcaagaatgttttggagcatgcaagagcttaatgctcatggacatttactttattccagcaaatttagacccaatctctgtgtagtttcattttgttttccatttcctgattaactgactatatatctagctacttatttgctgccatctagtgtaataaagtatgttgattatacaaggaattttgagcccattatgtagttgaatatcagtactcaaaatgattctttttttctggtttcttataagtttacaaaatgcctagtcagggacctttcttatcactgtaaccctgaacatggtcttaatcttgtgtcatagaatctagggctcaggatcaaccttcgttcattttctat

SEQ ID NO: 44034 - DNA, 509 bp, Homo sapiens
aataaaaattgaattaaatgtcagctagtaatataggttattaagaaaaataaagccagaaagcagcatatcagcagtgtgtgggagtttgtgtatgtgcatgagaatgtgtgagagtgtgtcaaagtgtgagtgagagcatgtatggatacacgtgggcatgtgcatgtggatgagagtgtgtgtaaaaggcttgaatgatgctgaaatgcgtggtcctaggaggcctctctattgtggtgtcctagaccagagacataagtgaaacgggacaggccacgtgagtatctgggggaaaggctatgcaggcagaggaaattgcaagtacaaagtccctgaggcagtcttggcatatttgagggatgaaaaaggccagcactgaaggcacaagattgaaagtgaggagagtgatatgggaagggatcagagagttacttagggactgaccatgccaaacctcataggcaagggcaaggctttgaattttactttatttgtggtggaaagct

SEQ ID NO: 44035 - DNA, 694 bp, Homo sapiens
tacattttagagcattttcattacacaagtaatacatatttagtaggaagttataaaatataggtgcacaaaaagaagaaaaaatttccataaccctaggaaacccactgtaaacattttggtgtgtatcatcctagtttctctcttctaatatgttctatgcaaacacatagtttttctaaaagtgtgacttaatacattatttacacttttattttatgtctatatgcgtgtgtgtatttaatagccttccccttaaggtattttaagccacagaaagactgtcttacttagatgcctgcagtatgcacaggtatcagctggcttgaagaagagcaaccacagtcactgaaccattggagtttagcattggatcttgatctcttatgctccaggctgggggttgcttacataaggagctttggtcctggctctctgttcctcccgatgggaggagacagagagccagggcaagccccaggcttctccacattgctggggttgtcctgtaaaagagaaaacctgtcactcttcttcatagttaacttcacagtcctaactatgaatttctataaatcctgcagacataattccacttcctaaaaatacctagcccatgaattctgtctccagaaagttatgttcagactgtggcttataaaaataagtctgtgacttatgtaacattctgcaa

SEQ ID NO: 44036 - DNA, 2674 bp, Homo sapiens
gggattacaagcgtgagccaccgcgtccagcccagagcacatattgcaagtagctgaatggtgaatacaaatgaaaagactgtttcactcatttccctcatttaggtttatgatgaaaaaataacccattggcagagagttgtagcttaagagttcacactttcggatttcttctgtcattataatcaacaggctgctcaattttgttttcttaaaattatttcttacaccgtaaacctttgataattatagttgtcagacagctatataaaaataatgaagataaataacaaaattgggtttcctggaagctgatccaataagaattgaaaagtagttgtaaatttcactatgtcaccacttttcaattgcgaaacttaaatttcatggccacattcagacctacatttatttaaaattactcattaaaaagcaggatatgtacaaactttctctgtcctccacctctgaactttaggccagcatctgaaagcccctaattcacctgaatgctctcattcaccatttaaaatacaaaagtttgcatttaatcacagaccacctaattgttgacatgggttttagcttctttaagggtgaccacttctgcactgtggactgaacctactgtaccccattccaccactttttcttctgaaactgctcacaatatccctggacatttctacaacactagaatgagcatatttcagtgtctgctcttcaaatccaaatggctgggttttttccctgtttgttcttactctgcccttcagtggaaaatatttaaatttgaacatataatactgcctatgtaacatcacaacagattatagaataaaaggtttggatttctccagcttcctctgctctcagctgtgcagaagacagggcagaaatcaagaactgacaaatgtgcgcactgggaacttcacctaccacacctaagttcagactcttcttattctttttctcttttattatttttatttcctctatccaccagttttctgaatctattctatggaaaaaaacaatttatcagactcaaaaaatatttaccaaactttaaaagaataaagtatcagaaaacacgaagttcctacttacacaaccacttccaacgggcctgcttcctttctctttgctttactctggcagctccacaaagccacagcagcacactctgatatttatagtcctgttgtttacctcacccctcaggtatagtccaaagttcaatgttcattcttgcagtgaccttgcaagcagagcaaacccctgagctgattgttatcaacttaaaagaaagtagcaagtgctgccatgcataatatggggaaaacattttgacaattactaatttattccctatccttttcagtcaccctagaatctaggatttaatggtacagtcgggggcgggaggaagggctaagggtaaacaaggcctccaagttgccttctttcccaaactataacagggaaaaacatttgctgagccagcgaattatgctgctgctttaaaaaaaaaaaaaaaagagagagagaagcttttttttccttttgttttgcttcttgcagtgatgaggtgctagcttagcccacacagtgtgacctttgttagaaaagtcacctgctgttacaagttactctggtctcctgttgttacagacttacacgtcgattgtgttctatgtttataacttgaattcatatgggatttcacaggaccactgctcttttcttgttaatttaaggaaatagaaaaatagacttcctatctgagggaaatcagacctcatttttattgtcactgaagtcgtacttcctggaagacctatgcatccccagaattttttgaggatcgaatataaaatctttacaaatgtgaataccataaaaataaaaattaaaggtagtagttggacatggaaagagtgtggaaatttcaagatgtacaaatgaaatagctaattcctactatttcagaagagggtattttctttctggtaacgcttgtaagttggcatgctcactgtaggtgaggtaaggagcaatgtcaaatgatgtcattcctagatagcaatggttttcgagtaggccttgcttttttcatcaattaatttttttccaaataatcccccactgattgctgtatgctgaatactgttgtacaaggtgcaggaactacaaagagactcagatgttatccttcctttcaagaaacttcctatcaaattaggaggttaccatttgaaatccaagttctctttacttgccctgagcagttgttacttgccttttggggtcccatatctctttgagaatccagttaaaatgcacatatacataatcatttttttaaagagtgtcattaaaaaaatctttgtacaaagcagatattcctccctgtagttcatttccttgaccaatttaagtagtcatattgaggaaagagagagaccctctcatattgttttatactcagtacctgttttaaggaaaaaaaaaaacaaggatgtgaaatcaaagacaggcagcccggtgccaggcccaaaccaggcctgggcctgcctggcctaaacccagtagttaaaaatcaattcataacttcgaaaccgatgttattcatagattccagacattgtacagaagaacactgtgaaactcc

SEQ ID NO: 44037 - DNA, 622 bp, Homo sapiens
tcaagactctcagtgtagaatttcatgcagttttaagattcttgttctgttagcaatctcctttcgtttaggaaaatttctaaaagcataattggggttgagaactcactcaaatttgagacattgccaggcagtaaaggaaaaacaacagttcttgctgactctgcatcacagctgccagatgcgttggttaacttgtggaaagggaaacaaaatggaattgcgaaatgaaatgctttggagaccacaaaatggtgggggcagaattgaagtttatccctctggtacttttagtaaccgttctaagggtcatctatatgccaagcccacgggtctgagccagtggcaggctgccatggggtggaatgcgctgataagaggtaactgcagtcagggtaccaagtgtaccaggaagccacctcttccatgcctcctacaccaccactgccaccaaaaagcaacctcctccacctgaagttttgttcattgagctttcctaaaaggcataaactcacaagagaatttcaacctgaattttttaggatgaatgagtttctagttctttttcaaagtgggtgtcatgggggggaaggaaacagcttgagagaacactcagcccatg

SEQ ID NO: 44038 - DNA, 1839 bp, Homo sapiens
tataattaatttctatagagaaaaaatgaagaatctaaaggaaatatcacaaaatgttagtatttattaatttaatagatatgggtatctagttattactttctgtatttttttatatattccacaattaaatattgttttgaaagaataagttctggtgctttcaatagaaagattttgcttgataatacatgccataattactgaaccttcattaaataaagaagctgaactagcaaagctcagttttgtctaggtaggccctggcctcctccagaagcaaaattaaatgttatgttgttttctgtttctttaggggaagtgtccctttaaggatctgaactttgagcacatgagtcaagctcaaacaacagttttcagtcacaagctgtctcagcaggtcatggtggcctccatctttcagtttgtggttatcacttaaattatcctggaagagtattcttagcaatctttcaaattcctttccaagtccctgtcagtttaggttcaccatttttatggtctaattggttaattatcataaaatgatacacagtgtacatgcgatcatgctttatagctgttgtaaaaatagattatcactctaactctgtctggccacaggtgtgtttgttttaatggattacaacaagattagattagattatcagtctaatcttttcaatttacagaaaatgaggcctagaaaaatcagatttttttgtacttagtaactagtaggtgacaaagttgaaaatcaaattttggacccatcattatcatcagtctatgagataatatctacgttccttagaggttacagaataaaacaagttatctgtgaagatctgaaagtatcactcattaagacatcacaatttatagccacctgatttaatcactgtggatagcataagcataatgcatctggcactaggagccatgctcctgggtggtattcatgtccagcctgtgcctgtctaatgcacttatgcccctgggatcttcagagacaaataccttgcatgatttcatggtgtgttaaggcagatcttgtgtgttgatatcatctataacagccttagcaaaagccataacatcactaatgtgattaggcacaccccatcagaattatcaaaattgcccagatcatttgccattgggtcaaagaaccactagactggagaggactttgagaagtcacctagggtacctgtatctaacacagtgtttctcaaacattaatgtgtatatgaatcacacagggagcttgttaatggagattctgattaagtaggtttgtgctatggcctgaaattcttcatttctaacaaaggtgatatcaacactgctagtcttaggaccagccttgaagtagcaaagctttttcctgtggttaaaaattgcccagggtctatgacaaagaagttgtgcttctctgagacaggacactgatggccagagagggttggtggcaggtgttttgtgtaagcaacgctcacaaagctagttatgtgctgtctaaatgcttgtctacactagtcagaaacaaactatttggcactgccaaagtgcttgaccctgaaggttgcattggagcatctatagactcagagctagtaattttgcaaacagcaaatttccccacttcttaatttagaaagaatgcatcgtggtctatcagcttaaaaaagtagattgaagagggaaaaaatgcaacctggaatgacagggttcagatctggtatcaaactccagctctttcatttaccttctgtgtgaccttgggtaagtttcttaaagcctttgacactcaatttccacaagtctaaaaggaaa

SEQ ID NO: 44039 - DNA, 1104 bp, Homo sapiens
tttatgagaggataaagtgatgtagtctctatgtcactgcacactcagatcagggcagctcagagagtatcctgaaatgagtacatttgcccgtcaagttacttgaactttagtgaaaggagaggaagagcaatcagtgcccaaaggcagttactctatttctgatcctgtttctcatggctacaaaaactgggtttgcatttgcctggcactttacagtttatagaatattaacaaatgctggggaatcttggtgttggaatttaacagtgagtgtggatgattagaacagcatcctggaaattggtaacatgccccaatttacagttttcccttggattttccaacagccttgtgcttctttattttcatgtctggacaaagctctggataaagggacagttatgacctgctagtagccaacactgagggcagtaggatgagggagggggtgcagtgacggctccagccagcaaaggggttctgagtgggcacccacagcatctactatgcagagtatttgcaaatttgggagtcatcaagttcttaatttttgtctcttgcatgtgtgaagaaatgtcttgtagtttccaaactgtgcttccaaagtccaccaggaagctggggctgggataagcaagcagaactttagcccctgcctctcatttcctttttatttattttacacgttggatttctaggtaagattacaactgaacaaagagtcacctcattctttaaaaaatgaaaaatactgatgcactttgaaatataaatgtccttgatggcagggtccttgtctatcttgttcactgagagaccccaaaggctgcagaacaatgagcaaaattcaatcctttcataaataacttgaaaaaaaaagaaaatatattaaccagtttaatcctcatgacaaccttataaggaagacaaagcaggtattttctcccatacttacacaggagaaaactcagtttcagacacttgtccaagctcacacaggtcacttgcactgatctgagttaagtagcagtggtatattggaagaacatatgcctgggcatggggctgggatgtgttcacatcccttcttcccacctgtgt

SEQ ID NO: 44040 - DNA, 954 bp, Homo sapiens
cattcgctggtacccagatttctacaggagttaaacgtctcctgagcagctaaagcagagcttactagtaagaaacttgcaatgactaaggaacttgaggcagggctaacccggggttgttaggattagaattccgaggctacaggaaacccggaattgctgagatgtgagtcacagggtgactcagcctcgttacgatgaaacagtaacttcctactacctagaaatcgcagccagggccagaccggtgtttgtcctaagtcggaacttgattgggctgagaaatcacattgtgactattccacgacttgaacaaggggtagaaatcgcaggcaccgcgaaatagaaacttcctaggaccaagaagccaacgacgcccgaaaccgtggggtcctgtcacagaaaccccagcagcgcagccaccggactgggttctggaggccgagccgcagtccgtgcggcggcgctgggaagagaaggcgccccggcagctcccctgccaccggccccgaggagcggctggctcccccagcccagcgccgccgccgcccggtaactccaggcgcaactgggcgcaactggggcagctgcgacaccgaatccctcacatctgcaacctgggtgctgcggccactgagaaaatggaggcgcagaccaacgagcggtgccgcgaccgagagacctcggctggcgaaatggtggtgccgggagcctgcgagtgacgccagccggcggggttgtcaaggacaacattcgttttgacgcagccaatggcgccgtcaccaagaaaccatcgactctgagaaaaaagagaggttcggccaccgagaaactccgtacgacaagtgctgtggcagaaaaaccgcctactccgcgccacaggcaaaacagccaatggaaaccccaggtgctgcgaccgtgacaccggcactagagggtctcggatggagaaag

SEQ ID NO: 44041 - DNA, 1972 bp, Homo sapiens
aaaatcgtagtagctggtacatcccgatttggtctacaagaggaaaaagtctcgatgggcaggacttgctattgtcaaagggagcttggtaaaactgagacatcgcgatcgccggcatttcctgacttccacgggagttttaaaaacacacaagcatagctaagacaggactcgatattgcgaaaccaaacttggtataagagctcccaacactgctaaactggtcatcgctaaacctttaaaaaaaaaaaaaaagcattcgctggtacccagatttccacaggagttaaacatttcctgcgcagctaaagcaagtcttaccagtaggaaaccggaacttgctaggactaagaaacttgaggctaggctgaccccatggttgttatgattagaaatccgaggccactggaaacccggagctgctgaccaacgagtcacagggtaacttcgccttcgcatggggaaacgggtgagttcctacggcctagatatcgcagccagggctagaccggtgtttgtcttaagtcaggacttgcttgggctgagaaaatacattttggctattcccctacttggacagagggtggaaatcccaggcaccgcgaaatcgaaacttgctaggactaagaagccaacgacgcgcgaaaccgtggggtcctgcgacagagacgccggcggcgccgccacaggactgcgttctggaggccgagccggaacccgtgcggcggcgctgggaagagactgtgcccctgcagctcccctgtcaccggctccaaggagcgtcgggctccccccgcccagccctgcagcacccatccggcaacgccagactcggcgcaacgggggcagctgcgactttaaatctctcagatccgcggcctgagggctgccgccaccgagaaatggaggcacagagctgtgaacaagagaccacggctcgccgaaatggcggtgccaggagcctgaaagggaatgcagccggcggggttgtcaaggacaacatttgttttggcgcaaccagcggtgccgtcaccaagaaaccgtcgactctgagaaaaaaagagaagttcggctaccgagaaactccgtgcagcaagtgctgtgacagcaaaaccgccggcttcgcgccgctggcgaaagagccaacggaaacgccgggtgctgcgaccgcgaagccggcactagagggcctcggatggagaaagccccgcaccgagacgaggaaactgtgcacagcacgactagcagttgacacaaacagaaaagtgtctcgtctgctctctgggagaaagcgtggatcaaaaccagcaactcagtggagagaaccccgcagccactgaagaagttgcccacgtggcggtggggccagagaaacaccgcgatttcgacgacagccgtagggataccacagagaaacatgcgcggccacagaagtacatccagctccgcgcaatcagtggttctgcgatccagaaaccgccagctgggctagactagaaacttctaaaaaactgtcgtcccatagcagctttcctaaccacgacagacagtcgcctttagagagcacctaacggtgctgagaccggcctgggccagcaaaagcgcagagcggtgccagtgccaagaaacgcccgacttggtgaaaccaaccttgtgaccaccgattccactggcttcgcaggacgcaacgggcgaaggcgcggcggagaaaccgcaggctcccttcaccgattatgctgcgggctggggatggtggggggcacccgcgaaattgtgaaaccagcggcgctgggacccagcgatcagctgcccgtagcaaatgtctgtgcagttgcaaaagataatttttggccgtgagaaggttgccgccagagagcgtccgataacgctgacaaaggcgtggcgttgccagtgagaaacagccggcgctgggaaaggaacggtgcagcgaccgaccaactgcgcgctcggt

SEQ ID NO: 44042 - DNA, 3333 bp, Homo sapiens
ctactaagaaactcgtctctgagaaatatcggtggttggaaggttgtagggtgcttccaccgagaaagcgcctacccagtgaaatacgcctgtgacagaaaaaccgaggccaagccctgccagcagtcttgcccaatcacggtgctgagacagtgagacagccagcccggggaaagtagccgtgctaggacacaggaagcgataccacaaagaacatgtgagtcttgtgaacaaggaatgttgttttgttcagcgctaccaagagcgcggcaaccgagaaaacacggagtcgcccctagtggcgaaagtgcggatgcgaaaccgctggctcggcgtaagagcagagccgcggaagagaaccctagcggcggggaactagctcgccttcagtgctcacgggagaaggcaagttagaaagaacctgagacgtgacactgaaaatcagtagaagaaatacgccacatttattctaccggggaagacagtgggtaagaaaaaaataccgtaacatttaaattaaaaaataattaaaaatttaaaagcaaatagaaattaaaacaaaatacactgataacctcgctgccagaacaagatacaccaaaaaaaaatttttttttttgagtatacaaaacatacaaagcatcctacaaacagaaagaaattgcaaacagggtcgaatggtgagatcctaccattatatttgtcagcactaaacccgtgcctcttgcgcctatccgaagtttcctcggattaagaagaaacagccatggttaaaccggtatttgcgacaccaacaattatctgtagccgacgtaccccaacttctacatgagtgaaaaatcgccagcatagccagggcgagactattgcgaattctaacttggtatgatttaaaaattccagacactgctaaatttttttaaattgcattcttcagtacctagattaatacaggagttataaaccgcacgcatggctataatgggggctcctattacggaacaggaatttgctactactaaaattatgtaggcatggttaaagccagaattgttacaaccagaaatcgcaaactggaataactctcaacttgctacggtaagaaataactaaactctgacttggtcagactaagaaatcaggagtttgagaccagcccaggcaacatggcgaaatcctgtctctaggaaggatacaaaaaattacccgggcgtggtggcgcgtgcctgtggtcccagctaccccggaggctggggtgggaggatcgcttcagcccgggaggcggaggttgcagtgagccgagatcgcggcactgcactccagcctgggcgacagagccggaccccgtatcaagaaagaaagagaaaagaaaaagaaccaaagaaaaagaaaagtcaccatcgcacggttaagtctgccttgctacagctaaacagtgacttcctaggaccaagaaatcgcagccagggctagaccgatgccctaaatcgggacttgcttaggctgagaaatcacattttggctagttatttggacaagaggtagaaatagcgggcaccgcgaaatcgaaacttgctaggaccaagaagccaacgacgggcgaaaccgcaggggcctgcgatagagacgccagcggcgccgccgggggactgggttcaggaggccgagcaggaacccgtgcgtcggcgctcgcggcgctgtgaagagacggcgtccgcgcagctcctctgcctctggctcggaggagcggcgggctcccccgcccagcgccggcgtcgcccgggaaccccagactctgcgcaactggctgcgattccaaatccctcagatcggctaccagagcgctgccgccaccgagaaaatggaggcaccgaggaacaagatgtgccgcgaccaagagaactcggcttggcgaaatggcggtgctgggaccctaagagtgacgccagccggaggagttcccaaggacaacatccattttggcggaaccaacggtgttgtcacgcagaaaatgtcgaccctcggaaaagagaggttctgcgaccgagaaattcggtgcaacaagtgctgtgacagaaaaccccccgctcggcgctgctggcgaaagagccaacaaaacgctgggtgctgccaccgtgacaccgactttaggaccccggcctcggatggagaaaggagggtacggagccaccacataacttcctaatgtcttcaaatagcgaaagtgctagccggaaactgccggctgggtttacctattggtgctcgtgtgggactagcagattcgagaaaccagcgggactggaacctagtacacttcggcagttgagaaatgacttaccaggacaaatactgcttctggctcgatggtgctgcccatgaacatccgccggctctgagaaacgagctgcactgtcagtgagaaaccgtgggcactgagaaacgagcggactgcaactgataactgcccacccagtgccactacgacaaagtgctgctggcactactcccaccctccgtcctcaaatcagtcccctcccgcctaagaagacctttatttttcctagcgaagtcatactgagggccccatcaaccgatcccttgcgatgcgcatgggaaaaggaggcagtatagggaccgagaatcgggcggattgggctggccctggtaacaaaagccatccgggtcgccaaccgtcttccactgcaagaaacaaaccttccagtggctgggctccgcccttctccttggtcagagccctccaggctcctaagggcgaagccgacacctcatccctttggaacttgaagttctcagtccaagacctccgtggagagtgaaagactcaatgcctcctgaccgaggcttcaggcctgccccggcagctaggtacctctccaggggatggaactctgtgggaactgctatttaattctgatggttaactctgtcagatggccttgatatatgggaataatcgttgcaggagggtaggggaaataagaatcgcaagactctagcacaggacgtgtggattgatggtgaggcctttgctccctctccccttgaaatcctcaaagggcagttcccgatttctatcacctttgaaattcatccctgatgtcttctccatctttgggaagtgcaatgcaatttcaagctcttgaatcttccctctcccacatttgtcaaatatactgacgctacaaactcctttcttacaggaaacctgaaactgccattgagcagaaggaaaacatccctttccagaacctttctcgtttttctaaaaatctgcacttttggaagtgatcccccaaagagacctccaga

SEQ ID NO: 44043 - DNA, 1278 bp, Homo sapiens
atcgagccactgcactccagcctggacgacagagcaagactccgtcccccccaaaaaaaagcctgcatgagtcctgatgatggccttggaaaagatgatgagggcacaggatctaggagctatccgagcaagtgaatctagggagaaaaataatgtgaaagaaagaaaactgagaggacaggaagccttggttgggaaatataaacaacaacaaaccaggagaattgaagagtgaatcaaactacaatggacatatcaccttttgtccactagagacactactgccacatgccctccctcccgacggtaaccttcattttcgggggggcggaagagtggggagaaagacagtttggcttcgggttcctgctggcagatccattctgtcctcggtcctcgtccccttggttttgtatccttgaaagcagggaatgacactgaagaggactagcggtgcgatcctgcattttagttgaaggaccaaatctcatctctcccagtgttgggactgatgactcctgcactacttgatgatctccggtgccttgaggggaggaccatggacttggctggtttcagcagcccagcggatttcagcgtttgacaacctggaagttctgctgccccctcacggtgggagaaaagcggtgggtcctgcacaggccgaagaaccactagagggcagcagcacacgggctccataagacttgctgcgtgtcgaccctggctcatacagtgctaagagaattgatcaatgctgtcgttctaaattcagctatgatgaggtggtgctgctttccacagactgggatgtttctagaactttctaggactttcatgtctagcatacacctgagatgactgtagaaagtccctcaatgagtcaaccgttggttttatccctaataaaatgggttcatggggtcaggagttgaggtatttactgccttccctccccctccacacacacatcctttatgcttagatttttccataccagaaatttgaatcatgtggggaaagcatccactgtaagtttagtaacagtttggcaaagcctgaaaattatgtgtaaaatagtgctttaggagttctagaaactgaataacagactcattttctggtatcttgactttcagaaggcaaatgaatcattcttaaaacagtttagtttaaaaacaaatgtcaacaagcatttgttgagtgtccgccatgaagcaaccactgtactaggctcgtggtacaaagatgacaagaccagggccaagacaagaattt

SEQ ID NO: 44044 - DNA, 2360 bp, Homo sapiens
actaggattctcaatacatatctgttgaagttatgatgacattattaccatatagctatttgagttcctccgtaatcccaattctcaagttctttgagagaaaaaaataagtaaatctcaattatagaattatcctcaaaatgtatttatatataatatttctttggaggaattaaggaagcagtcacatgcagctgactgtgggtcactggacttttttttttttttgagacgttgtctcgctctgtcgcccaggctggaatgcagtggcactacctcagctcactacaacctccacctccccgcttcaagctattctcctgcctcagcctcccgaatagctgggattacaggcgcccaccaccattcccggctaatttttgtatttttagtagagacggggtttcgccatgttgcccaggctggtttcgaactcctgacctcatgtgctccacccgcccaggcctctcaaagtgttgggattacaggcatgagccaccgcgccggcctggactctttaaaggagtggggaaggcctgcactaacgggatccggtgtaaataattctgagcagctccaggtcctgagcccagcaagcacgtgctgcggcagggcgcggggagggcgcgcttcgcggaggaagattccgggcggcccgaacgtgctcgcgcccgtagctgccgctgccggggccgcggccgcccgggtgcccaaccgaacgcacgtgcgccagcggggcccgagcagaaggggagccccggctctcacgaagaaaatggagggcgacccacgggttaggggtcaggaaaggcgtggggcgcattatgccctgggaggggaaagcacggaacaagaggctctgagggacggagaggaaggagggcgacccacgagctaggtaaggcgggccaacccaggtctcggaaggaagggggcggggcaggacggggcgggaggggccgcgcagtagctgggctgtgaggacggttggcgagttcattccgggctcgggtcgggaagtgtccgcccctggagtcaagctggggagggtgagaggttgaagggcaatgacttaggttcccagcttctggccctgccaggctctgcagtagcccaagcccaccgctgcccggtttcttctcagagagcaagccctcgcccttcgtgagcgccaaatccccgcgctcggccccgcccatccactgaggggtgtgggtaggggcgtggcccgttcccttgctggtcggcgcccggaaggcgtccgcgtcagccggagctcgacgcggtgacggtgtgcgtcgacgtaagtgacgcgcaagcctgggccgctcctccttccctcagtgagtgccggcccggtcggggcgggggagaagagggagggcgggggagggagaggcgacccgagagtcgttgtgggtcgcgggccggaccgggtcccggggcggtgggagccccggccgggcagaagggcttggcgggccgttagaggaccgccacggctgtcgagtcccctcccttgttggacttgcgcgccctggcgctcggaacctccggcgctgtgcccaccccgctctagctcgcgtctcccgactccaattaggtcaggctcggagtcccgcggccgcggctccggtctcaacgctccggggccgctcggctcgcctttcttccctcgcctttctctcctcttgcttcaccctccccccttcttttcacgttgctggttttttttgttgttgttttatgctttaggggttttgttcctcggctcgagctcatgggtgtacattatcatgctcttcttttgtagagcagcccgacggccatggaggctgaagagacgatggaatgccttcaggagttccctgaacatcataaaatgatcctcgaccgattgaatgaacagcgagagcaggaccggtttactgacatcaccctaattgtcgacggtgggtagggcagtgggcagaggagcgaatttttggcttcagtttttttctgtccttcggacacccgcctttttttttttttttttttttttaacccatcctctatggtctccctaccaaagtctgcagagtgtgtgcactgggaccagattgcacttgtcagtgtccactcacacagcgtgctgcagaaggctggttggtcagtcatgccttccacgtagtctggtgttcatctcattttaacttcttacatcctgttgagtgcaagatgatgtcgttggggacagattgtctcaaaatgtttggttgatagcctcttgttggtaagctttgagaagtcccttacaggagtcatttgggaagtgttgattttttttctagtttcccaaatggtcttgaagggagaat

SEQ ID NO: 44045 - DNA, 3394 bp, Homo sapiens
ctactgcagcaggtggcaagagcatcctcgggaaggtggggagctgcagcagaggtgagcagtgaaagcagctactgatgccttaaggctaaggccatagggacaagcatgacaaacaggcacaacctcacattatttgttccccaaatccctcctccagagtggatcagaataatcgtttctctaccactggtcaaggccagacgtgggttttcaaagactccatatacttgctttgaaatatccttagcttaatccaaaacctatttgtgggaggactctgtgagtgcctgcccattacactgtatcacctaaagctggtcccgaaggtattagtaggagagagatgtgggatttcagaacaccaaggaagcctattttttaaaacgtagacaaaaaaaaatatggaggcaggaaggcgggaggcagtgatctatgagatttgaagcaagtacagactgagccccagtacttagccaggtctaaatcacggttgtgaacgctttcttgcacctgagctgaggaagaaaagtaatgctacccacttcccttctttccatcaactctatatgtggcagcaggacacaccccctgcgaacctaccagcctccgtctaaagaggatcttgcccatcctttggcgtccacccttaaccaacgctctggaaacgccttggtagcccaactgtcttctctccccctcctgacaccccccactcacctctaggcggtcacagctgcctctctggcacctccaactcctctgtcgttagaatacctagacctcaacgccctctcgcgttctcccctccgcgactcgcctgtgttctcggatcttctcagatccgctacggtcggcctcaggtccctcacgagggaacccccgcccggccccgctcacggtgccccatcctcccgggcaaagtccacgcctacgtcctgacccagagccccagctccttcgggcctagtcaaggacaccgcctctgtctggcccacaccccgcccgcggcacctccgcagcccagttctactccccagcgcgggacactcaccaagcgtgaccgagcggcagcagaggaaagggagtgagccacgaaaggacagtccgcggcgcctccccttcgccaccagctttatagccgccaacccacccgactccggcaccgccgagagtcgctgggaggcgggacggtggctcccacagccaatcgcggccggtagagttgcccggcagcgcccgccccccagtccggcttctaccaatcaaaaggaaactagaggcgatgactcgctaggattttccctcgtggctggaagggcggggagaagaggcggggacaaagtctcagggccgaggaagtggtgtgagagactgacgtgaggtggcacgagagcccagttgccaatgacggagctgcgagatacggcgagagccaacgggagcggagtgagaggttctccgaccaattgggactaagtgagaggagatgcgggccaatgggtactccgcgtcccaccgctggagagatggtcaaatgtgggaggcgaggtggtcccagcttgggagtctgtcaggttgcctagcaaccagaactaggcttcacctgaaagatttctgaaatactgtacttgatttgaattcagtcttaacgttttctagcaaagtgtgcgtagattgcaaattggagcagaatacttcacccagaacttgtatatgtgtaaatagtctaaatacccgatttgtaaatactcaaatattgtctcctttattcaaaactaccttgacttaaagaaaacagaacaaacaaaagtgctcttgagacaaagctttctaactaaacctaaaacaaaatggtttcaggattaggcatccgtggggagggtgcagagccttgcctgtgaagggaagttgatactgaattcaaggatttttgccaggccatgcactctgaggaaagggactccatttggcctgttgcccactgtatcttctaagcttcatatgtggtacctgccaagtaaaaggctgtggaaaggccacgtaattgtcggcatagtaaatccatcggatacggactgcctaactcccccagcaaatagagaggagcaattcaagctagaggaattcactgaaacactatttgggggaatccaaaggaggacacttgtggctttgcaataaactctgcctctatctggtcagagagagaagccataatacttagctttggtgggggaccatgagtgaggttcggagttgtttgtatctctccccatctcaatttaattaacaggaatgctattgataaggggtcattggtaattctgtgattcacacaattattgttatgggagattcttttaaccactatagatgctaacctagtaagacacattctcagcagcaaagtggcaaaatatattggaaatggaaccactgtgaagtggtggcataaatgacttgggggaagaggaccactcagtaatgatttccattccacagtattgcccatgactcacttcatatgtatgtaaagtaactagatagtaaacagagagagagacattgcctgattatgatcaacagcaatttggggtggggtaggagattaaaattcttggcatattggaatatgctgaaaggcagtaaggacaaacacaagaaagaagatacagttttgtcgttaggaatcgcaaataattccaactccaggagtacataatgggaaatgattagccagacggtcatgagaatgaccatcttacacaaccggaaatttctacaaggaacagaccgtctttttgatcacgttaatcttcaattaagcaaagtgagcatgattattgattactgggaagccaagcaatggagaacaaaaagggttagtaattagatacagaagatcttgttataaataaagtttccatgctgcaaaagaaatagcagtcgaatataaaattttctttttaattctcagcaaggcaaggtacttctatagaagggtgcacccttacagatggagcaatggtgagtgcacacttggacgagggagggaaaggggttcttattcctgacgcacgtggtccccactgctgtgtcgttcccttattggctagggttagactgcacaggctaaactaattccgatggactaatttaaagacagtgatggcgggaaaaatggttatgaaatgagtcagggtgaagaatgaattggaatgagtcaaggtggagtacgtaatcagaatgagtcaaggtggagaatgagtcaggttggagtaggtaatcagaaaaggttgctttactaggaagctacgtttaaaagtagaaggcaaagaatggaacatactgacatattaattctttgaagagaaatttagaattcatattt

SEQ ID NO: 44046 - DNA, 935 bp, Homo sapiens
caaagcattcaactcatgggttaaagaggaaaccacaaaatcttattctggaaaatcgtaaaagtactatttattataatgggtggggtacagttaaatttagccctaaatgcatttatttaaaacacatacacgaaaaaaacgtgtgttcaactaaaaacccggaaaaggaaaatcagaggaaacaaagcacgagaaaaaaagaaagaaagaaagaaagaacgaaaaaagaaaagcacgacgttatggcgctttgaggctgtcgcgctactggtatctgtagtcgtggctgccgtggaccaggagagactgaagtggaaaacagcgggcggtagccgaagcagagagcaaggaagagcgcgggaagtgcagagcgacagcaacaagaaaggggtggcgcgggacgtcgtttacctgggcgacgtccagccgcccttcccgcctctgcgcgtacgcaacctgcttggcgccactgacctggtgaggaggcttctttaaggccgtggacggttcctacccgcgcgcggagaggaccgacgtgaagaagctgccaaagtataacaagtactacgcgaagggtaggtagggtggagtcccaggcagcgcgtgacggccggatgcccagacgcgcacgtcgcccgcaggcgcacgcctggacccgggggagccggctggggcgcccaggaccaggcctagcctaccgcgggctgcccttcacagagctgcaggagaaaacgttgtattgtgcacgcattccctaacccttactagtttttttttttttaattgatcggccagcttttgatgcgggtatgttaaaatctcccactgttattgggattatgccagtttttttttttcttgcatttctgtctacttatgtgatacaacacttggggttatgttttcagacgcccaagtaccctcctggtcca

SEQ ID NO: 44047 - DNA, 1338 bp, Homo sapiens
aggtgggaggattgcttgagtccaggaggttgaggctgcagtgagcagaaattgcgacattacacccagcttgggtgacagagtgagactctgccttgaaaaaaataaaataaattcttagaagtgaaaattgtcaaagggtacgcccatttaaatcactttttcatatatagtgccaaattatctcacagtatggaaaatatctctgtacacgcctctctcctccaatagtgtgggctcagtgaaggcaggatctccagtgcctcgctcagtgcttggcaaatggtagatgactagtgttcactgaatgaataatgagttggataacttaaatgagaaggccttcattacataagcaaaaccttgccagtgtggtcacagaagtctacaattggtactcttggccttttctgaatatctatagcctaattggcaataatattttaaattttcatttctcagaagagattgttttatataccacagtgaaaataataaattactctgggaggataattagttgtaaaaatatatcaccagaagatttatagttttgaaacaaggaccaagggcagtgagagagagagagagagaatttcagaaatctgtatttagaaacaagatggaacattttccagctgagatagcttttaggacagccaggtttgattcctttcagtgctgtggtttcatagctttcactctgtaattaaatgtgtgatgaggtatgccaaagtaaacagagaggaaagaatgcaggactagtcattaggaacaaagtttgaacctggggccaacggagggaatttcccttgcactgactttcttattcctggttaacgctatagtttcctttctggcttaaatttataactttttcttttttttttagctttatgctttccagatatatgaatacaaattcattcccatatcaccatcatcagctttattatatgctaaagcatagaagttaggtgacttgcctaaggtcagtcaataatttgggaaccatagagcagaatggcacctcgtgctaataggaataaaaacaccctcagggagatcagaaaaaggagagcagtgagggatgattaatgtttctagatgttaaaatatattataaatttactgtaattaagttagtgtatcactgatgcataaatccagaagacaaaaggctcgtgccaatttaatatattgcaaagttagtattttacatcatggaaaaccatggattattcaatgaatggttttgaaacaactggttaactgtgtagaaaaaagataaagttaaacctttaaattccacgtatattaaatatataaagtgaagaa

SEQ ID NO: 44048 - DNA, 3988 bp, Homo sapiens
aaccaccacaacatatggaatacttacatagagcttattttgtagtgggcactgtttcaaacattttgcatgtattaagtcacttaatgatcagaacaatcctatgaagtaggtattcttattaccttcattccagggatgagtttaacttgcccaaggtcaaagagcttataagtgctgaagctagcactagaacccaggcagtctatgtccagagttctgtgttcctcattatattatgtatacatttttcaaatacaatgtttaaaaaaaaaaaacttgctttccagcctgggcaacaaagtgagacccggctctacaaaaaaatcaaaaaaattagcagggtgtggtgacacacacctgtggtcccagctacatgggaggctgaggtgggaagatcacttgatcccaggaggttgaggctgcagtgagccttgtttgggccactacactccaacctgggtgacagagacacactctgtctcaaaaaaaaattttttttaagtttttcagttactaaagttctataacaaatatgtcaaacttgtggcttaaacaaccacagcatttattttgctcatgaatctgttctttaaacagggtaaggcttggcagggatgactcatgtctgccccagtcagcaccagttggagggtttggaggctgggagctggaatcatctggaggactcacctcattcccatatctggcagttgatgctggctgtcgaccaggaaccttaattcctgtccacatgggcccctccatgtggctagcttgactacctcacagcacggtgactgggttccaaagttaagtatcccatgagtgagagagagagccagatggaagctatgttgccttttaggttctgtcttggaaattaagttcacttctgttgcatttgattagtcagagcagtcacaaaatcctatccaagtttaaggagagggaaaatagacttcacctcttgacgtagagtgtcaaggttctgtaagagcatgagggcctgaaatattgctgtcaaccttccacaaaaaggttgattaatttattcccctctctcacagctagcctgtaaccaaaccattccaataatttatctatccttttctttaaaagcatcaagaaaaagatgccacaaccttaagtaataaaacatcaaagtattgtccatttttctttttcttgttttagtattcctaaagcacttttccccttctgcttcctttagggcagtggtccccaacctttttggcaccaaggaccgatttcatagaagacaattttttccatggacgggatggttccaggatgaaactattccacctcagatcatcaggcattagattctcataaggagggtgcagcctagatccctagcatgtgcagttcacaatagagttcaagctcctatgagaacctaatgctgccgctgatctgacgggaggcagagctcaggctataatacttacttgtctgccactcacctcttgctgtgcaaccaggttcctaacaggccatggaatggtactggtccatggccttagagttggggacccctgctttagagtgaagaacaagtgaaattttaagcttaggtattggtcactgactttgatgattgttttccttctttgggctgacactataaggctcttcagggaagaattctgagttagaaatgtctaggacacctcagctcatcttcttaaaaaaaaaaaaagggaggaaggatgaaatagatacagccattcagtcattcattcatttaacaaaaatgtgttgagtccccaccttgtgctgagcacagccctagggaatgtatccattctagagatggagacaacgtctgtatcctagagatggagacaatgtgtctgctctcaaggtgattttctttcatggggaaagtcaaacacaaccactcttacaggtcttcagctgggtcttcgtcttgtctaggattgactagacaagccttgtaattagaacacgtgtggacatgcaccacttattatcagttagtgtagtaggctcagtcaaggcaaacaccatcttagtatagtagccccaggatattattagttaatacaaaaccagttcaaagatacgttagtgaaagggaccaattagtccctctcagcagtccagttgactgctggagttctcaaaactaatgtaagcattcaatattaattattaaaattaacaatgcagttcccaaactatgtgctgaggcaacctagaatgctgaaacaaactcagtggtgctgtaagatattttaaaattttcagagaaacagagacatctgttggacatggcacaactaataccattaggttgttcaaatctaactaaataacagaaactggccaggcgtgctgactcacatctgtaatcccagcactgtggcaggctgagacgggcggatcacctgaggtcaggagtttgagaccagcctgaccaacatggtgaaaccccgtctctactaaaaatacaaaaattagccaagcatagtggcagtcacctgtaatcccagctactcgggaggctgaggcaggagaatggcttgaatctgggaggtggaagttgcagtgagccgagattgcgccattgcattccagcctgggtgacagagcgagactctgtctcaaaaaacaaacaaaaacagaaactgttatttctttcggactagtggtgcagttaaaaaaaattactgagacattaagggcatcaactgtgagccaagaaagtgtgggaacctctagtatgcctcatccatcaattttcctgatatttccttgttttttttctaagtgaacatgtactgtttgagtcattctttctttgggagaacatcttcacctgcctgggcctcctgcagggcctgctgcctgggccatcagagggcctctccatgtggacatcatttccaatctctccccactgctactacctccctgcagcctcctccccatagctgacctggcttcagtgttccttcaccccaggctctggcatccctctgtggaaataatcaagtgttaatccttatcagtgtcatctggggatatgcagaatttgcatcctggtcccttcctctctgccaagttattgttactcagcaaaaggtaagggtgagggaaacactgtgaagttcttcccttctgggctatggttggttcagcatccccaaattaattttcttttgaactcccagtgaggtgagaaagtcctatccctttcactaacgtatcttcgaactgatttcttattaactaatatcctagggctactatactaagatggcgtttgccttgactgagcatactacactaactgataataagtggtgcatgtccacacatgttctaattacaaggcttctttcctggcctttgtggtggtggtgtggggcgggggcaggggtggggggatgaagtagctgaataagaaaaggacaggaaaagcatttagctcttgccaccacattaatgtgataaccacacaacagaaggatgcagaagaatgtactcaagtgggagccgtagctccgtcttggagtcagattgagaaggtctaagatattctacagaacaggacacacttgaggaactctctcttaagtaacggctacccagatatttaagtggtggaggaagagcttctcggagaacagcatgtgcatagggagccagaccatgttcagttctaggcactgcaaacagtccagcgctctgcgcagaagctggacttgatccaaaaaggctacaatccagggggcagggaatgtgtctggtttgcttaaggtaggggtgacttttgtttacatattatttttagtgggttttttgttgttgttgttgctgttttggtttttttgtttgtttgtttttttgagacaatctctctctgtcgcccaggctggagtgcagtggcccagtctcggctcactgcaacctctgcctcccaggttcaagtgat

SEQ ID NO: 44049 - DNA, 739 bp, Homo sapiens
tgttttaaagcactaagtttgtggtcatttattacagcagcaaaagaaaagtaatactggatacacagacagaaactcataccctataacccctaagcagtccaagtaggcagaattccccacttccttacttcctttccacccttttgtagttttcaaagataccttgaagttgattttcatctgatctcacctggattggtatgtggagaaggaagcagagggcttgcagagtggtttgtcttagatgtcacaccctgggaatgggagagccctttccaggattggcctggggcccaagccaacttctctggaggccagattgcacaagagcaacctatgccaatcattttagaatctagagaaacatcagagtctctgctggccagggaaccaggcctaccactgagagactattgtcagacattgagcaatcagctgtggacctccaggaagagggaactgtggtatttacacatgactttccaagagaaacagggcctctgcagcatacaatgtgttcctaatagtactctcaggaatactttactactgtcattaagatatgttatatgtgcctgttatgtaaccactgtctcacattttagactttatttagtatcacccagatatttaggggaaattttctctctgccttccactttatgtgcatgctgtcaatatcactgacctggaaacttgggcagtgctcaatataagaccaattaataccaaatga

SEQ ID NO: 44050 - DNA, 2952 bp, Homo sapiens
acccatttttcttcttaaactttttatttccttttccacttcctattcctccccctacaaataaaacggactcccgaacctccttttacatattcacttttgttgataaggttccttaagagtagtgatctcttttaaacttgtcatgtttaaaaatccagtgtgctcaaggtatttaataaatattccattttactaatacaagagataatcacataataaatccgcagcctatgaactaaagatactgtttgggatagcttctctgacataactgacatattataaattcctccctatgactcgcagaagccattttctgcaatggccaaactttgtcacaccccatcccccttatagcaaataccactaactttggggccttcagagtatacataacagtacttttctccttcctgaattccacaaacatataattagctggtcactttaattatacgctatcatgtattgtttgctaataatctcttagacattatttctgtcaaaacaaataagagctgatacattctctaagtaagtgtcatctgttttaactttccctcttccccaccaaccttacacattatatgcaaaaacccaaggtcaaaacacggtccaaattccagaaaccgcctttattatgctttaccagtaagtcttcttcactgaactgtagttgctgtaaacttaatatatttaatttctttaatggaaaaatatcaaaagcagatgccaaatctgatgcaactaactgacaaaggaaacacaaatcttgcttactttcactgaaactttttatagccatcagatgtctgcacttaaaatgtttagttcctatgcccattacgaataaaacaaaattctgtatttcaacatgtttcaagcctcagaagttcccagacatccttttctgagtctggtgtgatgcaataatttttcaaatgtcatttaaaaaaatgggccaggctgcagggaaaggaccatgtcacactctcagcattcaagcctcaaaggctccggggcacgaaaggctcttacaaccggttaaggacggcaatgggctccttcggcacgactcccggaaccccaccctgggccagaaaaaggccaggggcgcggagcgtaggcggagggctggggttctagggatctagaaaaagcgcgaagccggagggcggcgccagggctcctcgcagaccccagggccgcgggacggtgccggctcgtgggtcacacgcacccaggaggctcctggctcccgcgtggcggctgttccagcacgccctccgacccgcaaccggaccctccagacatcagactcagtggtcccccacctccggtctcccacctcaggacgcagttccgcggcgtccacccggccccctcccctcagtcccacgcagcggctcagccatacccaccccggcttctctgagttcaatccagcagcagctcgagcagcggctccgcccctcggtcggagccatagagacgtcggctgccggccagagtggcctcagaccgcagcgtcggccgagaggacgccgggatactggccagctccaagtcgaaaggaagcgacgcatgagttgtttggtgcggtgggtagatacctcgagtttctcctcgcccaccgtaggccccgacccctaaaaaggaaacttttgggacgtcagagtgagaggagaaaagtgtctttttagtttagttttgtcaaacctgaggattcgtttttcagtttagccggagctgtgccgcaaacgtagctgccgacatccccacgacgcacccaagtggtggcccggaagctggggatagaaaagtggcctccccgaatgccaggcacacaggccttactaccagaagcttgagctgggagcctcggccgtcgcatctctaaggtgcagcgatacggccaacttccttccgcgaagccctcagggtgggcaacggagcttttcaccagactgagggaccgggcgacctggccgaccggcggctcctcaccgcccccttggggatttcttgataattctttgccacgatgcgggcggatgttgtggagctactgtttgtagatcgcagtagcgtgacagcacttaatcatgactactaaatcctcagaagtcgaaaaagcaagtccatacagaatagtttgaccctaattaaattgcgcttacaagatacagtttgtttactgggactttggctaggtcccatcccgtctctgcctcagagtggtggttgctcttagcaccaaggaaataccagcttgacatttgactctaggaagcacaggcccaaaagaagaggcccaaggagggacattcttctttccctttcctacctacagtttctcaaaccaagtgtcagatggaaagcaaggggtggtatcatcgtaattatacagttgaccatagaaaataaatttcaatctcaaagtaaactcctaggccacccccagaatcttagagtttctcaatcatagaactcatttcttgtcacagtcttggttcttagccaatgtaaaacacccaactgacagggaaaattaaacaccttttaactcccacacaccttaaatgagaatttaaagtatctttcagcaaatgtatttataattttgagtgcttttagccatgttaaggacaaattttctccttctgaatgcagtaataatttggcattacccttttggcagtgtggtacaaagtcttataatctaggctttatggagctattgaggaacaacatagatggcttcatgcaaacccaaacaatgtaatagtagttcttttctctgtagtcggtctactgcctgtagatgtttattccttttttttttttttttttttttgagacagggtctccctctgtcacccaggctggagtgcagtggtgcaatcatagctcactgcagccttgacctcctgggctcaagggattctc

SEQ ID NO: 44051 - DNA, 1279 bp, Homo sapiens
cgaaaagttgcggaaatgaggcccagcaacggtccctggctttgatttgccaaaatgctctggaagccgcagcgtcggcgcctgcccacgactgcttcttcaggggtttcttcagtttgacaaattaccagcgagtgatatttcttggtgaaagaaaaaaatcacaaccctagaggaataaggtggcagggagagtgttttggccaagatgcccgccacgaaacaggaaagcggagacagcgccaactgtaaccactaagagaaagcgcaaaccgcacaagaccagttcaaaaccagcgccctcagggagccgcttcagagctccgcaacagggaagacaggaagtcccgcccctccacaacaggaagggccggaagtcccgcccctccactccggaggctgccctcgctgcgttccctacgaagggcggagcaggaattggtgtaggaaggggacgggtgtttccttgttcggaatggggttggctcctctttgattttttacttctggtgacccacgcaaaagcagtcccgacctggttgtattaataataaaggctgtaaggatcagccttttgaacggtccagccgagaactaaccacagagcgcgttttagtggagtggtacttatttttaaataaggtaaaaaacgattatacttcagtaaagctgtttagaaaaaaaaaaacttggccaaagatggagaactcttcctaatttggtatcagaaaataggtcgtctatgtatctgcaccttttttccttataaagtggcaaataaatgtgtctgctatatttattgccactaaacaagtgtttatggaacactcactgtgtgtttaggcatagtggggataaagcagggaaggtggcccagttctttgcgggtgaggatcagagctagagattaactggaaagaaagaataaacaatcatttattacagttgtgagtgtttctaagataaaatacagaggtttgtgagagcatagagaggcataccttgttttattgtgcattttattgtgctttgcagatactgagtttactacaaatggaaggtttgaggcaaccttgatggagcaagtgtatgggtgccatgtttttccaacatcatgtgctcactttgtgtctctgacatattttggtaattcccacaatatttcaaactttttcattatttttgtatctgttagagtgatctgtgtgatcactgatctttgatgtcactactgtaattgttttgggggaccacagatcatgctcatacattataaaat

SEQ ID NO: 44052 - DNA, 2057 bp, Homo sapiens
cccagagttgtaggaaaaagggtgtacttactgtgtaactggaagaataacctgaagggtaaaattcaggggcattcacagacagcttagacattaatacaggagctacaaccacctggggcttagccattgctgactccgagttctgctgtgggattttatcctgtgaactaggtggagctctcaggggcctcgtttgctctgcaaaagaaaaaaaaacggggcgtcagatgcattctttcctttgtacagcaacttgctatatactgaaaaaccatctgaaaagcgtctgtttttaagagttaaacaggaaccatcatgaaatttatggttatcgccggaatgtgtacagacagcctacaaaaaggaacaatagacttgctgtgactccgttatgggcatacctgcctctcaaatgagtgcttgcgagcttttttcctctctgtcgttttaaaggggtcggtggaaaagaggtggttactcgctagggtctcgctttagagggctgctgaggggaggcgatttttacttcctcccgggaccccgaactccgagaccgcgcacccggcccctccccccagccaggcgcacaaaggattccagcagacaccttccaaacccggttccgggcccgtccctacccggtcacgcggccctctcggggaatgctttcggggaaccgggggtggggaccgcagacagcgcgtcgggcctcggcacgcgtggagggccgtggggaagcgttcgccaaggaggactggggcccttagagctgctccgtacctgggagcgccccgggccgggaaggccgctgggggctggcggggacctcgcactgggcccctggcggcggggtcgtcctgggctggcgcagcggcggtggctgcaggaagcccggggctttgggttgcggcggctggtgccgcgcccgctcagcaggccccgctccgttcgggaaaccgccgccctcaggcccgccccctccgcggcccaggccccggctccggccccgaccagcacctggggcccgatcgaaaccgtccgacatgctcctcctcctccgcctcctcctccaggggccgctgccgctgcgctcgcgataggacgcggggggaaggcgccgcgggtcggctatagccgccgcgcctcactcgggcctcatggaggaggagggcggcgggccccggctcggctgctcggtgcttctggcggagcggacggcagcccgagcacccgccgctccagagcgcccgccccgctcggctaccctcggctttccagttctcccccaaaacccggctccccgccttcggcgcggcaggggcgcaggcgggtcacagcggccccctgcggcccggaggcccgggacgcgcccgcgaggatcctccagttcgcggctggccggccgccgggcccagcaggccgcccgccgagtggcgtcttggccacctgccggcccgcagccaggctcgggcaggggcatctcggttccggggccaggctgggggggatgagggatgaggggtgagggggacgcttaccacaggcaggcccgacctactcggtagttctcaggagagacgtgcgagaccgacagttgacgcccgggaaataaaaacacggggggagggggcgtggaccctgcgccagggttcgctggcgcacaggtgtgttcaatgactcggctccggccgagacccgcggactgctgaggagtggtccctgggagactgtcacctgctccgttagcatcgggggaagggagtagaaacggaatcaaaatatgtgtcccctctttaattcaccctaggtgtttaccacagtaggtcacacctacgtttaacaagcttcgttctcttcccgttaaccttcccctccagaaatttcaagaaaatgtgctacctttcagtgtaactctgccctctttttcatcttgcatcagtgctgtccaatgaaaatataatgcgagccacaaatgcaagccacttatgtaattttacattttggagaagccacattaaatgagtgaaaagaaacaggtgtggccaggcgcagtg

SEQ ID NO: 44053 - DNA, 1111 bp, Homo sapiens
aaaggggaatctcatatggtttttattttgggggcccacaacaaagtttatatgctgttctggtcagaactacaattctgacaagtccgcaaggctggctggaaaaatgggcttataaaggctttaggcctatgttctacctcatgcttggtacccttctttatgacataacaacacggaaagacaaagaaagaaaaagttgatttctgggacaaaaaggatcaaataatatgaatacttaaaccaaaaattacaccagagtcacaacacccaagactactcacacaaatccttgtctcccattaatcaagattttgcagagaaaagagacaaacagggattttaactgtcaacttgatcagattccacagaaagagaggccagaagcttggccggtaagaaattcttgttcttctggcagctagtcaggtcctgggttcccttcactctggcttaagagcagaatagttttggtatactgctcacagcaccaaaactataggagccaagcaaaaacttcccctttgccctctgaaggtccactgaaaaatcaactgataaaaggcagcttaataggagaaatggcacagaaatttattaacatacccacaaaggagaaccacagagtaattattcctcatgtcatttcttcttttaatctgctttttttgtcagttgacttttcaacaaaacttcagagggcaaaggggaagtttttccttgggctctatgataggaattgattcattcgcttgttcattcaacaaatattgatttgtgtctacttcatgccagacactgttccaggtgctgaggataagcaggggtgtgagattggtaggttggaggcatatgagacatgaagcagaaaacaagttcagtggctattgtagaaattctggtgagaaatgatggtagctactaagctagtagtagtggggttggacagaagggccacatttaagagatttttaggaagaagttgacagatgttgagagattgtatgtgagtcattagtgagaggccagagatcaggatgactttcaggattctggctttggtgcctcagcctataagattcggaataccagaagggagcagattcaggaa

SEQ ID NO: 44054 - DNA, 3201 bp, Homo sapiens
atcctattttcattggggactccgtttatgaataatatgctgtaattatacgtagaagcttaaggactgaaacagagcattccaaatgacaaatgttttctcctgaagaaatggcacccaaattatgttgtacaagtaagcggaataaaataatcatatgcttgttattaaaattatcatatgcctaacattcatgattttcaaaagtgaaaaacagtatgttatctttgagtttgttttcatgtgatataaatttataagcaagtcaaaattaaataatgtactgagcattaatttaagccaggatttttcagcctcagcactattgacatttggggctggataatgcttcgtcgtgaggggctgtgtagtgtgaggtgttcagtaatatccctggccccaacccattagataggtcccctctccaattgtgacaaccaaaatgtctctagacattgccaaatatccctcggaactaaattgtccccagttgggaaccacgaattattaatccctaaaagacaaagcagcaactcctgacccctacaaaaagttttaaatcaataacttagtttaaaatccttactaagtgggatcattactaatctcacttcattgtaccttcagtatctggaaaccgtccctatggtcacacttaccacggctcattattattttaaaacatggggctgtgtcatttcctgtctgtgagtttggactgcagtgggaatccattagttgaatgaccttctgtgtaggttaatcacaagacaagttctcaaactaagggtttccctgcggctcatttctttttaaagttatggaatacctgttctgcttataccttttagattcataattatttttcttgtatcaaaatttcaattaatagaaataaatgacgttactgacacttcatgatgattaagttttgggcaagtgaaccattttacactctattttttattcctcccacttttagtcagaatacacctgcagaataagtaacagaactgtgtgaaaagaacgactaggtcattacggttaatagttttagaaaaacagccgaggcctggtctggaaagctcacaacctccacccagatgctttccagcctcggggatattcgtactagcagtgacactagccagcttcctctaggctggctctgatgttggaagacaagcacgcagatgtgtgttacttttcaagcctggacatcgtttctgaggaatttaactccacctctcctgccagaatggaaaatcaacgccccccattcccgcccttcaccaacccctctccgcctgcccctttcccttgggtcctctctgttacagaagttctgatttttcctagcgagctggaggaaaggcaggtacccggagtggagttatattacctgtttctttgttctgatgggaccccagagaggacatcacgctttgtaactggttcttcaaggggagaagcaaatgtgtccctgaaaacttcagctgccgcgtttggcaccaggtttgattgacaaggactggcggagggaaagcgcggaggctgggctgggggccgcaggccgaggcagagacaaagaggtttcgcctgtccccgagagtggaagggcccctgggggtaactagcctttgagctcaaaggggcatttcgtgaggtcgccttttggttcggagagcgcgcggcgatcgggtggagggggcctggcgggaagaaagctggggcggggaaggggcgcgggccgaggtgggagcggagctgcagtcacgtggccgcccgccgccgcggagttggggctgttcttccgggttggaggcgcagcgccgcggggcccaagcccgggtctgccagcgcgacgtcctctcgcggccctcagggcacagcccaaggctgtcagcctcccggcccaggtgagcgcgacggcactggcgggtgcgggcagccggggcgcgcgcctagggcgcagctgggaaaggggctcgggcctttcctgaagaccacggccctcgccgggagagagacctgtcaaagagcaaagcggggcggggtcggcggtgtcccgggcgcagggtgcattggggtgtccgcaggccgcaggcttaggtggggaagaagcaccgtgcctcttggtgtccctttctcgtctcctgctggggcgatgtcgaagggagtgggctggtggatttgggaactgggtccccgaagagggcagggaatgaggcggcagctgtgcaggtgcagatatttgcagctttgggggacagcgagagtcgtacggggtcatttcggccctcaagatcgggggtggtggagagggaggtcatagaggactttcgatgggcggttcatccagagaggtggcagctggatgcccttgaggtatgcttgacccttgagggagttcggagagggtgtccggctggggacataggagattgcgagcacaaattgtgagtgtgagttggggcggtctggcggtggtgggtacaagtttctggggcctaggctggtgaggaggaagagacagcggagagggcgacctgggcagagctagttcaaactcaacagccggaatgactatttgcagccgtggccaatcggcttcctagggaggttataaatagcggtctcgtgcagatgccagcgggtggcagttagttgccgagcaagggacggcaccggtggcagtagccgtgacaccagtggctttgggtgaggtcacggcgcctgccagccgaagctggctcagtagggtattgtgtccttgctggtatgtctcgcttttaaaagcgtgacttgtttatggttgccggtgtcctttattcaccctgtggcgccggccagtccttaggtggtctgtttgtcaggagtcttgtaggacagacttattcggagaagcgcgtggggcttaggtgcctacctactcttcttatttaaagtgtgccccttttcttcattgcaccccttttatttgtaaaccttgactttttattaacagacagtttaggattgccttctttccagcaggtgcgcttaggctgcttaccttggtgatagaatcagttttccacaaggctacacaaacatttccttttcaaaggaaattttccgaaaatccttggaaaatgtgctcaataggtacttaggcttaaggtcacctagccctattcattcagtcaaaaatactgactt

SEQ ID NO: 44055 - DNA, 894 bp, Homo sapiens
catctaataaatagtcatctggaattttaaagtgacataaatctatacttagttttagtttatgatgttcttaatgtctcatcactccaattattcatgcttgccaaaattagcaaggactgaatcttgcttgaaggattgaacacacaacaaaacttcctgtctgtttattctaatatctgttaattttaccagggtaataagttttggggactgcaggtttgctgtagagcttccatatattttttcacctctctgcagttaattgtcaaaccagtctcagtattttgtatttcccaggtgtgtgtgccctttactcagagcagtccacaggtcattaggcaggggatagatggtatacctctgtgtgtgccttatattgcttaagaatttagtcagaaattattgatggaagatttatttctggagtattatttcagtcatggcatattatctaagttttcctgtttgcttaaaaatatgattaaagtatttatatttataatctgtgacttgattttttccccaggtgcgagcccctatggttaatccaacattaggtgttcatgaagctgaccttttaaagacatcaggaacgctgattagttttatttacccagcccaaaatccagagttgctaaataaactttcccaaagaaaaactacagttctggcaatggaccaggttccaagagtcacaattgctcagggatatgatgcgctaagctccatggccaacattgcggggtaggttcttttccatttcaattgaacaaaagcgcaatagtgctacagaaaccttcacactgtagctcttctgtcttacagtgattttatttgtaattattgttggagattacagccttttgagagtgcatttaaattatttttgac

SEQ ID NO: 44056 - DNA, 394 bp, Homo sapiens
gtctggactagaggaagtttcatctgatgtcaaaacccatattgataactgagggctatgtcttcgacctttaaggtcaagatggtaataagcttcatttgcccaatagcactaatacattctatgttgattgcctggagtactatgttgagaaggattctaaggcccattctgcttggaggaatgtggctatgattgagtaatcatgcctgccatgggtgagggacaggaatagctacatgaaagcagtgtactgctgactttgccttaaagggtgggaacaatctggaaatgggataaggcttatgaatcaacttctctaagaaactaattaaattagattttaatcatgaaaactattagtagttgagaatttgctaatattaatgaggca

SEQ ID NO: 44057 - DNA, 1772 bp, Homo sapiens
atatgttaacctcactgatgactttttggtgtgtataaatatttcacgaaacctcaaagcttaacgtttaagattgctagaaaaaaatgaactttgactttctgaaagttctagtcttttctgttttttgactttactaatttgaatttttaaaagaattttggataacttgttctctgtagcctatatattattaatttttaaaaaaaactttcaagataccattcagcagattctgggtttctcaatttttgcaacattttggcacatatacaaggtatttttggtttcttcacttcttgtcaatttttggatcaagaagacaggaaatgggaggtggtgtaatcagagtatttggcagagagaaatggtgccagtttctttaatccacactgaaagcagagaggagcagttaacgatgagaggtgacgatggcttgctgaaagaataggaggtcatattgtgatccttcaatcctatgtacactcagtaacaatggaaaccctgaggctaggtgtcttagtccattttgtgttactaaaagagaatacctgagactgggtaatttattttaaaaaagaggtttatttggctcataattctggtagctggaattcaagatttggcagctgcatctggtgagggcctaaaggctgcttcaactcatggtggacagtgtaaagggagcaggcgtgtgcaaaaaagatcacatggtgagagaggaatcaagagagagaaactgagggagccaggctcttctattaacccccagagtgagaactcagccccccactcccagggagggcattaatctgttcatgggagatccactcccatgacccaaacacctcccactaggccccacctcccaatattgccacatttgggatcaaatgtcaacatgagttttcgtgggaacaaagcacatccaaaccacagcactaggtacaggaaacctgactttaaatgtgatcatttacctacctgtaggttacaggttaactggtgcttcctgctctttttttttgagacggagtctcactctgtcacccagactggagtgcagtggcatgatctcggctcactgcaagctccacctcccgggttcatgccattctcctgcctcagcctcctgagtagctgggactatgggcgccggccaccatgcccggttaatttttttgtatttttagtagagacggggtttcaccatgttggcgaggatggtctcgaactcttgaccttgtgatccgcccgccttggcctcccgaagtgctgggattacaggcttgagccaccatgcccggctgcttcctgctcttaagtactttgttatataaagcccagagttctcacacaaaataaatctcctggaaaaaaattaaaacaaaagcaaatagtagctttgagaaattatattgttttgaaaaacaggccaggtgaaaaaaatggcaggctgtttaagtgtaggccagaatacttagcaagaaagtgtgagcaaacaacacagacgtgagatgtaaaatgattaaattttgacttctttctcaggatcatacaaaaatgtctggcatgcatagtggccagaagttcgatgctgttcttaaattgactgaatgctttgatgcacaagtctactactaattttggttataatctttctagatatatgtggaagttgagagaaaagctgtgaataaaagatattaaaaagtgaaacaaaagaggcttaaagaaaagagaatcagcctttaaaaggtggaaaagtgact

SEQ ID NO: 44058 - DNA, 750 bp, Homo sapiens
gtttatttgaaaatcacagttttgcctttttttctggccaactgatccagaatttttttgagagagtgtgtgtgtgtgtgtgtgtgtgtgtgtgtgtgtgtgtgtgtgttttgagatggagtctcgctctgtcacccaggctggagtgcagtggcgcaatcttggctcactgcaacctccgcctcctgggttcaagcgattctcccaactctgcctcccgagttagctgggactataggcatgtgccatcatgcccagctaatttttgtattttttaaaatagagaaaagatttcaccatgttggccaggctggtcttgaactcctgacctcaggtgatccgcccatctcggcctcttaaagtgctcggattacaggtgtgagccaccatgcccggccagagtgtgttattttttaagttgttagctattttgtctttctcttgaaccttatccaagtgccctctgatcttttaaatctgtagttctatgagctaaatctagttatttagtttcatcattgggtttagtcagtgatagaagagtacctttggtaactgggggaaaaagtctctgagttaatttgaaatgttgatttgaaattgataacagttgaaatacaacttggcattaactttgaaagaaaatcagctgattaataatgcaatgtgatactttagatatattactaagcatctctgttaaagtgaaatgactttttcaatctaaaactttttattttaagatacatt

SEQ ID NO: 44059 - DNA, 1057 bp, Homo sapiens
aggccatatcttacacgggtattacatcagtcaggaaattggctgttgaacaagtttttttatcttttcatgaatgatggcacagctcattatgtcaaacaggaagtaggcccttgccagagggtggaatatgtcttacaatgataaaaaaaaaaagtacgctaacttagcagatttcagtaaatgggagaaattataatgtggtctccttttaactattttaacattcacttaaattcaatgagagaaaaggaaaaaatgatttaagcaccagacagtggggttgtagaatgaaaatgggaattgcagaggcttctctattagttcatctgccaaatacctgcagagttgcttttcaattatgtgtctggttcaggtaagaactggctggtttctgacagtggtctttcagatgggacattaccgaggaggcaagatgcacaagaggctaatgctcatttcctgtgaaaggaaccaaggatgtcaatgtaaattggaaaggatagaaactgggcaggcatgtggggctttggcttacatttcaggaacatgttgtgtctagtgattgctcacaattgcgaaaagaaaaagcgaaggaaaggggctccacttgacaacaactgcatttcaataaattctacccttgaaccaatgtcaggaggtaggtttcctttcaaaaagttctcaataaaagtcaagtcttcactgaattcattattccacagacatctgcatttgaggaatacttaaaattcttctcatatcaatggctttaaatgttattcaatagtaattctttgggtctttgaagctttcagctaaagttttggtctatgactcagcgttaccttgttattgcctaactgttgccatctttcatgccaggaagctctttactgaaactatttgttaagatatgctatgcattcctctcaaaagaaaaattattttaatgtgctttgttttaatcaagcttgtttatttatattcatttcagcatttttatttgaatcatcataacagaggaggtaattaaaatgaaatactgagatataca

SEQ ID NO: 44060 - DNA, 695 bp, Homo sapiens
agggaagcaaaagtcataacccaggacaaactggtatgcatagttcagcaggatgaagacaggggcaaaggcataaaaaggaagtctaaatgtatagcccaaagctagaagggttggaaaaggtcaatattcctaggggaaaaccaggacagtactaagggtgaaactgatcccaagatattagggtctggcttctctctgctaatgtgtgtggcctgtgggtgaatttaaaggtttacagatagtgtgtagcagatatagaactattgaaatcacctttggaatattcaacccgcaggccttctgtgaacagtgatgcagttatttgtccttatgtaaacatattgttctttcacattgctcaccctggcaatgaggttcctttgcaaccagctcacttgtgtttcctaacattcagaatggtgttgcatcacaagaattgctttatcttgtttgttccttctggttatctggcttatgtagggctgtattatgcgacaaggcacctttgcctttgtgggtcccttcttccataacatattgaaattatattttatgactgtgttggtctaaggacaaatatgttaatatgatatatgaaaacattttcttcagcctataagttcacttatttttcttctgatttttaaaaaaattaaaacatttttctggtcccttaaaagcatggtgggccc

SEQ ID NO: 44061 - DNA, 1129 bp, Homo sapiens
agatgacaagtataccatggaagatgcaacagagaagatgccattcaatttgttgtatcttttatttgggattaacattgggaatcaacatgaagttcaaaagtatctttggctgcatataaacagggatgacaaaatagtctatgatcttatatgtaacaacaaaattctcacttgggcacagtgacccaccaaattatttctttatttggaggtaattacctaccttgtggctgacatgtttataaagtaaacccaaagcatttagtttctgtttgcttttgtttaattttgttttccactgtcttaccctgggtcgaaagaaaccctactcataatgggaatggcatggagctatttttaaaaaactcagccagaggaggagcaagggtcaaagaaccaccactgcataagtaaacagtatctacttttaagatgactttcgtaacaatgggacccgcagaaagcctcccgcctgctgcaggcagggcatcactgccctttattccacagctgcatgtgtccatccaccaaaggcacctattgctacatctacttcctacaccaggagtgtttacttttctcccagtgtgcaggtttggatatactttctttctggaattaaatcaaagtcagtctctggcctgtggtctagagggcagaaaagtttagtcatagcttggtccaactcctgagcaatgatattaagcttatgatttctgaaatgtttatgttagctctagccatgccgtttactgcaattgttgacactaacactgttcggtccagatgagagaacaagatcagcaactgagattgttttgcactgtaagttctactcacagatgttctcatactaatgaaagccagagtgtattgctttctctgatcacatgaccagatagccaaggttgttgcaaacattcaggacagctttattttccaaggttaacagttactggggaaaaataaggtgaaaataatgtgtaagaggtaacttgctttcttgagcatatttcagaggcccctcaaaacattatatttaaaaaagagtgctctttttagtagtgtctgctttgcaattacttttaaatctccaaggatataaatcgtttgtggtatgtaaaac

SEQ ID NO: 44062 - DNA, 2362 bp, Homo sapiens
aagcactgtaaatacatcacagtataatatagttttaaatgtagagatcttgcatgcttattaaaaataaagaagcagaagaaccaatattagtagtcttgggagttaagcaagcacatacccaaagagaaaaagcccactggttagtggaaaaatttaacatcaattaaataaagaatagcattctcaaagttcgaaacaagtagtgaagtgcatgaaggcaatgaggaagctcacaatcggcataacaaaatgcttgaaataccagaggaaatacactttcgctgttgtattataaaataacatatttattcttggttgataactaagtataacattccatgctaaggaccaaagtccattttctttttgaaaaaatattgacatcattttccgtaataacaaatgaaagcaaaaactgcatctcaacaaccgaatgctgagtttgtttcactggagagtgacagttttctctttatctctccctgctaattctcagtgttacctgttactcttgacttcactgctccaggagtagagtctagtttatgagccaaacttcctagaggaacactaggtcctctctttgcaaataaagttccatttagtcctggcaatgcaaagctttctggttcaaagagaagagtcttataagacttcttggacaccaaataactcttacaaaacaacattttgatgaattaagtgtaaatgaatcagaaacatatggattaaatttcctttcaaatatgcatgccttttcctaattaagggggaaaatgtttggcaaaatgtattttgctgaacccaaaatactagaataaaactcagtgttttcctggacccccaaattatgctggagcctcttttcttttaaaattaattcatgtttagacttaatacagtttatttttttaaatttgaaaatgactttattctgagctgtaattacttccttggattagtgctttttttcagttattgataaaacctttgacactcagctttacttccagctttatattcacatgttaccaaacgtttggtagaaggaatgtattctgcttctctgtcaataattgtgcaaccttaattttgcattttgttcaaatggtaaaagcactgtacaaattgtctggaatttttttgccatgctgtggtcacttgtaaaaggcatagaccagaacaacttttgaagatgctgaacaaagagacatcagttccagctccaaagagacaccagttcctgcagagacacccagggagaaagtgtgttgtgtggtactgcactcattctgctgctataaacatgtccattccttctctaccctcctcattatgccatggcaatagaggaggaaatgagcacagttggtttttactaagttccagtaatctttttccatcctcttaatttacctctttgggtaggcatacgctaagaggggacaaaagagtaaatgcttactgaattagctgtactgtgtgcactggcagttaaggtcctactgtcctttcaccagagagttctagctaaggaatgtaagacttctgatctctccagcctactttggatactttttctttttttctctaaactatgagcaagcaagtcttcatcatttttccacctaaactaaacattccctgctcccccaccctctgtccagggcctttgcacatgctgtttcctgagcttggaacacttccctacttcccacctcccagccacaccatcactaatcatattaagctttcaagtcacagttcaaatgttaccactccagatagtttttttgaacacatatgttcccctctcttgcaaagctttttgttttctttatagcatttaaaatcacaattggcaattattttagtgatgtgtttgtttccttgttttctatttcttccacaaaggcaaggattatatttgccttgtttatgacttttcatctcagtgcttagcaaaggacctggcacacagaagtactgaataaatatttgttgaatgaatgaatcaaagaatgagtcattaggtggccttgtcctcctttagggctttggcatgcaaccctgtggcaaacatgttcttgagtaaatagaaagtgggtttgctgggacactaatagttagtgtctgctgtttcagtttaattattactagtagtctcctctgctttcagcagcatcctggttcaggtgatttaattatatagtccctgcagttatctagtattttgaatcttatttatttcttttaatgtaaagacagtgtctactggatttgtcatagggatatggtgctctggttggatatatctgaagaaaacatgtgactgtgcctatctgtggtctggaagaca

SEQ ID NO: 44063 - DNA, 2162 bp, Homo sapiens
ttattttcccaaagatgaatagtaggtcacgagtgatgcttgcataatttttaaatataatcaaatatactgaaaaacatgctagtactgtatttccaaaagtaagtttctattcctagaactaaaacagaaaagaagtgttgtgagatacataaatgaagccaataaatttaaccaagggcttaccattttcctgcaggatgtttataaatagttcctggcaaaggaggttgccgtatagggtcctacaagtaacctaggtggcagcatctcctcccagcgtcaggtctaagcacacaagttcttccttccatctacaaacgcaggaaaccacgactggagaagttatatgattggctaaaccatgaatgacgcaacataacccacgcccactgagaatcgtcctttcccagactggctcagattccgctttccgattggtccctacagcaagagggcaaggacaattgcttaagttgacctctgggtccggaatcgcgggcaaagatggcggcggccaggtgttggaggcctttgctacgcggtccgaggctttcattgcacaccgcggctaatgccgccgccacggctacagaaacgacctgccaagacgtcgcggcgacccccgtcgcgcggtacccgccgattgtggcctccatgacagccgacagcaaagctgcacggctgcggcggatcgagcgctggcaggcgacggtgcacgctgcggagtcggtagacgagaagctgcgaatcctcaccaagatgcagtttatgaagtacatggtttacccgcagaccttcgcgctgaatgccgaccgctggtaccagtacttcaccaagaccgtgttcctgtcgggtctgccgccgcccccagcggagcccgagcccgagcccgaacccgaacctgaacctgcgctggacctcgcggcgctgcgtgcggtcgcctgcgactgcctgctgcaggagcacttctacctgcggcgcaggcggcgcgtgcaccgttacgaggagagcgaggtcatatctttgcccttcctggatcagctggtgtcaaccctcgtgggcctcctcagcccacacaacccggccctggccgctgccgccctcggtgagccttggattccgccccagggcggaagggagagatggggattgtactgggttactctgccgcagatttacccctcgtcatttctttctctctgcttcgttcatgttttcctagtcctttcgttcctatctggggtggcctggttttgtaacagtcactgcgttaggaatctagagactaggtgtgtgtggctgcgctaacacctaccagctcttcaactctgaaagcctgagctctccaggattccagtcctggattctactttgtgagtgttcagccaaatggaagagcagtggtgatgaagagaaacgccacttaagagagtggggcgggccaggtttcctgttggctgttccaccacaaagctgtgtgaccatgtgtcacatggctgagtagtaacttctttttaccttaattttaaatttagtatgtcttttctttttctttagtaacttttttgcttaatttttcgcgttttacggtagtagttctttgttgtagaattgtgaagattaaatgaagtattaactaagatacctaacgtttactcagtatttatgtgctaggccctggttctaaattttatatgtgccaacttattaatgctcacaataaccgttcacgataggtagcaatgttttggtaaatgaaaaaaagacaaaaacgtaacaaactgaggcatagaaacgttaaatgtgtctgcctgacaccctatagctaagagattagggggtcaaacttcaaactcccattccaagttcctagtaaaaaatcagcagcttccgtgtaactgttcagggcggacatgaaaagtaattaacgtataaataattttaaaaattattgtttttgacgcattcattattttatatcttctaccaagtgtatgtcttaatatttattgaagtaatgttaggactgtagatgtgtgctcaacctagccttgttgtgtgcatgttttttcccttccccagttgagaaagaagtggtcttgaggaaagcgtcatggacttagactactcctgatggatggcctagaaaacctgtttaa

SEQ ID NO: 44064 - DNA, 446 bp, Homo sapiens
tctgtgagtatatcataattatgatatcagttgaaacattaaaaaaaacaaatttgaaatttgagcaggtaggggcctttaacttaccttgtgcgctcaagtattcacactgtccaaacctttgccactttttcatagacttgctagttacttattaagagacttcataaattgctcaacctctttgaacttttttgatttcctgtatgcctcattcatttgtttacttacttattctgccagtagtttatgggtgtgctttgtatttagacatgtgctatgctataggacattttcagttgaataacgtaattccaacacttcgtgtcctttattttagctggaaaaattaatggattattgtgaagagtgaatgagaaaaataatatgtgcaagcaagttacagaataaaattccaggtcttgaggaaattatgcagggcctct

SEQ ID NO: 44065 - DNA, 2118 bp, Homo sapiens
aaggaaagatttgttcgttttattatttttttaatttttaaagattttcttttccccccttttccccctcccagccactccggtttgggtttgccacaagactataattcctttagaaagtggagtcgaattcataaaagtgatggggggaggggcgcggagagggaaggctgggagccccagggagtcttcacgaccgctcagctcccggcgcgagtggaggtcggtgtggggagaagcggctcccgcccgggatggctaatactctgcgagccccggcagcccgcggccggcggggtgactaggcggcgggcgcggagggtctgcggcgggcgggcggcgctgcagcagcctgggcacggctgccgccgcccgcgggcgcgagtgtgcgcgggtgtggaaggccggcgtgcgagccgtgaggggtgtgcgcgcgtgagccggagcggggctcgcccctcgccggcgcccgccgcccagccggtgattgctctctggctgtccccggcacctcggcccccacggccgttggtccgggcgggtgagggagaaagtgagacttggtgtcatcaccatccattgtcagaaggggaggaaattggaatccagcagcggcgagcagcagctgggcggtcacatctgggaatgcaaagccgacctccccctcctcctcctcctccccctcctcctcctcctcttctctcacccaggatcacttccgaaaccacttcgccttcagcccctgcctcggccagaggtttcatttttaactgaatatttacgaaagctggaagcgtgcgaggggggtggggtggggtggaaatagcggctgcttcttttccagggatttatttaatggggatgtgttcaaggcaagagcgaattcagaaggatatcgacgtcgtgatccagaagtccagagctgagaaggactgcctgtttgcaggtgagttcttgcttttccagaacctcggacccagcgcccccttcccagttttctgaccgcgacgtctgtggctgggggtggggtggagggttgcacgtccccattctggggttcatttggcaacagctgctgcaacgagcgcgggagccaaaagggggagggggcgccagcctctccccttcccctcccccaccgccaagtctgaggcagccaccagctttgagggcagagcccgcgtggccggagcgggggtctaggcgaaggggcagtgcgtggtatttccagccccgcgtagtgcccgaagcctccaagcacgcttcctgggttccagcagcggcggcagagcggggttggtttgcgcaatgggctgagcggcggcggccgggaatggagcctgctgcgctgcgctgcgcttgtaagctgcgcccggcgccgaggacccccggggggcagcgctcggcccatctccggccccttcggctccctctagtcccctccgactggcaaagagaagggattcctcggattcccaaggcacccagcgcccctgcctgggggtcgcctttcgtccattttgctcccccgggattttgctttcgctaccgcgagcccggctgaggctgcttccggcctcccctatcgggaaattcccgctgttgccatggcacccggcacttgttgcggggggcggcctcccgctgcacccagtcgggggcgcgccgcatcccctcggacgcggcgcagagggacctcgccgccctctagcccttgccttctgcccggccaggcctcccctgacaccaccgaatgtggggctcaagtcctgatcggggttaaaacaaatccactccaggggtagcttttgacgggactttctgtttcagatttcagatactctgactccacctttacttttacctacgttggcggccccagaaggtatttatgtgtatagagttgcttcatttcctgttcacactcttgtgtttcctttgttcttagcgtgttccgtgttcgggtattttggttgcttgtttgtttgattattgtggcttttctttacctgctacccaagcctgacgtccctcggttttaaatagcaggaggaggggaatcaatgtttgattcaggtgtttcgaggaccacgccacaggcaatgagcagaactcttc

SEQ ID NO: 44066 - DNA, 437 bp, Homo sapiens
aaaaaggttccaggactgaaccctggaatattcccataatttagaggctaagcaagaagatgggttctgcagttgaaactaaggaaggaccataggcatagaaactgagagatcatggtgtcatagaagccaacaaaagtgttttgataaaacaatgaatctttgcacatgaggtaagttgacctcatgacttccttctcttcatgaagcaattttgcataatcattaactactcattgctactgagagttcagctgtgacagggagagagaagtgactgatggatttaggatcatggaggttgttgattatactaacaagcagaagcccagtttgattggtttaaaaggaaaatggaaactaaaaaaatggaagtagtgagtatggggactctttcaagaaacgttcgtaggaagtagaacagagaaataggttgg

SEQ ID NO: 44067 - DNA, 1058 bp, Homo sapiens
tctcatttccatatttgtcataaatgtctcgatttcttgagtttggtcagctgcataaggagcaagaagtaaaaatcatcagaatcatttcaactgttgggaaaaccggattaatgctggctgttaaaagctgttaattgcagtttacaaaagagaaatcccttatctttgaaagttcacttgcttgagtgactcattcttcctgggagggattaatgcttaattagaaaaagatgctaaacaatctgatgtgcttcctgaatgaaaatctcaccttagttttaaagattcttaacaaggtaacatgctaattatttaatgaatgatttgtgctgagcactagagatgtgttaaaatagcagtgcttatcgcgtttggcacagctcccagaaatcagtccactgagtactctaggatttggtgccaagcctgttttttgttgtgcttggtgcttggttttgttttcccacctttgagtgtaaacatgtttgtcaaggtacactgttaggggaaacagagaggggcagggagggaaagcctggtggtcaaggaagtgagggtggtggaggaagagaagagaagagaggaagaaaaaacagccagaactccatcttacctttggactatgactgcactatgctgacaaatacctggaaatatctgtactccaaccttgctgtaataaggatgtaaagaaattaggaagagtagcatgtatgcttcagaggaaggtgcaaggcattgcaagcctgacttcacacttttcttggctgtcagggggttttctccttcacaacaataccccaatgttttggtaggctgactccagttcactttactaagtggggaggcatgggtggaatgccaggtatgtctacagagcaaagcagtgcaggcaggctgacgccaggagagaataggcaggtacctattgagttacaggatttctacaaatctaatccgcatgtaatgtgagacttattgcagagccagcctctgctagtgttgtgaagtctgaggatatgaacagtctcaggaccaaagatcccagttaaccc

SEQ ID NO: 44068 - DNA, 840 bp, Homo sapiens
tttattcaaaagcaaccagtccccagttgtggagacccaacaaaattaattatttagcatattatttatctatgctggttatattagaattatctagagaaatagaaccaataggacatatatatatatatatatatagaaatagatctatgagaaagcatttattaggggaattggctcatgttattatggaggctgagaagttccatcataggctgtctgcaagctggagaaccagggaagccagaagcatgactcagtccaagttcaaaggcctcagagtcagggaagctgatggtgttactttcagtctgagttgaaagtctgagaaactggggctgctggtgcgaattcctgagtccaaaggccagagaacctggagttctaatgtccaagagcagggaaagaagcctgagttgaaagtctgagaaactggtgctgctggtatgagttctgtagtccaaaggccagagaacgtggagttctaaagtccgagagcaggggaagaagagtgtcaattccagaagacagagagagaatgtgaatttgtctttcctctgtccttttgttctatttgagtcctcagccagtttcttgatggccacccacactgggtgagaggacatcttttttattcagtccactgattcaaatgccagtctcttctggagacactcttacagacataaccagaagtactgctttactaattaactaggtatcactgaatctagtcaagttgacacaaaattaatcaacacaatggtgcatgtctaaggccaaaatccttaatgaacatagaaaaaaaaaccctcaacaaaatactagtaaaccaaatcc

SEQ ID NO: 44069 - DNA, 551 bp, Homo sapiens
tcattttttgttgtaattctgggattttagagcccacttactttatttaactttttacaaattggttaaaagaaaataattaaatcaacctgttcaaatgatcctagaattgcataacagcttaaatataattaagtcatatttcaaattaagggacccagcaatgcagctaaaatgttactgctcatcagtggttgttattctgagtcatagaatgccacgaattgaacattcctgccagggcaccaccctggtccaccctcccctgctgcagccctggtgtgtcactcatgttgaagtctgccagtaagtccaaggaagtttcctatagtgttgagaactgttcctcaccaggattctgaagtcaagtattttgtttttttgttttttcttaagtaccagttgcccaaatgtctttggacaaggtttctggcacaggcttgttcaggaaatagggagggagaaacacctattttatattttaagtgaaaaaacacacaggaatattacgtaataacaaaaaacaaatggttggctcatggtgaagttta

SEQ ID NO: 44070 - DNA, 3113 bp, Homo sapiens
caatttgctaaaatgccatatatgtatttgcatatgtatgtatatgctgtacatatatatgtacacatacatacatacacatgattgtgtatatatagacacactattatatgtttttgaaaactaagcaatttggagaaatatcattgggaaagtacttactatgatttttaaatgtctacgaattaatcaatatctattggttactgttcaaagcacagagagtcatactgagaggcataagacataactgatactaccaacagggaaacgagatatacacaggaaatgaattccttggcagggtatgagagcattgaacacaaacaaaggaacttaagtaaagtccaatgggattgaactgtgacccaacataatacaatttttctagagactcatttgtgtaaatttgaagacagaactgagaaatgacattataaaaactaaaaacgggagaacgagatttttaatgtatttactaaatagtgaatcagttcagatacataatagaaaaggaatttcttgattaatgggtcaacatactgagatctgatggccttcaacctccttgggtctgcccaccccatttttgacgctccttaaacttcttcaacttttgtcttctccagcttttagttgctgtgatcctctatctggcaatgtatccagtgaaccctgtgggcttcttccttcctgtccctcgtgttacctgttctgtgctacctgtgttgcgttctgctcaacgaaccctcctttgggtggcactcttgtcctgcctagccctagttctgctagagatgctcaattagttgttgagttgaagaattgaattgaactgtttccctcagattcctctaaacacaaatccacttattctttctgtctttgaaattctcaaaaccgctaagacacagctattttgaaaatagccagcattggttgaagctagggtgaatatggcttttgactcagagaggttgttcaactcaccaggaaagggaagcattgcaagttcctaagcacttctggactcttaatgcattttcactcgtgaaagtttcaagcaagaaaaaaataaagtagtgccccgagttctttattagattcaattaccagcgtacaaacatcctaattcacttaaacaaaatagcccacacacattccatttccaaggaggctgcttttcttcctctcttcccttctcgctctccctcttactgtttttcctccgtcttgcttctccttttctccccttatcctagttatctcaaagaaaagcttatctgcaaccaccctttaaccacgaattaccataaacgaagcaacccccccacccccccataagcgaaagcaaagccctcagtggagcctgtcggggtggtggggacgccccctttcgtgcaaaacgacttcacggtgaatttcaagtgtccgcaggggatggaaggggggattccagatcctcgcattttcacagacggcctaatccctctgcgcaatggacccgggaaagctgcctcccgttaagggcgcccaggcactgtcaaagcgccctccctgcccgggccgggagaagtaaggggtgtgaaggcggagccactgggctggcaacaccctcccgaaggtccagcccttacccgccttcctaccaccttaggggatttggcccggagaacgagatcaccctctcaatgaaaggcagatgtccctttaaggtttgcttctacagcccgtggactttagcctaaacacggacccgcgaagctggctttatttgtccatgtctcggacagagcctgggaagctgccagtgagatttcagagaccaagagcgcgaaggggcgggcgatgtggcaatccgtctgggatgtgaaaagcgtggagcgcatttagaggaattcgacgaaaacacaggaaatcactcctctcccgctcctgggcgccgctgccactggggcagaggactgggaaccgcggcagcgggataagtggcccagccagagagcgcagctcccgcgcccggtcctgccctgcgaaccagcgcggccccctggcgctgaggctgctccggccatggcccctcggccccgcgcccgcccaggggtcgctgtcgcctgctgctggctcctcactggtgagcgactcgcttttctctgagcatctcctgctcgcgggcttggggcttggagcggggagggaggtcctcagagccatgggccagataggaagagagagcgcccatccactttcgggcattccaggtactcaggccaggctacggggcaggcaggagtttcgcgttctggttttgatatgaattagttttcgtgtctctccaaagtccttcaccctaggagtaggagtgaggcagcactgaaaaccttagaaggtagaattcacttttaaaattaaagttgtttttacaatacacattgtatattaggactttgctgaatatttcctcccctccacccttttttatggcatgggatgggagggtgatgcttatagggcgcctgatacatatgcaaaattcctaccctcgggttgttccagagtggacattattgaattttcttgctgtctactatttaggcttttttcccatgcagaacaagaaaaggcagggatgcaagacgaaactgccacttgttccaaaatgatgtttctatgtcagcacccaagaggagggatattttgaaacgtagaaaggaatggtgaacattttctctgtaaatatcacagggcagtctacttttaagatgcaaaatatagtattgttatttgtacataaatgtgtatttttaaggaggggacttaaaaacatagtggaaatgcaaagttgtatccaatttagaaaaagcttgaaatatagcattttgtaagattttcccaataatgaactcatggtcagatcttttttaccagttactgattggggtgggggaaagttgaaatggtgaaaaatggaagaaggtggggggaaagtgtatcgatagaatctctgtgtgaaagaaaatcaccttattaatgggttaattaacagctggctttaacatatcattgatattcaattgttcagtgtttttactgctggcatggttattagtact

SEQ ID NO: 44071 - DNA, 677 bp, Homo sapiens
tataagaatacatgcaaatagaaatacacacacacacacacacacacacacacacacacacttctgttcataggattttgtttatttggtaggaggttttgtattattttgtgacaactgcaagtaagcactttccatcatgagaaatttagatagtgagtgagtacaagttccttaaaaaaaaaaacaaataaaacaaacaaaaaaaaccactttcccttttacccttttgtctatattagctaactaatcctcccagtcatccacttagctttgctggtggaggtcacatgggaacctttgcacaatctgaggtttgcacattctctctaaataaacaattgcgtttatcactagatattcataattggagctctggcttcttattttgtaaagttcactttccaaaccatgtataataaaactaattgccattatgtgttattctaaaatattttaagaacttttcctggggaagatgtattttaaattaccattttcttacctaagcacggctatctcaaatattgaaataggcttatacaaacttaccttaagagtaaccttctttttaagtttttagtaacattataaaacagaatgtgatttcctaattttagaatgtcagttacagacaagttaaaaactctgaattaaagaaaaattaataaccatta

SEQ ID NO: 44072 - DNA, 3011 bp, Homo sapiens
cgaggtgtgtagcttttcatctggtagccatctcatttaaaaaccaagaggcaaggcagttttgcgtgacccagttcccagcttaacttttccctttggcttaatgagtttggggatccgagatttattttccttccacacgcctatgccaaactcagattccttcctttcatccctgtttcatctgttcaggctggttagttcccctttccaatccacacagagaaagacagaaaagacagtgagaagctatgtgtgcaggacttctctgccctccactccatctaagctctcaagaaacttttagattcttttgttttttctattcatcggtctcttaaagaggcaatcccacttctccatttccacttcctaataaagaatgctaagtaacttaaggattttctttaaattatgtagctattcaatcagggtcagtcctagttaatagtttttccccacttcccatagcctcggcttttagcttagctttggcagtgaagatctggccctaagctcttgcgacccaacccccaacctaaacatttcacaggctactgggctgcggaaagctgaggctgccaactttggagcctaggattcccaggacatcaggtcaagcaactgagaggtccacccaggggtaaattccacacatagtttcttctctcttgggaccagcgctttaacatctgggtgaatcagatcgtgcagacacggtaactaggcgcagaaaacagctggacacgttgctgggagcccagacagaacgtgaccagtagttctcagaaaccgcttctaaataccagctccaacaggcttgtagcgtccgagtgcggataaggcaagagcaaaaacgagcatagtttgggccgttggggccaaatctgcacttctgagagctacttttactgctaagctttgaaattggatttacccagagggaagcgttgcagtggcagccgcaggcaggtaaaactagtatttgcactcacacactccccggattcttcacagacagggatggaagagaaaacttaggaagttgaagtttggcattaaaataaaggactcgccaccactctgtgcaccttcttgagggagttcattcgtccggagcgcctcacagcttagtgcgcctgcgcacgcgcgaactgcggccccgcctctcctttggggacgggagacgtgcgtcgggtcgcgggacgggggctgcgcatgcgccttcatttcgtcagcccgctgttgcgtgctgccagcgggaactgtgtaggggtagattttcgctgcagtgttccccgagcctgttagacgcagcgcgccgggagactgagagaggaaaggatagaggaagtgctgccctaggctgcatgagtcgaagcaagcgtgtttccttcccgccaggcaagtgcccttagaaaccgggccccgcccccttcctggcctgcattcccatcccctctcccggggcggaggtgaggacctccttggttcctttggttctgtcagtgagccccttccttggccatgaagctcgtgaggaagaacatcgagaaggacaatgcgggccaggtgaccctggtccccgaggagcctgaggacatgtggcacacttacaacctcgtgcaggtgggcgacagcctgcgcgcctccaccatccgcaaggtacagacagagtcctccacgggcagcgtgggcagcaaccgggtccgcactaccctcactctctgcgtggaggccatcgacttcgactctcaagcctgccagctgcgggttaaggggaccaacatccaagagaatgagtatgtcaagatgggggcttaccacaccatcgagctggagcccaaccgccagttcaccctggccaagaagcagtgggatagtgtggtactggagcgcatcgagcaggcctgtgacccagcctggagcgctgatgtggcggctgtggtcatgcaggaaggcctcgcccatatctgcttagtcactcccagcatgaccctcactcgggccaaggtggaggtgaacatccctaggaaaaggaaaggcaattgctctcagcatgaccgggccttggagcggttctatgaacaggtggtccaggctatccagcgccacatacactttgatgttgtaaagtgcatcctggtggccagcccaggatttgtgagggagcagttctgcgactacctgtttcaacaagcagtgaagaccgacaacaaactgctcctggaaaaccggtccaaatttcttcaggtaaaacaatcttacccagggataattaagaatgggcagagggattggtataaactactcctaaagttttagaactgggaaaaataagaagagaaagtctttacttagctgggattttcatgagataatgaaataaaaagagaatgttaaatgtctagcaaatttatggagtaaacttcgctgaaacatatgaagccttactagcgcttttggctttaagcctttgtgagctgattaatgggtgttctaggagattattttgcctaacttttgtaattgtgattctaggtacatgcctcctccggacacaagtactccctgaaagaggccctttgtgaccctactgtggctagccgcctttcagacactaaagctgctggggaagtcaaagccttggatgacttctataaaatgttacagcatgaaccggatcgagctttctatggactcaagcaggtggagaaggccaatgaagccatggcaattgacacattgctcatcagcgatgagctcttcaggcatcaggatgtagccacacggagccggtatgtgaggctggtggacagtgtgaaagagaatgcaggcaccgttaggatattctctagtcttcacgtttctggggaacagctcagccagttgactggggtagctgccattctccgcttccctgttcccgaactttctgaccaagagggtgattccagttctgaagaggattaatgattgaaacttaaaattgagacaatcttgtgtttcct

SEQ ID NO: 44073 - DNA, 616 bp, Homo sapiens
ttctttctttttttttttttttttagacggaatcttgctctgttgcccaggctggagcggaatggcatgatcccagcctatggtgacctctgcctcccgagttcaagagattctcctgcctcagggtcccgagtagctaggattaaaagcatgtgccaccacgccctgctaatttttgtatttttagtagagatggggtttcacatgttgctcaggctggtcttgaacttctgacctaaagtgatccgcctgccttggcctcccaaagtgctaggattacaagcatgagccactgtgcccggccagattgttctctcttaatgggctgataagtaaccaagtaaaacatattgtacttttaccccatgctagaggcagcaagcccaagctgcagaatgcccaattacacaatcctctattagccaccaaagagaagatacttttaaatttgtattacattatttaaatagaaaaaataaagacagaagatcctttaaaaagcaaactggataaatagtacttcagaattctatatattatttgttacaactgcatgtaaacctataattacctcaaaatgaaaagtttagtttttaaacaaagcctattattgtat

SEQ ID NO: 44074 - DNA, 1200 bp, Homo sapiens
tgacaatcaattctttttcttgattggttgctaatgtaatttaaatccatttgatttgtttgtttgtttgtttttagttttatttgtttcttttaatgaaagcattcaattccaccctatgattggcagaattaacttctggaatttattctcccctttatgtattctatctctgtttctgaaaggaacagatgtaaaaatgaattgtgagaaagattacccagaggagggtgcaaaagatagaaagctaagagctggacagagaacttttagactcctcatccataccaaatttctaaaagactatgaatgtagttgtaagatttgtagagaggatttctctgtagaaagagcctactcagaaaggcttcagtggggtcatacacatcttagtatgtgtatactggagttgggacacatagttgattgactaatgcctaactcctgtctgaattgtcagagcatgacagcagctgttatgtctagctgctgacagggaagtcggagcagaggtcactgcactggagtcagcctgcatccccagagattgttagaatgcatgtgttttcccaggattggcatgggtactcaaaagcaagagccagtgtgaggtcatgtcagggcctgtccttagggattactggaagtgagtggctgcctctgcagagaatgcagaagatctctgtaattcttaggaactgaggcagtgggatgcattcactcagggcaagggtgtaggtgagatatctcaatgaagggagttctccaaagaacccttgaaaaacttgtacatacctattaggacctgattcatcttaggataataccaatgcagtaataatttctctatccttatttatcttccctacctctgtccctggaaggtcagaaatcacagttagcactctaagtgaaaacaagtaggaaaacaaataaaagccagtcatgcatctttctcaactacaggcttcttacctcgtgtaagcccttagtagaagtaggagagaagatttaactacaaatgcgctttgatgtttcgccttgttggttttaatttagacagaaccatatgaaagtattgctgtttgatcttttttttcccaacctacaaatacagcaatttcatttggtacagcctaaattaaaatatataactttttaaattaacagacattttaaaactaagaataaaaaaaagtc

SEQ ID NO: 44075 - DNA, 767 bp, Homo sapiens
gaagaggaggaaaggaagggaagagggtgggaaggcgggaaaaatgcctttgcctttaaataagagagaggatttgttcagtataacaagagcagtggccattgggcttcccttccccgtctgagcaattttcgactctctttttcattaattatcttcccccatcacttagctaaagtgggggaaagtgccagttgtctctgtttaaatattaacaacttctgacgtttgacacttgcttttcagcgaagtagacaggaattgaatttttgttttctgatgcaatttataagctcctggtatagacctttcgacctaaaatgtagacattctagtggggaacaagttctgaaataaaaagttacccaaatggtatgccaattacttcagagctagctctagttttaacagtgtgcttcttcaaaacagcttgcagttcttctcagacattagtgcattactcctgtaacctcattattcctatagcttcatggaacagcaggtgagggagctgagaaagaggcaagggcacccagtgacttgggtggtcccagaggacaggggcaaagtggcttaaagtcctctgatgagacgtgtggtatttcctctgggatggtcactgatactccccagggaaaaggatgagggctttactgaagcaaaagaaaagaattgagaataaatctgccactgccttctctctagtaaggaacattcaaaagccactgcactgccttcaagactcactttctcacattaacattgag

SEQ ID NO: 44076 - DNA, 1703 bp, Homo sapiens
ggaaaaagatttgaacagacactaactacaccgaggaagaaatactatagcaaataattgtatgaaagagtctcaacatcattagtcattagagaaatgcaaattaaataagacaccactatacgctaacacaattgctaaaactaacaagtgaacaaaaaaaactgacaataacaagtattgacacgcatgcaaagcagctggatctcttagacatttctgatgggaatagtaaaatggcaaaatgggacgattactgtggaaagcagtttggcagtttcttaaaaagttaatcattcacttattgtatgacccagcactttcatttctagttatttactcaagagaaaagaaaatatatgtctattacagagacctacatgtgaatatttacagcagcattattcataatatgttgaagctgcaaacaactcaaatgttctcattaagtaaattgtggtgcatccatacaatggaatgctactctgcaatagaaaggacccaactactgctacatgcagcaacacggatgactctgaaaagcattgtacaaagtcacagaagccagacacaaatggctacatactatatgattccttaaatctgacattctggaaaaatcaaagctataaggacagattatttatcggtggttgccagggttgaacgaggggaggaagggattgactataggggcaggagggaactttttggggtgatgtaaatattctacaccttgatgtggcagtaacacaactatattggtttgtcacactcatagaattgtacatctaaacagggtgaattttactgtatataatttattgcaataaaccttaccttaaaaaaaaactaaatgtttgagaaaacctgcttggacatctaaataattatagttaacaatcatatataactcctgcttctctctcctcttcataaaaaagaatgcccctgtctccagcatttggtttcaaacaagaatatctcaattgtttattttccagattgccaatttagattaccacttagtccagtatgtgtttaaaatatatatgtgctggactgtgccttggtaatagtttcaggaagaattgctcattcaaaagcaggcaactcacttgctgattgcctttgccagcagataatgacatcactagctggaataatatcaaagacattcagaaactatgaatataacattacttttgaactgtcagattttaaaaatacagctgttagtaacagggacacagagtacaagaggagaaattttcacagacatacaaaattgccctttatatttttctacaccaattgtggtgtttatataacagttaatattagggagtctacaaattttgaaaatcactcttccataaatatgaaagtacataaaaattccattatgctaaggtactctacactgttgtttactgacaaaatgcttgagatcctttatttaacacatagaatttaaaatatattcttgctgtttctgttgtgtcttagattcttggcagctataaccgaggaaatttaagcactgaaaaatttgtggaggaaataaaatcaattgcaagtgaacccactgaaaagcatttcttcaatgtctctgatgaattggctctagtcaccattgttaaaactctgggagaaagaatatttgccctggaaggtatgtctatttatcttattgctgcatg

SEQ ID NO: 44077 - DNA, 932 bp, Homo sapiens
acatctgagtggaattgagtctcttgtgccctcaacttttaggacaatttttgaaagacagtagagattacatattggaaaatgtatttgatgggatgtgttatttatacccagccacaaagttcagtgaactccaaattgacccctaggacaatattatactcccctcccccctttgctgatatgatatgttttcaagatttccagtacctttagatatgtctgtgtgatgggattggctaggaagcagaaagcacagaaccaattactcatactgtttcctttgaggattagacacaatgacactatataatttttccctctctctggtgtcagtgaccttgtaatgattttgtctgtactataaaaacagcaatatcctctgggaacatctgagtatttcctcttatctccacatgagggacctcttgggcggattcccaaattaacaaaactgattattttgttaaacaatttaaattctcagatttatttgaaactgttttgaacagactcttctcatatgaaactcttttttttggattctcacagcgtattccatcaggtggggatggtaagacactgaaattttttggccagtctatccacggagaaatggatttaaatggtgacggtctgacagatgtgactattgggggccttggtggtgctgccctcttctggtatgtattttaataacatcctgttaatctgagactgggtcacttgcagagctcccagtgtgattggagctcatgtcataccaaatatctatttccttttgtgttccactatgcaaatacaagttattcagttgagtgagctggaagagtcaatacatcttaagaacaaagaagctatatgaaagaaacaagtagaatgaactcttaatttggtgtgtctattatgtggtttacactaaaataggtatt

SEQ ID NO: 44078 - DNA, 673 bp, Homo sapiens
agagagactctgtctcaaacaaacaaacaaacaaacaaacaaacaaaaacttatagctgtaggtatatattatattaatgaaatgtaactcattttatagaaagtttgcccttctgaagttgggaaatgttcccggaagtgttacataatgatctttggcttgaggtctcaagaaaaactatattgtgatgcaggtagctcctatgttgacacagccaagtgtgatgttgccatcactccagcagggccctctgaggaactggaagtgagtcaacaggtcatactctgaaacctccacattcccctatgccccttgtcagaatgccaatccctctccagggaagcaaaagcctgatgagatcatatgtcagattagatgcacaagaatgctgcagtaagcctgacccttgggaacagaagaaggagacataacaagatcagaacacccggtaaatatgataccagtgatatattttatgtttcaccctctaggacaagcatgactttcaggactctgtgagaataacgttggactttaatcttaccgatccagaaaatgggcctgttcttgatgattctctaccaaactcagtacatgaatatgtaagtcagatttctttaaaatacaaaataccaacttgtgaacattttaatgtcactagtaaactgtgtt

SEQ ID NO: 44079 - DNA, 3735 bp, Homo sapiens
tcctttcaagtggccagtgaagtcaaaactattttcataacaatactgagacgttactgcgtttttcactgtgttgacatttgccctcatggtgcaagaacaaggatggggactggtggtcattgtattcttcatcactgggcactcacaggaagagaaagggagagggacacggagaggccagcagatcaatgaattttaatgccacggaataggaaaaaccattgatatggtttcagattccacattgcaactttaagaaactaccacttgttgagttttggtgtagtatcaggggattatccagaattatctcctgtttttctaagtccatatctgtgtaacaccagattaatcaatataatttcaccaaaactacatgccgtaacagattggatgcagaagcagatctgagaatccaaatgtctgtttttaagccagatatttaaaatattagcaaaaatgtaaagcaatgccactcttctcccggattctttcatttggagaaatatagttatttttcataaaatgtacattatttatgttcacacataataggatttttgttaaaggacttactgagtaaagggctcttgagaccaaagagtttgagaagccccagcttaaccttccatatttcctgctctgaatgtggtgtccctcacaactgcaactaggcaggagagcaccctggaaggggttctcaaactactttgtctcaggaacactttatcctcttaaaattaatgtgaggcaggagtttgttctttgtttctaaaagttttgcctggctctggaaaatcgtagctcctgacttattctgcacttcatgacagtgtaatgttaatttgtccagttctgagaacaaaaaccaagaaggatgcatgttatttccccccacccccagagataaaacacaaattcctgtctcacattaaaggaagtgtcctgcctcccaaacacaggtctgttccaaacacttactcacatttcagtgagtcagaaggaaacagacagatattcatctccctgaaacctggctgacttccttcaaaaagtctgtaaggagcgtcaaaatcgtgtcaccggttagtgagcagccacctaagagctctcaggtgatagccggagttttagtaagcaggtgagtaccccagacaattcagaaaaaaatgccttcaggtgtttgtcaaggtgagtaagtgcagccagtaagtgactgataagaaaacaggaaagagcctgggactatataatttgggttcaaagggtattagtcataagccatcagcagcaacatctgatgcataccaatttaatactttaacaatgtgacacatcagccctatctatagtaaagagaagagcttgatttttatgaattattaagtccttcccaccttgagccactttgcttcctagaggcagtatctcaggcatcccattcagctcatagtagcattccatgaagatctggaatgatgacaataatgatgattattagactcataactccttaagcttgatttatgaaaacagttcgttccttcacaaaagtagtcactggaagaattctggtttcagcaatgtgctggaaatttgtggccaaacttttggataaaacataagattcagacaagaaaaattaatatcctatttcttaggtttttaactaaaaatctcggatatagaatgttctctttccagatgtgagactgaaataatggaagaaaatggtcacagtctatgtcatggtgtaatgtagacagggagagtcacaagtgcatgtatgggctctcagccttttctctggccttgaagttaatctcctaaactcagtcattaaatcagctcttaattatctcggaggagaggaagtaatgatgatttctctctctctgtctctctgtcacacacacacacacacacacagctcttgcagcaggtattgcttaaatatcaccttggataatcataacttgtgagcagatcttctttcctgatgagttagtttctaacctggtcattctgcgcttatttttgtccctttctccacccacttaggaaaaacagagaaagggacgcaccgcgcagcccctaggcactgtggtttagggctagtgccctcggcacccgctgccaggagccgggcgctgccaagggctgcggaggggccacgttctcccggggactggggcatctcctgcgtgctggcgacaggctgcgggggcggagtggtgccagggcgggcgctcgcccgtcggatatgcccacccgtcccgtccagggcaggaaagcctgccagggcgccatccccatccccaccgcctccaggctgccggggctgggccgctgtacgggagccaaggtgcggtgccccgcgtgtggacgagccgaggtgcagcccgcggggccgcagggccggggtggggcggggcgcggccggagcagatccggtgtttgcggaatcaggaggggcgggctggggcgggccctcggcgctgcaggagctgcccagaaacttttccctgctctcaccgggcgggggagagaagccctctggacagcttctagagtgtgcaggttctcgtatccctcggccaagggtatcctctgcaaacctctgcaaacccagcgcaactacggtcccccggtcagacccaggatggggccagaacggacaggggccgcgccgctgccgctgctgctggtgttagcgctcagtcaaggtaagcggggatttcgctctgcatcggctgcaggagggacccgcgcggcttcctggggctcgctggagggattgggcggaactagggagcgagctccgtgtgttccctcggattccacgtggactcgggctcccagccaccaggacctgcttggaaagagatacttcttcgttcccttcctgctatcccaggccttgcgtccccattaggcgcgtctcgccctgtctgttaagcaccctccaaagtcatctcagtgagtgctttgttttaggtacacacacgcacacacacacacacacacacagacagacacgcacgcactcaagcatggacagtgtggggatccgcgggtgtcctggagaccgcgagtcctgcagcccaacttcccctggctcagacaggtgccgcgcctgccagagaccagggaaatccggaatccattgctgatggcggcctgcagctccccagcgcggtgcttgctggctttgcagaagcctgcgagccccaaaatgcttatttttcaacccaaggatgtgaataatgcctctatttcttacttgaggacgaagcgctgtgtttcttcccggggggacttggaataaaccaagcgccacttaaatacttggcagaggggaattcttccttcccttctgccttcctcttattgttgtaacattgtctattcgacgaatgtaaacttaggctaggaaaagttcttttcacttctggatcctagatgccgcaatgagagaataagccggagcagccgctctaactgtagtgctgtggcagtggggcccgcccacctcctgagttcttttacactaagaggaggaaataaggctggggtggagagcttttgtgggaccatcgcctgagtactttttccctgaccattaggcagagctagagtgtggtcaaatttaagaattttagtttatttggagggagaaggagacacgtttgtataatgtagtttgaacagcgatcaaaacaaaacaaaaaa

SEQ ID NO: 44080 - DNA, 3274 bp, Homo sapiens
gtctcctgccactgtctctgagttcagggacactgttttgttgactgctgcattctccacacccagagtgatatctggcactgagtaaaggatcaacaattatttgttaaatgactaaatggaagtcccaattctaaatgattcatcccaagtgctatacaaagtgagctatagtagactgacttaagatgtttgagctgaaagggagcttcagatgaactccactgttctagttcatagacatggcctagctgaggacatctggcaccgagtttgaagcaattcttttaagtaacagctttcctggacagagtaaatctaagagccaccatcagtaatagacattattgaaggtgataagcctttcaaggattgtaaggggctcaaccactggccatgctgctggttggaagttgaacaagacgaaaagggacacagagttgagaggatcccaccaggcagagttctgggaacatgagaggcagccatatctcctttctctgtccaggattacctctaagtatccaagacattgttgaaagacaagtatatttgtagtttatagtgagatcctagtgctggtaagaccagggacactggacatttctaaatcctgcctggaccttctcatgacatccctgaatgatgtataaacacaggacaataggtctgggaagcaaggcaccactctattattggctgggccagggctttgaactccagtatagagctttctggcaaggtgtagcactgagattaggctcaaggcctaaccaccagatgatacaagcataccccaccatgcaagaggaagagacagcacctgtctgacctgaagggctgaaccatatggaattcagaagcaggaaggacagagaacaaaagttggccaagcaagtctgtctgggtccttttgttgatctggtcttatgaagcaaagaaacaagagaggcaaaaccatgggcatgattttctaaactacatgaggtgcaaaaaatgcaaaacatagttgttggccttaaggagtgtaaaatagagtcagtgaggaagatttatatgcagaataggcaactttgaataatatagaagacatcagtcagtgtaaaccccttgcagttaatggtgtttgttttctttcagtgtcactagctataataacttaagagctcattttcttttcccaaggcctgggtcattagagagacaaggttttctcatgacctctgtcatttgcccagccctgccaaggtaccttgccacagagggcagggctgtggccaggatccaggtgaatgggttatcccattacagtgctagagtgggccatgttaggacaagcagtcttcacgactctcaggctcaaggaaaattatatgaaacttggaacccagaattgcctgtttgttttgacagtgggccctgtgcccttctctactcttaatttatgacagttgcataggcattatggaagtagcagatgtgggaaggactgtttaaacattgactttccttctgatactaatcaagttagttttggacacagaaattggtatgaccatgaattattcctttagcaaattgcgagttctttttccatggatttatcatgtaatacatgcacacacacacaactttgttttctttattcccttactgcttattctgaagctgtcattttggtatctttttcctctgcttactttgactttctttgtaatctttctatctaagtcctgacttcactcctttccctcagacaactcactgaaggctctagtctgagtattcttaaatcacactctgttatttttaaagtacaattttagctctgtcatgtgtgccatgttttctaagaatttatgggcatatttacatcaggatctaccagattttaacaaaataatcttaactcttttgctagtttcatttatgagactttcattgcactatgaacttcaactctagaaacagtggtgacatggctttgataattctggagcctttttaacagtctcaagtgagcgggataattttaaaacaagctgacctcccaagtagagtacctgggcagccctctggctgtaagtaaggctgtggtctgttctcttttcggtgtaggcggagggccatcccgcttcagagccctcacttcacacacaggatgttccaatgtggatgatgcaattcttatcacaaacaatctacaaaggattgagatatgtttaaaatcatttcctggagtttgtggtgatatgcactctttctgtttgtctaatctgaaggcctgttgcaagaacaatctgagctcattatgtgactcaaaaaccagagagaactgcaatctctctgtgtgatgaggactgactgggaattagggtatttccagttgtagaaatgtctttcattctaacaaggactagtgcattctttttccttaaagagagaggagaaatagaaagaacaagtgtcatagcaaaaaataaaaataaaaaaaatccacctatatatgagcttatagttttaactttttaattgagaaaaactttaataaagctctacatgtgttatgaatatagcattgtcatccacagatgtgcctataggagaactttaaataaaaaaaaaagtttaattctataacagacatcaaagattatgtcacgtgatactttgataataacaccacctggtatttattgagtactctttccttgccaaacatgtaatacccataattactctaggagctttgcaaaattattaccccctttacaaatgagaggagtgtgactcagaaatgttaagtaattaacctaagattacagagctgataattaataaagataggggaagctaatgcaaaatgagacaaaatgttccaaacgtacatatttttgtaagtatccaagaaggagagtgacaggatgtagttggcatttataaataatatttaaattttattttaacataaactttatgaagtaagagaaactttcagaatcttgaatgaaaaattctgttagagaatttccaatgttagcatcattggctttaccatcagctgtttcctgggcaaagatgatagttaccatccatcttttcatcctatcatagacaggaatttcttgtatgaatatactcaggagccggagcacaagggttttaccctcagcttccccaccactccctgggtgactttgggaaagtcacacaacttctctggagcagaaagtatgccatccttatcaaactggaatgttatgagcaccttgtg

SEQ ID NO: 44081 - DNA, 1686 bp, Homo sapiens
aaatgtttgagtcaagagatgagttacacaaataaaataaatgaataaataagcgaaaaacctgtttctcacggttgtcaaatgaccttagattccggtctgtataacatcgtccccagacgctaaggattaagttatgcaacatagtaaatctgacatttacagaagcaagtaggtttgaaacacacgacagactggaatttgctagaacaaacttgtgccagcagcctggtatgtaagggatccgacgaagtaaaataggcacctgtcactccgtgcaaacaactctttacgaaataattacaggtttgcaaatgatcaagggtgtagaaatccacagatgaagcacagttcttcacaagaattctccatgaggtgcatttctttttagattaaaattttagcttcatcaaaacgaataatctgggaaagaggtggtcataaaaggtggaggcgccttcagaacgagtccgtccttgctgccgtgagctgacaagagttctcggagaggacccgacttctgctggggcagtcgcagtaaagcccggagacaggaagggcccgggggcgggggcgggggcgcccccgaacccaagacgccggccaggttgggggctagtggggaggtccgactgaccaaggctgggtatgtggagggaaagggcgggagagacacgtcgaggagggctccgcacccaggcccgcacgcacacccgccacccttacctggcacagcggcaccatcccgcctaggacagcgggaccgaatcacggccgcaaaggcgcaggcgcgggctcacccggagcgcaggcgtaacccgacggcgctcagcccccgcctgcgcctgcacggagcatgcgcacaaccagctccgccccgcgccgggctctagctgtttccctcaggcggcctgttccacgccaggattagttttgcttcgcagatgggccgtggtggtgagaggaagcaatcagtatggaaatggagaaatggcttaccatgcatgtccttctccccaggagggaggtcgtggtgcaggcgagcagacgccagactcctggacacttgccgcctgcgttatggaggcttagctaataaccttgcaggggtcttcaggcttttccactggctcacctttaggcttctgacacttttacctacggtatgtgaacctcgaaaatttgagacaggtctcagttaacttagaaagtttattttgccaacgttgaggacatgcccgtgacacagcctcaggaagtcctgaggacatgtgcccaaggtggtcagggcacagcttggttttatacattttggggagacaggagacatcaatcaatatgtaaaaagtacattagttccttccagaaaggcggagaccgttaaaagcaagccccgccccccccaactgggggcttccaggtaggtaatagacagtagcattcttttgagtttctgataagtctttctaaaggaggcaatcagaatatgcatctattctttgtcagcaaaagaggtgacttggatagaataggaggcagatttgccctgagtaattcccagtttgaaggggcccaagatttttttctttcccaggtatatgattagtgtttcttaaagacagaatatccgcctggtcagaacattcgaactgtatgacttttcctgtttattggctgctcggtaat

SEQ ID NO: 44082 - DNA, 856 bp, Homo sapiens
gatacatttcattggtaataggaatggacataatttaccctgggaaacttggctttcaaatgacatgcctttgattaaataaaacacatacttttctttggttttagtgcttctgtgaataaacaactttgcaactctcttgtgctttgggggaacacgtcctctcagtttctcatgttgcctcacctttgtttgcactggactcaagctctgcaagcagtaccaggaggggtggtcagggccatttgtctacctttaaattgtgaattaataactggtaaaaacagaaggacaaaggacaagggcagagggcaaaatccctggctgtggttttggagagggtgtagagagagaaaagttggttggccttgtcatttttccccgctcccccaagctgtggagggtctctgagacccctctttgtgccttttacttacccagctatgtgaggcaggttcctggcctctgttctgagtggaatttgaagatagggccacacttatgctatgaactcttgacctttccaccactctatgcagaggaaagagtcctgcactggaagttaaagaaactgaagcttcctaaaatgagagactgagctacatgacctttggatatccttcaatgtccatgactctgtgagtctctaatgcaggagctctgcagaggcaagaatgttgctgtttcttttttattcagaaactctagaagcaaaattaagggtgaattttccagcccagggtatgtgatgcaggtcctctgttctgtattggcaactccttccttcttcctacactatagtttggttccaaaatcaaacattttctgagtgtgtacaaaagaagcctgaataccc

SEQ ID NO: 44083 - DNA, 821 bp, Homo sapiens
atatatataaagtaatcctaagaacaacatatcttgattttacagcctttctttttccttgccaagaaccctagagcattttgtgagagggtattagattcctaatgagcagtagcaagataggaggtgtttccacagtctcttggaatttcgtgaagaaagttaaaggcaatgaagaggtcaccaaaggccacagatccattgtgtaaagtctgtattcatgcatattttatagacaggtatggtaagagttagaaatgttacagttctgtgagcttttggctcctaagggattgagatgggccaaaaatgcaggtaaacaaaataccagctgaaaattcctctacaagaatgctttggaatatcacacctggattttggctccaagccaccacaaacagagtatttgggcttactggcattgaaacaagaatatctgtgggagtaatcagggggagtagatggcttagggggctgataatgggatatattttgtctcttatcttctggctcaaattcagcccaggtggaaagtgactaaaaatggctgcctcattgtggcctctggtcttggtaatttctactcaggtctgggtaaacaaagatccacctccctcagataaaaggctcaaaagagaaacttggagaaaatgtctaacagatctgccaagaactcaatgggtcataaaaaaaaaaaagaaaaataataataaaaccgaaagaaaaaagagaaagaaatgggggaactaaagcttcctcaccttaacaggtggttagaaactggcacaagagccgttcttgcagtaaacccatctggggtc

SEQ ID NO: 44084 - DNA, 8575 bp, Homo sapiens
gtaaattcttcttaccaacccacaggttgaccacttttcaatgccaggcctctgacatctcgcctggcaacagtatctcacttcttaatttaccattcagcatcagaaatgagacaggattcatgtcaaattaaaaagtggggtgacaatatgatggatgatcaaacagcaattgtatcaactactgatggtaatattaaataggcaaatacctagagaagaactagttattaagtgtgcaaaccactgctactctatggaaagctaaaataagggaccagaaaataaaacataccaaagtaactacagcatgctactcaccttcagccaatgaataatccaggaaggtggctcttactttgattgacacgttgtttccaacataaagtaggggaaactgaacagcaaatcctagtttgccctcctcacaccttctatgcagttgaaagtgtaaatggaatcagggttaaaagtgctaaaggtcacacacagatattttcagtcatatccaaatatatgaatcatttatgttgtcaaagcgacctaaaatactttagaattttctattaatccaatgtaacatccccattctaaggcataatttgaattatttactaagatttattttaactacttaattatgttgaacttgaatatattaatatggctagtttaagtgactatgtgacaactagcttagctgacttctggaaacccaaaaatatttctaaaattaaaggggaaagcaaggcaataaaaatgttacacagaaacaagtagtatcaaaaaggaagagctatccatgattgatcagctctgtataacaccaaagcaacactgaaaagagaaaagttcaagtaatccgttgttttctcagttatatatatatatatatatatatattacataaaacatatttttctaatgattttttaaaaccttaattgaccggtagtttggatatcttgggtaaacattgcttctacgtactcacatttcttaactttttagttctgtaatgattcaaccaatacagaactactgcccccatccccctactcaaatccttatgctagcctatgaagttgcataatgccaaagactatgacacattaagtaactgttttgtacctagaataaaatctgattttaaaatcattttagcctatttttcaaatgcttaacttttgttgtttaatcaagattgattatttgcacttgaaaatgtattcattttgcaaaacacctaacttcaaaaaaagcttgacatttaatcttaaggcaaaaaaaaaaaaaaagctactcagttcatgactttcaaatagtctctacataacctcaccccactccctccatattctctttttaggtactgaaatttaaccaggtcagttctggtctcaaataacaatgtcatatgagtttaaatagctatctagggagttagattgaatcatttgctaaactctaatattttaaatttataaacttcagaaggaagacagcttttgaagctgacaaaagaccaatcagaaaacagtagtctttttgtgtgctgcccagaaattcagctacaaagtggtcctattgtgtttctcataatttacatttttatttggcagagcagaaaggaaaaataagaagtcaaacttggaggcatacaacaaaaatgaaaggcgacatttttattttaaaatgtccccttgacatttagatatctacaaacccaatatttaacatttacaggcgatataacagtaaaagaaatagcagctgtttttctgtgatgtcactgaacaggtgtggtaccatttcataccacagaaatgggatggatctcttgctgatgcccacagaaagcctataaggaaccagtattgacctgtgtctcatttcctcagttatgatctgaaaataaccctagatggcaagagtcatggtgactgatctgtgctgatttggagcagacattctcccaaacagatcaatactatccaaggtgcagctgaaaaacaggatgagcttgtatcactaaacaaacaccaagctgcttattcaaaagggcaaaagcaacacagcacttatgttttccacagtgtgtttgccagtgacctcaaccctgacctgcagggtcaccttctctgggacgagaagtaatcctgtgttgggtcaccctctggtactgagggactcctatttgtggtgccattttttacaatgagagctactgtgtctgctttggcttagccaagacaattacatgatgccaaaacaactagtcaaggcagtcaatttagtcaaatgactggtctgagcatttggcattacatagacaaaaaatgaaatagaaatgaaatttttacttttacccaatcatactggaattgtgaggatacaacttaaattaatttagaaagtttttgtgacatcagttgtttctatatacataaactaaaataagtatctggacaaactaaatagttttgctcaaacatggaaaattttttgactagcccctccaaattgcttctattctaatcttcatttagctacacagaccttcccccaaaaaggtaatctttgtgtatacttgtatgacccttttacatcaacatgttatatgtacatataggaatgaacaaaattaaaatctaataagaacatacaagttatatcactattctccttgctatacggttataaaatatgatgagattatgaactttaaaacaatcttcccaaagatattgagaaaataaatatggattaaaacgtgattctatatttctccaggcaagatgacttcatatacaactaggcatataagtaaaatttaaatattttgtatagtcctagggtggaaagtctaagaaaaagaccccagtttccagaggctactggccaattcaggaccaataaatatatttaaactggagacaaatataaaatcatgtaattatgtatgatcattgatagcattgctgtaagatccagttacttaccatctgagatcttttatgcatttggaatgtttatttttcaaccttggatatacggtttgatacctctaccttaaaaagaagctgtgtctcttgctgccattaaaagacagggtagggggaaaagtcaagtaacaatacttgttagcttctctttcctttaacttatccctgggcaggggtgggggaacctttaagcagagaaaacaaactttccctccagcacatcattgtataaggactataccatttctctgaataaagaagaaataaattcagctttggaactctgccattgagtggcggctcctgcaaaggggacagtttgctattaattgttaatgtcgtctgccattagagggcactaaacaactctacattaatgagttggagggaagagagaaaaggagactggaaaagaaagagagggagaaaagggagggagagtacgggtagagtctgggtagagggagggaaggagagaagaggggaaggagtaggggaaagagagcagagggaatgagttggaggactggagggaaagggagaaggggagagagacagcgagacagaaacagacagaatgattctggaaagattaagaaggatgtggagcccccacagccgtctgaagtgagcaaaatccagtctcccccgggccgcccgagcccctcccctcccgtcctcatgacggtaattataaagcgaaaagcggcggcgaggtcacccgcttttaccagcctgctgcaccgaatgcgcgcggtgcaggtgcggcggccgcggggctttgtgattcatgcccactttcaaaggggggcttgggcccgtctgagaggcacccaaacaactgtcttctaatattagcacggctgtatttcgggatctattatagtctgtccagacagatcccattgtaatgggatcttttattaaaagattagcactatctcctgcagttggtggaaaaaaatctgttatcactgagttatttgcagttgtggaggggggaaggttgacggaagatggggggtgggagggctagaggaggactgggggagggtctggcggggggagggcagttgcagggggggaagaagggcagatttgaaattcgtagaacaaatcccagtgacctgcgaatgtccaagaattttgtctgcatacttcgctatctgttgtccttcgggcttcagatgcgaaaagaacaaatttaaaaggcagctttggaataaacaatatagcattttccgtgaagtaatcgttttatataaaaggaaatatcgcctcctcagtttcattcagcggtgccaaaaatgttataaatgagagacccgccaactttcagcgaagaatgccaggcactgtacttaataaactgaggctacagaagttcattatggatgttgcaatcttttttattccgcgaaaagagagaagacgagacagaaagagagagagattggagccgaggagactgagagacagacagaggcacacaggacagaaactggggagtctccaggcgggagaggaagggggggccagaccgcctacgtcggcgcccccgctccgggctccgactccagacgccgcgaagtgaaaggggagaaaagaaagggagagggcgaggctgtgccgcggggagaccgggcctgaggtgttaaacatttttgtttgcttccgactagtccagacgaagggccgcgtctcggtagcgctctgccagggtggaaggtgccggggccggggttcctagcaacacctctgggctgggggtggctgcaaagtcaggcactcacagacccagacacaaaacctcgcgggtcccgcgcccaggctgcgggtgcccggaaccgccgcgaggccggcgcgctccgacccgacccggggcgggatatttgggcagcccggggctcttcggccgtttgcaaaagtctctttggagcggaggagaggcagcacggagacaaactcccgggttccccccgccaccgcctccagcgcccccaccgcgccctccctctcacactcgcgcgcgcgcgcacacacactcacacacacactcacacacacacccgccaccccgggcgcgccggcgctgccggcgagcggcggcgagcaggacttgaagtgggtgttcttccccactccccacccccgacgcgtagcccccaacccccgccccggtcgccttccccctccctctcgctcctacgcaaataagaactcgacgattcccttccagccgttttgatttcgggcacctccgaaagataattgggaagggtttccagaaggtgggaaatgtcacctgattcacactgaacttttgaaagctccccacccccaaggagccgcgcacaccctcgctcgcggccgccctcccacagccccacacactgggagaccgcccaccgcaaaccgcggagacccccgtctagatttaaagcgcggctgcgcccggcttctgacgtccattgaatcgcgcgggcggccggcggcgagcgcggggctgcgccgggatcgctgcgccctccgccgctggcctctgcgacgcgcgccgctcgcccgagccacccgccgccgcgccggctccccgcgccgctgcgctcctcgccccgcgcctgcccccaggatggtccgcgcgaggcaccagccgggtgggctttgcctcctgctgctgctgctctgccagttcatggaggaccgcagtgcccagggtaagcgagtggggatgcgctggggaggcttggctgaggacaggggggtcgacttttctgtggtctccacttggtctgttctgagcaacgctgctctcggaagatgttgaaccaacttggggactccgggatggagaggagtgggaaaattgtaggcaatgacactttaggactgggaactgagtttggagctcggttatcttgaaaaaggaaagggagcgagctggggtcttagtagttagggttaaatgctccaagttctggccatgataactttagatgtgatctcctctgtttggctctgaagaagggaacaagtatcagtagtagcctggagatttcagtcgacccatttgcagtctcatctctctccctcccacatcttttggatacttaaaaaaaaaaaaggaaagaaagaaaagaaaacctgggggtttgggggagagatactgaattttatttggtggctgggggacgtggtttcagaaactttgcccaaacttggaaatgtgggtgctgaagattttcaagggaagtagctttctgcctagtggatgcttcttccaaccccatcccccattctcgcaaaaaaaaaaaaaaaaaaaaaaaagccaaattattaccccaaagtgctttgagcactttacagtttttttcccctctgcctcattcttctttctgacccttagctttctgtaaaacagtgagcagcccataactgacttaaattctgaaatgggttaagagcaaatttctgaagcttgccttttaaaaatagatttgtttatttcaattagtctttgggcagaatgtttaaaataataatagcagcttgcgatccaatgattgttaaagtcatattggtgattcatgagaagtcttctcgacccaaatccgaacattaaaaagggggaagagggagaaatcacttgcaaatatttcttgctaggtatgagataggtacttataaccgtgaaatggtaggaagactcccccctccccccaccttaaggcattactttccctgcttcagcgttaacattttaagtatgttgtaaactgccctcctgggcactgcccctcgccgtctgcatggcactgcgctgggttgcccgcctttagaggagaggctctgcctggtgcccggacgtgggcgcggaggaaagcagccctcggagatttcgaaagatcgcggtggccgcgggcgtgctccggtctggcggattgcaaaacgggcccgtcgggctggctgcgcctggaggccgcgcggggtagctccgggctgggccgggttgcttttttgctttcatttttcagaagtgccttttgcttgatctgtttctctctctctctctttcttttctttcttcctctctctctttctttcttcctttttttctttctttctctttcttttctttctttctcttctttcttttctttctttctttctctttccttctccctctctctcccctccatctctcctctctcctctctctcgttctcttactttcttaacccctgtcacaaataattcctgtacccgcctacatgaaaccagcatgtaaaaacatccgtcgcatcctgtttttgtcaggttctttaatctgctcttcgagtctctgcaggttatgaaatgggacgaataaaagtaaacagtctagtaaaagtcaatgcaagctgcacgtgttgtgtctgggtcactggtaactgacattgatatggctggggcgccctgtcttctccctctctccctccctccctctcgcccacctcccatctctgtgatcagggcttccccctccactgccttctttttccacccctccacccctttcgatttatttcctacttttctcccgcgtctctctcacttcccctcctccacgctcaccccctccccatccccgccgggtctccttcgctagccacctcgctctccctgccctgccaccgctcactgctcactcacccacctccccacccttgtctcttcacagctgggaactgctggctccgtcaagcgaagaacggccgctgccaggtcctgtacaagaccgaactgagcaaggaggagtgctgcagcaccggccggctgagcacctcgtggaccgaggaggacgtgaatgacaacacactcttcaagtggatgattttcaacgggggcgcccccaactgcatcccctgtaaaggtaggactccttcttcccaacttgcaggccctcagtagagggcgtcttacccttagcttccccactacctgactggggtttgggagtaggagagctttgttcctgggcttccccttcctgtcccttgccctggtaagccgtgcagactctaattctgcctgttacaggctgtagggaatacacgccagacttcttagccaagtgtggtggtgaaacccaccaacctgtgctccttaatgagagagatctgggtgtggggcacagcccaaggtccacactctttcaccaactcccaatattccaggagagagcctggggcccctccagcgcaaactcagggctgcatgattgcgcaaggcacccgaagccctcctggctgacctgcagactgcctggctctggttttaatccatgcctgtttctaactcacagaaacgtgtgagaacgtggactgtggacctgggaaaaaatgccgaatgaacaagaagaacaaaccccgctgcgtctgcgccccggattgttccaacatcacctggaagggtccagtctgcgggctggatgggaaaacctaccgcaatgaatgtgcactcctaaaggcaagatgtaaagagcagccagaactggaagtccagtaccaaggcagatgtaaaagtaggtccta

SEQ ID NO: 44085 - DNA, 2034 bp, Homo sapiens
atgtacttcagtttcctcacctacataatcacaacaaggaaagtctctctctcattacaatgttgtgaggattaaaagagatataatgtgttaagtgcttagattcatgcttggcacttaaaaaacagtcagaaaataagtgtcctctaatattataataactatgattaattaaagaaaaaaggtggtataataactcatcaatcaaaccttaccttgaaaatgcaatgaatgagaaatggtagaggaacttcttcagtagacagtttgtataatgataagtgagccccagttctctgatgctccaaaggcagccagaatacccatgccactgttagggcttcagggaagccctgttcccccagtatctcctgggcagaattctcacatataacatatatcaacatataacatatatcaatcgagaccagaagcccaagcggaagccatttttaaaatggaaggtaagcgtacttttaaagtattttatccatgttaatatttaataaaacttcatgaagttctaggtggtacggcaaaagtgtacctttcaaaataaaacgtttagatatattatttcccatgaaatttagaaaaaattcactcaccatctgaaattttcaaagccacaaaatgtgtcttttgtccttcaattcacactctcagcacaattcctggcagtacaataaattaactcagtcttctttaattttgatacaatttcctgtaggaggactatagactcctgaagataataacaggataaactattcccaaactgtctcaaaaatccgagtataaattgtgcagttgccagatatgaaacaatgcatatattatacaattaataaacttgtttattagagttttcaaaacctgggtcctaagagtaacatgtttcccttcttcccattccattttccattcagagcagccacacaattcttcttcagccaaaagctgttgtgtaaatagacaccaggcatgcctgccctatgtagtcagtggacctgcccagacatgtccaaatcccagcttctattttgctggaatccccccatgaatactggatggttcctgggttttgccatccttagacctcagatatcttggctggtatcaccaagattcctgtggcagagtccttcagacacatactctttggattagaccaaatgtagtcctggcagtgctgtgtcatttttctattttaagaaaatggccagggaaccaactggcaaggttgggagccagatacactcccaccaaataaatatctgttgtactcattccccaaggactcaagtctctgtctaaagagcaagtatacacttttcttaagaatattgggccctaagaagttgttagaggcaaaagtcacaatcctggtgagaaagagggggctctacattgattccagtttggaaaaaaaagatcttgataaatttctttttcagcaccaaaaaaaaaaaaaccaatgggatgataatggtcatagtacaactcataagcaatgataacaacaaaagaccaagatgaaggccagtctctatagtttctggagattgctgtgggcttatggctcaaatgacagcaggttgcagaggtgttagattattcaaaaggcagcaacacctgggacttctaagatagagtcagtgccccaggagaagtcatcaaatcggacttaaagcactttcttcattgggcatgtggaaccagagcccagtcaatacaattcccaaatagaaacagtgctgctgaaggtgtagtgcctagaccaagaacaccagaaagatctgggagcttgttagaaacacaagttcttgagcactatcccagaaccactgaatctaatttactagggtagggtctgggaatctatgttttaacaagctctccaaatgattctaatgtgtgttaaggtttgaggaccactactctagaatcatttcaagctccaagtgagccccagttccctgatgttccaaaggcagccagaatacccatgcctctggtagggctttagggaag

SEQ ID NO: 44086 - DNA, 1151 bp, Homo sapiens
aaagtactactgcaggttctcaaggacccaaagagctctccagcttttccagtgggttcagccccaaatatcctaatttcttcaataaattacgagttgcaggtgtttaaatatgcaagtatattttggtcttttcgttatcattgtaaaacaccagtcctaacaagcagtaaagattacactttatggtggtaatatttacagttaatgcacttctgcatttcttcccgcacatttttcttcttacttatttaaactaagcgtttcccctctttttttaagccccagtattaaaaagaaaataaaatcccaaagaatttcgcaacattgcgattgcactggcttgagaacgaaggaagttagtcccttgcggtgatccgtcctttcatcctggcgtttgcctgcagcaagatggcggcggtgtcaatgtcagtggtactgaggcagacgttgtggcggagaagggcagtggctgtagctgccctttccgtttccagggttccgaccaggtaatagaattttcacacttttcttcaagcttcttgggtccctccatttttgcggagtctctgctggctgagttccggaggaggcctcggggaaggcgtcctctgttgacccttttctcgggagaagtcgggcggactagggactgtctgctatcaatgggcgttggccaggcgagtgagggcgtgagtgcgaggccggggaggaggacctgtggttttctggaagctttcgtattcggcttgtcgctgagggagagggtccgtggaggttttgcctccggagctgcaagctgaaccttagccctcagagaaggggaggagtctcactgatttctgtttccactttctgcatcccttccatttgtcacctgtttgcccaccactccagtccttacagaagggttaaatcactgtatcccttccatggttttaagtggttttaatttggtttctgcataggaagattgtttattcatcagtctgcttgggaggaaaacttgtttggaattcagtgttagtaaaaatatcactgctagtaatattggaaggtaatttttaaaaggctggtggtaatgcctggaggttttctagggattttgttaaagcctcacaataattcagggattgaattgagttgttgag

SEQ ID NO: 44087 - DNA, 798 bp, Homo sapiens
cattatgtgtcagaggagctaaataacttctataactcagaaacagactttttgtttttaatgtagagaaacttgtttaaatgccaagagtcctctgggcatatatatgaaattttaaaacactacatgtaagagtgaggagagatgagtaaccacctaagacagaaatagtgagaaaaggtatctagggaaaagaaggtgtgtcttaataaatatcaggcagactgtgaaatgtgtacatgaactgcattttagactctatctctttaagtgttaatgcattgcgactactaaatgcattattaaaatggtgccgattgctcaaacctttgtacccaaagcactggattatgttatccaaaattttaaaaatacaaacaaacacttttcataacaaaagttctctcagacttttgacctctctctttctggcattacacgaagctagaacttgcaggggttggagaatgtggcctctgatcactaaccagggttttctctttacactggcttgtttacttatttcttcaccaaagccagggaacgtccctttagctactgcagcatttctaacagatgcgacaaatcacaggggtgtattttgactgctactctgtcatgtgaacaagagaaacactgaaatcttttcccagtccctgtgcttcatccttgttttcccaaaatgtttgtaaactgctccagagaattcttcttttaatatttgagtcttctttcctctggtagattaaaatgttaatacttacgttaataagataaaatgtcattaactggaaatca

SEQ ID NO: 44088 - DNA, 1162 bp, Homo sapiens
aggatttggctataccacaagttatataacgttcccagaaatgtaactgctgagaaacagtcgaaatgtggttcactataccttacctgtaccaaacgtggcactcctacccccaataccagtattataaagtagttccctggtcagaaaacacaaagcatacctttaataattgggacaaacacacacacacacacaattgggccaccatttgttctaagtatagttgcataacaaagctgactgctttaaaagctggactaaatcatgctgattgcttgaaagtccagactacaagaacattggggctaagaactgtattttcttcataacctttggctaaatttgtcaaactgaactccaaaattctcctaaagattctagttctgtctcctattcatttattgtagatgttaaagtgtgactagatgcacgtcatatcagatacagattgtttaaacaacatgtgacggcaattctattatgtgtcaaatagagatttttggtaagcaggcaatcatttaccttagagcaaacaagttagaaatcaagaaggaaaaaaaaaaagccaccttaacatggctatcatttcatttttggctgtctaatctttaggtcatagagagagtggggcagagcttgccaaggttgcaggttcagacatagagagagtggggcagagcttgccaaggttgtaggttcagaaatgacttagcatttaccccccagtcaacagaaggcaatgaattccagtcaccatttctctgtacaattcctcagtggactacaaagagccaactcacttgaaggaaatgctaaaaacagaataaaagagtagtcaccttcaattgctcttagttttctctttctgtcctacttgattggtatttcctgcattacctatgactgctttctttcctcatggaagggtacttattagaataagattatatctgtaataaaaagaatagttcaaaatatctaaatgttcagatagtccgtgtagactggttataaacagatctgtaaaaaatgactaaattatatattcttattgattgaactagtatgtattaagtcctagaaaggagaaaagaaataaaagtattcatagttcttgaccataaggaacatacaattggattaaaaatagaatgggctg

SEQ ID NO: 44089 - DNA, 1423 bp, Homo sapiens
attacaatgcctagttatttatgtctcacagattatatagtactaaagaaagttacctgttaccatatgtagacacttgtggttggcagatgtggaaaatactttaccataaagatcaaaattggcttaaaaattgacctagcatatgaacgtgatttatttatctccactcccctcccccacctctgttttgtttgcttttcctgtggatgaaagaaggaaaaatagaaacttctaaagagatatacagctttccagagtcaatggtttaatctaagtggagtcagctactgaactttattcagctggtttctccccagagcacgtcttcaccgaagtttctgtttgacctgtttcatttccttggaaaattctggcattaaatgcagctattactggtcttaagttagaaacattcttcttgcttgattttttaaatatgataatcaccttaattttttaatataataagcaccttcacactcatcctatgtttcatggtactaagagaccttcggacgccgcatgctagttccactttcctacaagtttgtttactagtgaaattaaacagtcaatcccatttatctctgaaatcagcagtgtcccctagcaagagataagagacaatgtgtgttgtataatttactgggaactaattcatggtgaccaataaattgtgcagtcctcctaaagcaccccctttgccgtggtgagatccgcagtgccgactctcgtcctggcactaagatagataagtcctaagagtgaaatcagtagacatgtgtcttttttttttccctttaattctgaataaaattccagaatttagggagtgaaaaacacttccccaacccccgccaaaaaaatctgacattttctttctgccgaaagtctaatttctctttccccaaattgcttcaccatatggaaggaaagaatctccaccttttatcttcaatctgtatcacagtttgggcatatacgagaattttgtgttcacttttaattttcttgctagttaagaacaactaacaactttcttgtatgttaggactcaaaatacgtacctcaagagttgtggtacatttcacacaggtcagaagacaagcattatggaaatgaaatgattttatgatgactttgctttaataggggttttacacaggggctttcctgggaagatgtccaggcaaattgtgtccaaagcccagaatgaagggaaaattcaccttgatgtaacatagttgaagagggatttgctgatttgtcattttaaatgaaacacaaactccaattccagcccagttatgagagcattcctttgtcctcttacttaagggatttttctttttcctttctttcctttatttctttcaaatcctacaatttgagaaaccactcaagaagatggggtgtgtat

SEQ ID NO: 44090 - DNA, 1630 bp, Homo sapiens
caaacaagcaactctggggaaatataatttctggaacaaaacatggtgctcgcataattccacaaagacacatagaagtccatttttaaaatgatgttcggtcccagcactgtgctgacacttttcccacctaaacttctcagcacaagcctggcctaaacagccgggttccaatccgtgcacagtggaaccgcggcacgcacccaagaccggaatggtggggctatacctgtccctactcagtcctgttcgtgccagcctgcgaggtagtttagacccgtctgctttatggtaatgtgcttttaaaaccccgccacgaccgaggtcatagctttagagatttaataacaatcaaatgaccagggctgctgggcacttagtgagccattctggttatggctctttaatagcacctggagttctgctccagggagagaggaaaactcctgctcccccggaaagaaagtcctctgcggagagcgcagagggaagccaggaagccgatcgcgggcaggggacgcgccgccgcggccgccccatctctcaagcagccccagcgcgaccctcgccctgcagccgtgctggcccaggccgcacctttacctgtcagctccaccacccacccgccctggaggctgcccctccgagtccagggaaaggcttaccagccggctgcgggagaaagaaccccagaggcatcctatcccaaagaaagaaagcaaaaaggctgctcctcaaggcagggggccatcgggcacgccgagatccgagaggcgacatgccacccctgccctgcacctaccagataatccatgtacagaaacgcctcagttattcggagatcagacatccggcagcctaaagcatccggaacggctccgaacccggaaaaaaaaagcagcgtctctggctgcgagcgagcagctcctgaaaaagccagcaacagcgaaaatagccgaaagcagccgactagccggagattacacaaggggcgcggcgattggccaggcgggcgggcagaaggaaagaagcgtgctcattggctgcggcgcctataaaaggcaggccccagctggtggcaggagagaaacgcgggagtggtgggggatgtgggttcctgtgtgctgagcggaggagccggggtgggggcggtgcaagcggaagaaagagccaagagagcggaaaatcggctggtgctgtcgccgcccgagttttgtgtttccacagctttccagttgggtacaacggagccgaactccgtgttcccgggctggagagccttggtgtccccgccaacccccagtaggaagcgagcgctgtaacatgggaggcgtggtcgccactgatcttgtctccccccagagccttcctaaaggctctgccgccacgagactgcaccaccgggaaagaagtgtgtgaaagtgtactccgtaaacaggcaatcctgtacgcgacttaggggcagaaagaccctccgcacttttatcatttgaaagtaaggtggacgattccagcctggtgtccctgagggtacacacaggccccccgcgcagccagaggtgactcaggaaccccccttccaacccctgcgtagaacgccgaacagtcttcggagaattcgctttcctcc

SEQ ID NO: 44091 - DNA, 2111 bp, Homo sapiens
cagctaggtagtgtcagaacacagattgaaattcagaagcctggctccgaagtttgagctctcattcaccgcactacatatatctatgggaggataggcgacacatgcatgtaataaatgtgtgagcatttattgtactggaaactctccagctcctccctctctacatgatcctttgcttctaattttgtcaatcacagcaccttccctggcccttactttgttcttgccaatctcctctccttgagcagaagagggaagggagcctgctctgtaggtgaacagctcctccgcagaggcatcctgttttcttagtgcaatcactaattcgcattgcaaaatgctttattacatgactgggttgccattctaggagcattcactgagcgctcagagtgggaacgtttatcaggcatgcaaatgctaacttactttctagagaatgtttaacttaaaagcctaaagaaatctcagataattcacttcggagtagaaacctccttcagccgcgctcactacggcgcccggcttcgcggcaccggccactagagggcagtggccgccgcaaagccgacgcgggcggtgggctcggcggctcggccatcgcttgctctcgcctggcaaggggctctcggccgtggattagcgcagctggagacgtgggaggccgcgggccccgcccccgaccggcggcggctgcggcggcccagcgcggcagtcggcgctgcgaagtggaggcgctgcgagcggagccgcgcggagggcgcgaccggctggtccgggcagcgtgggtttgccgccttcggggctccagtccgcgcgccagggctcgagcagtaccgcgggcccctcaggtgggcctcggctcgggacgccgggagtcgggaccgccagtcggggcgccgggaccatggcgctgcgcgcccgggcgctgtacgacttcaggtcggagaacccaggagagatctcgctgcgagagcacgaggtgctgagcctgtgcagcgagcaggacatcgagggctggctcgagggggtcaacagccgcggcgaccgcggcctcttcccggcctcctatgtgcaggtgatccgcgcccccgagcctggcccggcgggagacggcggcccgggcgccccggcccgctacgccaatgtgccccccgggggcttcgagcccctgcctgtcgcgccccccgcctccttcaagccgccgcctgacgccttccaggcgctgctgcagccacagcaggcgccgcctccgagcaccttccagccgcccggcgcgggcttcccgtacggcgggggcgccctgcagccgtcgcctcagcagctctacggcggctaccaggccagccaaggcagcgatgatgactgggacgacgagtgggacgacagctccacggtggcggacgagccgggcgctctgggcagcggagcatacccggacctcgacggctcgtcttcggcgggtgtgggcgcagccggccgctaccgcctgtccacgcgctccgacctgtccctgggttcccgcggcggctcggtccccccgcagcaccacccgtcggggcccaagagctcggccaccgtgagccgcaacctcaatcgcttctccaccttcgtcaagtccggcggggaggccttcgtgctgggggaggcgtcaggcttcgtgaaggacggggacaagctgtgcgtggtgctggggccctatggccccgagtggcaggagaacccctacccgttccagtgcaccatcgacgaccccaccaagcagaccaagttcaagggcatgaagagctacatctcctacaagctggtgcccacgcacacgcaggtgccggtgcatcggcgctacaagcacttcgactggctgtacgcgcgcctggcggagaagttcccggtcatctccgtgccccacctgcccgagaagcaggccaccggccgcttcgaggaggacttcatctctaagcgcaggaagggcctgatctggtggatgaaccacatggccagccacccagtgctggcgcagtgcgacgtcttccagcacttcctgacgtgccccagcagcaccgacgagaaagcctggaagcagggcaagaggaaggccgagaaggacg

SEQ ID NO: 44092 - DNA, 1128 bp, Homo sapiens
ttttgaccaagatcacacaaactaaatgatggagctgagattcaaattgggatctggctcaagcctattatttttaaactagattacactgaatgtgatttctctgcttttcagaaatccctaacatcttcccaagtctccactcctggaatgatagagattccatcattctttgggcactgggcacaaaagtacaaagggaacttcccagaatctgctgtttgcacccatttctgctgggaaaggtgagagtctgtgctgctatgtctggtctctcaacagaaggtctgactgcagtcttacgtagactgggaagcatgccagatgttaccttccagtattgttatgaagagtgagagaaagggtccaaaactgactgtttccccttctctccaactttcacctccatgcagtgccaatagaagcacattccagttgccataacaatggccttggcagaaccacaagtcaaaaatttgaactccagttggtcagagtcagggttactcatgagtaccacttggccacaggtgggactcaggtgagagcaacagaatttgctgagtaataagctctggagagtttgaagagtggtggggtagacttctaggcagcgtatagagggatgctgctgtgctagggctccatgggcaggaaaccagaaaaacccagcagtggaagccaggcctctgaggtgggggaagttaatctgggattggctcatggctatagcctttccagggatcacaagtcctccctacttggccctgatcccaggatgtctcaatcctaacatccctgtgtcagagcttctcaaactgcctgcctgtcttaaaggccatttcagcttcattgagtgacttgtaccagaagcatgccaaaggcaagaccaattgtccatgtgaagccacctgccaagggagcttaaaaacaaggtgtgtggtattttgttgctgtgtgtcccatcagcctaccctggaattgatctctaagtctgaagtggccagatgcatcagaccttatttttgcagtggtttaaattttctctcactccaggaaatggctctcaggatggaattgctgagttgttgagcttctctgcaagctgacccagcatatcagtgagaa

SEQ ID NO: 44093 - DNA, 660 bp, Homo sapiens
cttagtctctggggactccctccaccttcagagcccactggtgctgatcgtgcctggggttcctgatttggaatgttctgtaggactgagaagttgctgctgaaagggaaagcattggtttctgggtttgggaacttctatccagtttaatgagtgtcttcttcactgatgcactacttgcttctaaaatttccttataaaccatgcatatcatgcttaactcacccttggctctattcaaacacttttgtgtgtgtgtgtgcaagtcacaaggtctgttcttttcagttatggcctcgcttctccccactttcccttggtttctaaagtctgaccattcaagagggcaaagacctcatttgtcatgccaagatttgtgtttgtgctcttggcagaatgtgttgctaacctttgaatactatgtctctgaaggaaaaggatgtgctttagtgacacactttatggtaggaacttcgctagcagtggtagaaacaacattggcagtccacctgcccaaatctatggtttggacacacactcctttgccaagctatagggatgcatagatgttctgctccctgccaggcaaggatgcaacggcaccctggtccccacattccaggccctcaatgggaacccctacttgactcattgctcttt

SEQ ID NO: 44094 - DNA, 538 bp, Homo sapiens
ataaaatatccagcactcttagaatgatgcctttacctggtcttgggcctagccataaactgtgggagattctggttgctcaatgctggctaaactggcagcattattctgcctctggaatcccagaaattgtcttagagaactttgcaaggaagattatatgaaccacttttttgcttgctcactaacaaatatttagttaacaagcgtctgtgtatgcagcagaatttggccagtggcttgctttgttcatgattgtgtaacatttgtggagaagaatagctagcagttctgacttaacaactcctaggttgcaatcatccgcacatgacctatctggctcgggtcagttttcaacacccactcactggagtgtgtccatactgcttccctattttccaggtggttcttatctatttaataacaacttacttcttcaggagaaatagactatgcattattacattaactattcactctgattgtaaaaccacatcccaatttcaaaagtattaaaagattaaagaaatgtgcatct

SEQ ID NO: 44095 - DNA, 2248 bp, Homo sapiens
ctgagccaggggaggtcgaggctgccttgaattttgatcacatcactgcactccagcctgggtgacagagcaagaccctgtctcaaaaatcagtcgtacaaacgtaaaaacctctcatttgacgtgtactttatgcgttagggcacaatacactttgaatacactatctatgattctttttctaggtggagaggagaagaaagtgcaaaccaaaaagtgactgaggcagatctcaatgaattagaagtttattttgccaaggctgagaaagcacccaggaaaaacaaacacagctcatagtagaatttgtgacctgtgctttttccaaagagagttttgggaactttggtatttaaaagggaaagagcaagcaggagggaagagaaaaaagtaagcaacaaggcaagtggttacattcttgtgaggttctggttagtgcttggtaaatctacattttacacatgagtagagaaaagtcaattatgcattcatctggggcccagtaaatctacattttacatcagctaaagtaagcatgtgaaattacagctatttgtttgggaacaaacggaaggcggtttttatgtgactcatttgccaagcttaactttctctggcatagtgagtttggggtcctgggattctactttcctttaacaatggttttgtccttcagtttttcacctctgttttataaagagctctgtcagttaaggaagcagatgtcacaggcaaactggcatgattttgcaagggtttatttacagagtgactccttgtggagctgtggacatacaggaggcataagagatggtgcattatcccagggcaaatatcagcagagctgctgtcatccctgggtctggagctttggggaaggaagcagctaccagaacctggaaggagagtcacatagaggaggctgccttgagagaagatgtcatcttcaactgggggatgcagtcagcctgaggtaatctgttagagaggtgtcagttgagtgaatatgctgaggtcactgtcaacttccttctgtttctctgcacggcctcccacttgccaaacccagccagaaggcagagagtattggagcccattgatgtagcccatcctgccttcaggcagacagcagatctgtaggggaccacagaaaatatctgacataagaatgagaggtgacacaagaacagaggcgttgccgtggaggaggagccagacaggaaaagaactagaatttggctggtacattggttgggcagagtagccataacaaaataccatagactgggtggcttaacagaaatgtatttctcacagctctggaagctggaagtccaagatcaaggagttggccaacttggtttcttgggagtcttccctcttggctggcaggtggccacctcactgtgtcctcacatgtttttcttctctgtgcacatgcattgctggtgtctcttcttttaacagcagtcatattggattagggccccactcctcttttacctcatttaaccttaattacctctttaaaggtcctttctccaaatccattcacattaggggttaggaaggggaacacagttcagtccataacagttggcgataaggtttacacccccagtaaatcctttatggttgctatgagtatgaattagagtagcccatggaactcccaaagtctctcattctggtgtgactgttcatcacactaacctcctttttctggtattggatgtccacttctaaccctctggccacaggcactctgacctgggttattgatttccaggtgctaactcagagaacttcattctagtctagcatttcattcagtcctatgagtaactttgcgttcttgccagcattgtgaatcaacaatctccctttttactaagtctatttagtaaaatttgagttgggttcttgccaacttgtgtccccaagtcctgactagtcctgaccagggataaagggcacttatttgtgagaattttgttctagtagcaggaaaaattagaaatgtcattcttaagatttgaggctagttttctaaaatagcaacagcttatcccttcccctagcagataggtctaccccttcaaggaatctacagagccagggaggagacacaacatccctgtttagtgaccactgcagccagtggtgatgtttctcaacagggacctttagaaagatatcaagcacaacaacgttactgttcacattcagaaaaacgagaaagtgcaat

SEQ ID NO: 44096 - DNA, 1229 bp, Homo sapiens
tgtgtcaagcaggagggagcacgtggggggaccagtggcaggggtgcagattccagcccatgctcccatttccaagctgtgtgcttgacctggggctgagttcaccaaagatcctgaccactggccaagccatgctccctaggggactacatccctctataagggtgccctgccttcagtggaggctagtggaggccctgtaaggatgagaacccataactaaacacccattggctatttggcaaagacttttcaacatgtgtgcaggtgttcttgagctcctggagccttattgcagatttccattacccacgcctacatctgggttcataggcagtataattatcattgcagcgagaccctattaagtcctacttcccaaccaggaaaagatggcaggtacttaataggacctgacacacacccagagacaaattagttgggcactgtgctgagagcaggcacctgtgtcttccacttgaggcccaggatgtctttaggttttactgcaggataatcatttggaagtagaactgggatgttatgcttcacctcctgcagttaatgattagctaagccacttaaccaggaaggtcagtgaaagggaaccactttgaatcaaaaggtgaggtctgagaggtcatctgcagtgacccagatccaagaaatgaagcagagaggctgttccaagcccactgcactattcttctccctcctgggtttcccttctcagtgagtagcaccaccattctccccagtattcaagttggagacctggctgtcactctggcctccgtctttcactcccagctggaagagtgactggattctgtctatgcctctttagtgcctccttcatcacccccacctcttcaccctcagaacctcaccacctcagtccattggtcaccatctgtcatctgacctattacaatggggtgtgtccccacctctagtcccctctccaggcagctgcccccaggaaggtgaaaacacaaatctgatcatccatttcctggcagggacagtgcctatgacttggcctccacccaatcttcctatctcatctctcttgagcccctagctcctggagtctggcctgggaaacaccttgcaatgttctggattaaccaggccgcctcatggctctgcactttaacccgtgctgcagctttggccttagcctcctttctgcctgtccttctgatgagcatctagcttctcaacca

SEQ ID NO: 44097 - DNA, 1547 bp, Homo sapiens
ctactgcactctatttcccctattaataacattttacaataggatggtacatttgtaataattagtgaaccaatattgacacattattgttaacaaaagtctatgctttcttcagatgtcctcagtttttccctaatgtcttgtttgcgttgcatgagcctgttggagggatattttattctgcctttacaagtccttgtggtcttgggttacatgctccacttcatctatttgtgagtttttcaggtctaggaagcctgtatgatatttcaaaccctttcctcccctcgccttcctatctttatctcccatgctccaacttagttgggaaaggataccacagcacacatgtccccattaggagcactgatacctctatcaccctttggagcactgtggtcacttgctggattccctttaaactgccattttggaattcatgccaagacaccactgaatgtaatttgggacagcctatgaagcagagaattcagaaaaagcccatgtacctttgaaaatacatttgggaggaccaccacattaaccaaatgaaatagaaccaacagttcccaggctgtttgggttaatttctactttagctgttcacagtgtggggattggggggcagtgatttagaggctccacggagaccctaggaggtgctgcttcttggggtccagtcagtttgcccttcaacaccaagcagccccctgggaggaagccctgtgctctctgctgatggcacaagaagtcagttctctctggaggtgctttacttaaaccagtgctgtttatggtgccaggtttctgatgcaatgcctgcctccagccagcctgtcgaacaaatcgaagtgtgatgggtggctggcttggggccagagtggcgtcactgcccattaatagaagttgatggagctcagaaaaatgctttcagtctggcaacgatccgactccttctacactttgtctaccttgaggaaaatatatggaaaaatcaatttagggatgcttatttttaccagtttgtgttaatttaagcaccaatttgcctagttactgttagatttttaaaaaatgttttgtgacacatcttgttttttcctgatttatatagtcttttataggttctgtttccttccaaaaaaagatctgaggtgacttattacaaaggacatttattattagcatggaagttttctctgctttttcttgataatgttctgcttatgtaactacagttgatgaattagagcttatttatctaggtattaatatttcactttattccataaaggaggggtccccaacccccaggccatggaccattgaggatccatggcctgctaggaacccggctgcacagcaggaggtgagtggtgggtgagtgagcattactggctgagctctgcctcctgtctggtcagtggcattagattctcatgggaccgtgaaccctattgtgaactgcacatgtgagggatccgggttgcatgctccttataagaatctaatgcctgatgatctgttactatctcttatcaccccca

SEQ ID NO: 44098 - DNA, 562 bp, Homo sapiens
tgacctggggtgttaaaatggatatgtactgagatgacaagtttgaaagcctttcaagagctctgttcacaagttatcagaggaatgaaggcgacatttcagagtcctttaattatgtcagatgatgtgataaggaaaataatatcctaactgacaaatcaaaatcatacgttgggatgaagtcagttacatacacaatagattcctttctcttgaaagcgatggtctggacacatttcagtaactttcttctttagccacaaacagtgaaccacagagaaagcatgaagtctgcatttctgcatggggcattttcaaaatgctgacttgctgccatggaaggtcgcccagcgtactgagcaaagtgaaaaaaatgcaagttgcacaacaatgcgtgcagtgtgacaccattcacaggggaaaacagatatgataagatgtattatgacctgatacaatactatactatattatgttatgtagaaggacaattctgaaaagacccaaaggaaacagttaataattgttgcttttgggaagaataaattggggatgatggtgt

SEQ ID NO: 44099 - DNA, 790 bp, Homo sapiens
gatttggcatggggcatgttttgtccacccctgaaataaatcaccatacagccccaaattgttgatctttaggctttacctacaggaaagagacactttggtgttgcttctgctagatggagtttgctctgattcagcaaaacgaattcctgacttatgattactagatgcagcagcccctgggggtgctccacccacacgcaacccatatcaattcttttccagctccgtgcacccttccgggtttctgtggcttgcttccaaggctcaaacttgcaactctcttttaagataaccttaggtccactggcacctgtggctggaaagttggaagtgcctgagaatttacatgccctctgggcagcccttccctagagaacttcaaagcctcgctgacttttgcatctggacgaactcagacagaatttttaccctggagttcccctgtagaatcaggcacaggcctccctcctcaggactttgcctgacatcacacctttgtttggtttgctcccggctcctgtcctgtttttcctgctctttcctggacttcctatgggagcacttccttcacaattcacgtgcacatagcccttgtcaaggtctacttctggaagcttcaatctaagccatagtaatcatccttgctcaaggagatttttctccagactccaataaaacagaagaaacagcagtctcctctttacagaaataaaaaggagtgttctagctaaagccctttttacagagcagcataatgggtaagagcaggggctccagagtcagcctg

SEQ ID NO: 44100 - DNA, 769 bp, Homo sapiens
tctgggtctcaatttcattcatcattcactcactcacttgttcaagaaaacttcttcgacacctactcaggcaataaaagtccaaagtagaattagactcaaatggcatcattgagcatagctctagaataaggatgttgaaatagatgatgacagaagttgcttccaaatctaactgttgacaagtagaagattccatatgtggaataggttagtagggttctttctctgtctatcatacaagctcccctgggatgtggtcttgctccatcctggaactgggaatggtaggaaatggcagtgattcatacgtgcatgctaaacaaccatctctattgcaaaagcccctgtcccaggcagagcaaaggtcaacacagctgacctgaagcagtttgaataaataggcaagatctcagtcattgttctagggatggctcagccctctagattgagagatcatcagttttcattaaagtgttaacatatttttgaagggatgcagtttgccggtggacatctgaaactgggtgcagagttaaagagtgccacatgccactgcatctgcttcaaattatgttctccagaagacaaaaatacagctccatgagtctaaaaatacatcttagctgttagccaaaaatgcatttattcttggattcataaaaatgcaggccatgtgaaatatgtggggggcatgcactctcatagaaaaaaaattgaccaaagagaagaaaaagttaatataaaccttaagtatcctttattgaaa

SEQ ID NO: 44101 - DNA, 626 bp, Homo sapiens
tgctttccttgctcagccattgtagtcttagagagcaagggccatcaaccatagtactcaaactacactaggcactggctaagtccaaggagacaccagcattgtatctgcaagatttccaaacttgcaaggattgtcctaagccttcaatttggaggctccatttatagtgtctgagaactttgggatggacactcggtcctgggtctccttgggggtgaaggtaagagtgcctgggcaagtcagcccaggaacacagctccgcgccaagttcaggactgtcttggcacacgtttgtttattacacaacatgctcatatgatgctggtaactgccacccgcattcctttcacttcttgctgctgacattttttgcagtcattgccaacctctggcttctggagctgggaggctagaatcagaggtcactccagcgagactaagagcagtgtttctgtgccctcagtctatgctaataaagccatactggggaccttcctttgtcacctgtcaaagtagaatgccccttcctatcagatggattatgtctctaatgtgtgtggtctctggccaccccaacatccaacttgtccatcttcagtttttcttagaaacctttccccact

SEQ ID NO: 44102 - DNA, 1780 bp, Homo sapiens
tgacaccatcatagctcactgcagcctcaaactcctgggctcaagtgatcctcctgcctcagcctcccaagtacctgggactatagacacacaccaccacaccttgctaactccatgttttttatctgccaaatgggaaggaccaaaatttgcttttatatatactctcatttaaatccttatagcaacccagtgcaatagataaacaatataaaacactataaagacacacaataattacctgcacttctaattatttcactatctcaagctagctatactctgctaagaggggaaagagaaaaagggaaagacccagccctgcttttgtgaaatttctacaagaagagaattctactcccacgctcctatcaagggattagtgatatcagtaaagttataaattaacttatgtgcaaagctgaaattgagatggatccgcttatcgatccagttcccaggaatgctttaccaatctgactcacaaagcaccaggcaagattcctatgcagacagcctaacgttcatatccacatcatcccctgaaaacgtccacccagcagtacatttggaggcccacaggtccttgcatcatggaatgggtagaaatgtatctttgttaccctcagggaccacgtggcagggaacaaaggagacatagtcagactctgcaattctgtacaagtactccctagaaacatgatttaataaaaggtaggtcaatagcataacaagctctcaggtccttgttatctaagcaaaccctgagagttctgattcctcacacacacacacacaaaaggttacagactgttaaaaaaaattcccaatatactcaaaagtcaccattttaaaaagagagagagagagaagtctgagtctgattcataacaggggtccaaaaccaaatgttctttttcatttgcttgttttactagaaatagcactttgaaagttgtatttaatgaaacacgcaattaaggagggaacattttctgccattagacactttgaactcttcattaatccggaaacaaaatggagatggaatcaaaagaatgacatcaaaacgaatatagaattttgtactgggtgtgctctaacagactatgaccaaataaagataaagagggaaacacaaacagcagggttgacctgtgcattttctactgtacaatctcagatttttcctgatagaccttccagaagggtgaccttatgtaaatcacttagcctcccacatcttggttttatcaacctacttaggttgttatgtggaataatgaattcaattaatggtggagcactttgcaaatatgaaaggctaagagagactacttaagcccaagtctttgtttgtggctgatgatggacagatgcaccaggggagaaccagctggtttcagcaacagcctcatctgcagctgggctgcagccactttgagggttattagttgcctccatatccatttagaaaatgtaatggattggctctcacgtttagcttgcctttaactctctttgctacttttctaggagaaattattttctctactcaccaaaagcaaatattgacctggtagtggacaaataaatcaatccagcaagctaatttttgtttcaacccttcattgaaaatagtaacttcagttcttctacctactttgcccttcaatgggtggcagctagtggagaaagcccagctttaaggtctgacaaacttaatctttctgagcctcagcttttcttttttttttttttttttttttgagacagagtc

SEQ ID NO: 44103 - DNA, 930 bp, Homo sapiens
actcaacattttctcatatatttgggggatatcttctttcttttacaaagtggctctattcatatccttcaattattcattttttatcaggaatgcatcattttcttattgattggtaagagaactaagcaactcttcccttacatttgcaactaagttgtctcagcttctctagatgtgggatcttcagtttttttctctttacctacctgcccttttgaggcaacactttctttccagtctctgtccattgcatgaggtgccttgcaaaaatggagagcagagttacttgtttcagaaattcctttgctgggggtcttcagttgttctttgcgggatcctacaagaaagacatttatctttgaatttggtttttaaaacaagataatcactttgattgtaggtctggctgtggcatctttcacagaaggacagagtgaaaaagcccaggctctcgtcactccaaagtccattgcagagagcaggacagagtgaaaaagcccaggctctcgtcgctccaaagtccattgcagagagcagtacagaatcctatccagactgctgacttcataaggttgtcactcaatgagaaagctgtctcagtggcctctagagcagggaagaggtgccaagattaaagacctgacttcatttgctgcagcagcagtgtgaatgctttatctctgtatggaaaaaaaaaaaaaaaaaccagatttgcacatttgaagaatggatagaaacagttccatagttttaaatgatagtggaaagagtatctggtttgcccgagctatggtcatcctgcaaggaaaacattatgggatgcttgctttgccagcattgacattcactacataatcatgagcaaatcactttgcctctctccccctttctattgcagaaagatgttttaaagatagtttaagatgg

SEQ ID NO: 44104 - DNA, 941 bp, Homo sapiens
cctgtgcatccggggaagaacttccgcggaggagcgaactggccgggcacacaaacgttgaacgcgggtcagccctcggggcaccgagcgcgcagaccccgcccggcccgaatcaaccgccccaccttcctctccggcttccccggcttgcagagcagcgcccggcccggcagtgccagcattctgttggggcagatgctgtcgaaggcccgacggccggccgcgccgcccccgcacgcctgcattgtgcctcctgcctccgggtgccgactgctcggaggcggcggcccgggctggggcagcgatccacaccctgcactcccttcagtgcctgcaggctccgaagccagccagaggttggggcaggcgcgtgaccgagaaggagccgaggggctgccgaggaggtgctgagagatggcgggggagggggaggaccgccgcgcgggaggggtggcttgcgcctgagcgccagaggtggcgccttcagcccgggacaatctgcgcgcgggcggaggcgttaaacccaacctggcaaccgggcttcccccgggagccgccagcgcggggccccggcccgccagcgccgtttcggcgagctttggcgccgccgcctcccggacgcgccaggcgaagagagggagaaggaggggcgggcaaacgccggtctccctcgccctgggtaccgtcttcccgcttacagacagggggaatggcaaagttaacgattatttccttttcttcccactccagccacaaggcgcacgaaataaacgtggagtgacacccgccagcgctagactccggcctttgcgctcctgcaggatttagtaaggatgtagaataccggcagggatgccctggaacagcccccttattacagaagccccttccctcaaacctgaaccttatcctgggtcctgacttatggatttccacgtggt

SEQ ID NO: 44105 - DNA, 2328 bp, Homo sapiens
agttaatacctatctctgacattagactggcaagctccatgaggtgatgtctctttttgctcatcacattcctcacatcttatcagacacatactaaatatttgcatatatacacataaatgctcagcaaatatttcttgaatactccaataagtacaagcaaacaacccgagaagaacacaacagaatgtaattgttcatcttttgagctcaaccgtaatatgtggcctgctcatctgcagcaggaatcggccatctataagttgagttgtcaaatcaatttgtacagtaagcaaaactgcatggcggcagaaacgagggcagacaattttacaatagattacacgtaaccagtgtgtaaccagtgtgtaagtcctgtaatttttattaagtattgatttttccagaacgcatggagacactagattgttgctgaaaatgatatgaaaaactgacagaaaatggggctggctggcaccaggaggtcaggaactccactcagtactcgtctttgcgttagcctagctagctgagatggtgctcaggatgaattcctgctgaaacaggagctaatgcaattattttgtttttagaagggggagaagtgtgagttaaaagagaaatgccaggctgcaacagggctactgtcagaattttggaggcccaaagagcttagacttttttaatctaaaacaaggccaccccatggggaggtagcagctcgagtgttgggaaatagaaatgttgggcccgaagctcctcccgggttctaaggccctttcctcaggacaagcagcaaggtctcagggcagacagccaggggctgggggacctctcgtaccttgcttgacacggggctccctggagccggcagcggcagcggcagcggtggccggcctggacactggcttcttgctttgggcctccccggcaattccagcctcggcagatttggctctggaagcagacacggcggcccggaccaccgcggccgctggagccttgtgtttcttgttcttgccgcccatgttgcagctgtggcagaagatccttcgcggcccaggccccgacggtaccactgcacagccgagagctcttcacattccccggctccggggctgccaccctgcgcttcgatccgggcttctcgggccggggcgaccgctgcctcgcaattggtcgaattcagcaggctccgcctccttgagtcgccagctgcctgccacacgccaggcgccacgcgccgccctcgctctttatccactgagcagcttatccactttaggtcggaaaggaaaggaaagaaaagcaggaaaaaaaaaaaaagtcaggggaacatttttgtcggctgcgcgactcgactacttttgtctcctgcgggccactgttgagccttcacgagacgtcactgtcttcggtcgcggggcatcgtgggtaggagggagatttgctctcactgctcccaaaaatggcggacgcattcggagatgagctgttcagcgtgttcgagggcgactcgaccactgcggcgggaaccaaaaaagacaaggaaaaggacaaggggaaatggaaggggcctccagggtctgcagacaaggcagggtaaggaagaagttccagttgttgcttttattttttttctcggtggggaggaagaaaacactactctcttaggaagagcacgagaaagtgaagtgtacattgagtggcgttggaagtgaaggggttccagaaaaaagttggagagggtggaagaatgttggttcgtggaaggggggtcttggcgtttcctggtgtctgcaggcagcgtgatcttctgcttcaattcccttacgtcgatgttactgattctgtccccatcttcgcggttgtctcctgcatcagcacaacacctggcacatagtcgttaataaacaaaacgaatgattagttgagtaaaaggtgaaaaggtttagaaaaaatgatatgaattgatttggaggggaaagggcagataataacatgagaagggagagacatttaatctccaagatgtagtagttttctcttccgtaaaatggagataatagtgcctaccactggtggatatgaggattcaatgagatacacgtgtaaagtgcctaacagtggttagctagctatcactaataaatggtagctatcgtgagtttattgagaaaaaatttaaaaattactggaccctacccatatgtttagactggtgcatacagccaccagaaagtgtacagatctgtttatagtagaacaaggaaaagctattacttgtattaaataaagtaagatgattaattaacaatcaacaaaata

SEQ ID NO: 44106 - DNA, 544 bp, Homo sapiens
caaagtgctgggattacgtgcatgagccaccgcacctggccttgaagactactttctgaagtgacttttccttgtatctataatattcttgaacttacttttctaaaaaaggcttagagtgtgtgtgtgtctgtgtgtagagggcaagagcactccagctctgaattacattgattaacagaggtgaacagtttagtgtgttctaaagatcacttgcagttttgacactgttgctttgccagctcccatgtgtctgaccatttccccttatcatggccacgtcatgatagttaaatgagactcagcgtcagggagtgaagataagggagttctgttttgtttttctagaccaggaactaggtggaatcattcctcattagataaaaacatctataaaaggacatggaatagaagattacagattagaactgtacacttataaaaatttgaggattaagataccagtacttgtcatggaataatatttgctgttttggcaggtttcaagtttaccttgaagatgttctatggaaatcagattttt

SEQ ID NO: 44107 - DNA, 2127 bp, Homo sapiens
tttttaaggagttttttttgtttgttttttcaaaaaagaatatgtgacctacaaagcctaaatatttattatctgacctttcactgaaaaaaaaaaaaataccaaccccagaactagactaacaacagcaggctcaatgcaaagaaatataccttggtctacttattttgaaatagtgcttttatgactagccaggcaagccaaattgattgctccacctacatttgatgacagatctgtccagaagaacactggaaagcaggcctcagtttagtcttctttgggttttaatttcaccatttttaggattcactgaggcactaaatttagatcttaaatcccacctcaaaatcagacaaggttcgtaggctatgggccatgagttgttcatcatttgcccaatgttcagcaataatcaagtttggaaaacatcacgaagtatcaacaatgctaggaggtatacagtgaatgctaaatgagggattatatgaatcttaaggaaagtggatagtatgaaagagtctgagtggatttagataggtgggcagcactgtctaaacacagggcaggggcaaggcccagataagaggcattttgtggcaggaggagagtctggctgaagcatagatacaggaatttcataacaggcggtgatataaacaatctggggttacagcctcaatagaagggtctcaggaaaagtattttaacactcctcactgtattgaaagaaaatacagactcataccatggctgttctcctgaataatcaaataaatttggaatctctggcattcagccaagttcacggggagtcactaagcatataaactggctatgtgcaaagcagccctgccctgagctcccgcaggcctgggaggttttcactgatgctgacactctcttggcacagttaagtgtgcagggctgcactggctgccagagaagaacaatggtcagggtgttttaagagccatttttaactagaagttaatttctgggtgtcaggaattgacagagaagttttggctatcaaagactgtcctaggagaggatttaaatgactacgtctctacccaaatctgagactgactcatgaagccaaggtgcccagagaaacaagatgagtcattgctcaaggaattcgggggtggggcttagaggttaaatgttgtacataggccaggcgcggtggctcacgcctgtaatcccaacacactgggagcccgaggcaggcggatcacgaggtcaggagattgggaccatcctggctaacacggtaaaaccctgtctctactaaagatacaaaaaattagccgggcgtggtggcgggcgcctgtagtcccagctactctggaggctgaggcaggagaatggcgtgaacccgggaggtggagcttgcagtgagccgagatcgcgccactgcactccagcctgggtgagagagcaagactccgtctaaaaaaaaaaaaaaaagttgtacataaatgtaaaaagcaaggatctgtgtattcagggctgaaataaaagctggggcctacatccacatcaagcaaatatttccactacctagagtcagtaaaatgcagtgcatggttgctctggcctgctttcttctccagaaaggtcttggtctacaacaaatctatttatctaggcttctttttttgccattataactttacatctgttaaatcaaactaaaatctgtcctgaaaaccccctgctcacatacttgagttcttctgtacaaagaacaacctaatttggtaagtaagcaaactgggagcctgactcaggaatgtgcttctgtaacagcagctgagtctcagccagtccctgcagccatatttcaaccactcacagccattcaaaccacgctcaaataaagctccaaggccgagctgtaaccaatccggcagtttctgcacctcgcttccattttctgtactcactttcctttttctgtccataaattctccctgaccacttagaagcagtggagtcattctgaatctgcagtgactctgagggctgcccaatttgaaagtcgtttcttccttgcccagtgacacccttaaatttatctaaagttgttcttttaacacagttggttcaaactgaccc

SEQ ID NO: 44108 - DNA, 756 bp, Homo sapiens
tctcaaaagtcaaaattgtttcatcagatcagatttttttttttttttttgagacggagtcttgctctgtcgcccaggctagagtgcagcggcgtgatctcggctcactgcaacctccgcctcccaggttcaagtgattctcctgcttcagcctcctgtgtagccaggattacaggcacccaccaccgcacccagctaaattttgtatttttagtagagaaggagtttcaccgtcttgaccagggtggtctcgaactcctgactttgtgatccacccgccttggcctcccaaagtgctgggattacaggtgtgagccactgcactcagccagatcaaacagatttttatcaactctcacttactttaacttctcagtgtatttgacttcactgaccatttcctcctcattgaaattatctcatgtcttctcagaaactataataatgctggttctctacctgccagctccctcaatcactcatttattaatcaatcatttgcaactcatgtcaaggccctggtatgcagtcttaatcacagggatttttttaaataaatgatttactttctagtaaataaagttaaatgtatacaagtctaaccgagcattgcctgaaagaggctgagttaatgaataaaattgaattattttaaatgagcacataaggctgagcatggtggcttacacctataatcccagcactttgggatgttgaggcaggagggctgcttgagcccaggagtttgagacacaa

SEQ ID NO: 44109 - DNA, 1973 bp, Homo sapiens
ttagacctatacgcaaaaacttggcgtgctcatccctacttgcaacctgacaatttacaacctggcacaccttctaattaggaactagttctagccttttatagccgaaatattaaactgcttctcacgataaatcaggcactggcgcctgctactgagaatcccctgtgcatcaaacctccagtttcactactgagatgggccagtgaccaggctcctctaccgtacagaggggaggagcccaccctgctctgctagagtggaactgcaaacagaggacaggagcaaggtatggagcgcagaggcgtgaacagcgtccaagcagggctgggctcatcgcaccggcgggcgacagacagcggcgggcacgcgggagccggggtgcaggctgcaaagcggggtccctcggctgcagaagccgcccccgtgtgtcgccccacagctgcgcacgcgtcaggcaacacacccccgctgcccgtcgcggctctgcgctaaagccctcccgggacagccgcacacgcccctcggacccggcggcgcgtacgtacccagcaacacgcagagcacatcgagggccacgtacggcagccgcgtcttgtcaaacatggtctctgcccgggctgcccggcaagggcgatggactgagctgcgggacggcggccgaggcccttgattctcgagcccgggccggggctggcgacggccccgagctacggcccctcccagccggaggaggagagcagccgagggcgggctgagaccgggcggcgctcccaccgccagcaatggcgcccggggccctcccctcacagcccccgcgaacactcggttagtgccgaggcgctcgtgtgccagccgcggcagctctgtagcctcaggacctcctcagccggcacggcctgccccggttgctccccgtccggatcccggcgctctctcccacaggcggggcgtccagactctcgctttaaggatggggaccggcagggaggaggaacgcggggtccagcccctcccgctgagcagcgcaggaccgggcagcgcgcgggttcgcgggcggggggagtgcagcaggggcggggccagggaaaccccaggccgcggcggtcagccaatcagcgccgtcggcctcatccctcccgacctgcggcatccgcccagaagtgcggctctcggcagccgggcggggcgtgggggcggctcccgttccgatccagggggctttgctctggaccgcaattgctcaggtggtctccgaactcggcctcggtacccccactaggcattgctgctttcagagagctaggctccctacccaacgatcctagagcaccggctgcctgccactccccaccccttccatggggatgaggtaataaacaggtcagattgttaccactgagtttaaggggggaaaagaggtcagagtaggcaggaacagagacgctctcctttagtttggtacctctgagccctttctcacttaggcctcaacgttgacctccctgtgtcctggctgagcccaaatgttagcaagaagcatgctaaatcatccatcctcgatacctgatcaccgttgaattcttgatatttaatatcggattagattccttatattacacctttgttgtagaagcccttgacctgcctttagccagaatccctctacccttgatgtctcctcttagtaattttccatccaccgtcacctccctcacagacacggtgcctgttccttggctataaatcccctgctgtctttgctgtattctgagttgagctcaatttctctctcctgttccaatagtcatgacccttattgtaataatcttgaataaattattcatgtgtttgacaagtgtcaggataattttctttaacagcagcaagcactccccctgccccatacccaggaggaccctagcccacatttagtaatctcagtttcctaatatgtaaaatggggatttttt

SEQ ID NO: 44110 - DNA, 635 bp, Homo sapiens
gaaaacaatctacacatggaactatcccagttagaatttgacaaagacatttggctttttaaaaaaccaaccctctttttgaaaatgtttctattattgcttttattttaattaaaaatcttttgtttgtacagccacagctatgaatatatctcagggctttccaaaataccttacaactgtggcatgaggtcaaaccactgaaaaagacaatggagtggattgatgaacagaggagaaaattgcctgcatgtctggacttcttcctttcaggctcccacgagctccgccgagaagaggctgccaatagtgtataaaggtctgcccttggctgcaaataactatgctattctgaggacgaggccactataaggcaatgaagccagtgtatttgtgagttgaactcagaacttcagattcctacaaggaggtttctagtggatcatgctaagtcagaatgaaatcagaattagatcaatgcttttctaaaggtgcatgtactgagagtgcacagaaagccagaattcacgatgccagtctctggtctgaaccccatacaggcaggttagtttggccctgatcccagcatgcacatttctctctgcacttctagtcagctgtgtgaccagcgacag

SEQ ID NO: 44111 - DNA, 1818 bp, Homo sapiens
gtagctgggattacaggtgcatgccaccatgcccagctaattttttgtatttttagtagagatgggcgggggtggtcttaccacgttggccaggctggtctcgaacttctgacctcaggtgatccgcctgcctcagcctcccaaagtgctgggattacagttgtgagccaccacgcctggcctgtatattggttcttgcctaaaatttatatttgaacatagggatttggtgctttaaaaaattgagagagaaagattgagatgaaaaaccactggggctttctttaaatccccttctgcaaatcttatgttttctcaagaggagctatctccaggatgaatcttgcatgttaatcacagttgtagcaaactcagttgctgttttccttatgtacaccaggaattcatctactcctggctcccaacacatggtcttggcaacacgtgtcatggctgctttgttgctgagccacatggtggaaaccgagcagagctgagtttgactggatccatcccaccaacccctggctgacctccggcactgtccatccctatgtacagggggaatgctcaggagtcctggagaggagagggctaagctgctggcctgcccagaatttgggaagctctgctcagcacagctgagattaaaaagagtcaggaaggagaaatcagcaattcctttaaggaccagaaaacttgggaaaatgccaaaggatgacaaagccagggagcttgggagcttgatcactttagcactcagctttatgacctttggaaactacgtgtcacactattgagtccaaaaccagctttgataaattttgttttggaatctttgtcctcaggcattttaagacactgtagagaggttgtctaatattttccacacatcataatggcataaaactaggagaagaacaaggacagctaggaagaattgcaaatagagactaggaggcagaaaagatggaaaaagttggaaattagagtgacatctgtgggtttaatcagtaacttaatctggcaatgcagaacgtagccagttaagaggaaacagaacccagtaaagttcctacctcctgaggagtccccatctccgccttgagcttttgtcatccttgggcaacaggcagacatgttagttcctgctggctccagtcctgtctggcctcttgatcactcagcactcaggacttgggaaagtcctgagcctccaaaggctaccggtggcattattgggagttatttgcttgtttgtggatctggaatttacctgctctacccacacctggtccccagatggtggggctggcccaaggcttccaggtgcacactaagctgcagcttccctgtattcatgcctgtctgcctgcctggtttttagcctgggtcctgactttttactgggactagaccccagcccagaagttgtctggggctgccatgctgccacctggatcctgctgtctgctcactccattttttccatcttactgcccatttacctgccactggatgatgcttgagttttaaacttattattttgaaaaattccaagcctgcagcaaagttgagaaaacagtacaatgaatagccacatactttcatttagatttactaatttttagcattttgccacatttttctttctccttctgcaaacacacacactcataactgtccccataatgtctgttatggctatattttttccaatcccagatctaaattggcatcatgcattacatttagtcatgtctttttagttttctttaatgtagaacaattctcttgctatttttgttttgtttttga

SEQ ID NO: 44112 - DNA, 3227 bp, Homo sapiens
aaaaaaaaaaaaaaaaaaaaaaaaaaattctttcttgacatcaacatttttgaagagttcaggccaattgggggttttttggacatctgattatctcgtcacaatttgattcaggttaagcattttgggcaggaatactcgataggtgcgactgcctcttaagcacaggctatggccaatgcccacttgcctttctcttcacggcacagtaaccatccccttcctcttcccagcctggcagaaggcaaagcagcaaggatggctgaggaacttgtgctgggcagacctgggctcccaggggacctggcagggttgctgccaccagataccactctgacaactaaaccttgccctttggcccccattttcatttgttgcaaatgacctctcacatatactgggctcttcaaattctatcgtagtccagtggtggtcatgcttagggtggatccaagagaaaacaaacaagacagagactccaaagaagccatgtcttagaggctcctcagccccaaaggctctagtgtatgacccttcccatggggacagagcttccaaactcaagtggacacttcaggctattgtgctgggcttcaggaataggaacaggaaggactaggagaaatcagaactggaagtctggttgagtacagggatttggcagacatctatgctctgcgttagcaaggaagtcaagttcttccttgaaaaggacgcatgggtactacaagttcaaaaactcaaaatgaaaatccaagtccagaagccttcatgcgtcagaggagaccattggccaggagttcctctgaggcaggaaaagcctttcctgttattctgtgcatccctatggctgagtcctgtgcttggtagatgggagacatccaatccttgcttctgaatgaattaatgactacaggaacaaataaatggatgtgatttctaaatggccaggtttagtatccaagactcctatttaactgggaggattcaagagttagtatctcagagtatagacgggaagagacagcaaaacatagcattttgaggtacacaagtcagtgaacccagctgaggaatgagttgaacagcagtgagttgtggcatgtattattattcaggctcaacctaccagctgcagacttttctttgatggtgaacttatggtctcctggtcttctgtatgcagagaccttttgctcagctacagtgtagccaggaacatgcctgtcccatcaggcacactgcagcttccaggaagccgggagggggccacaagaatggcttttttacttcccccgcactgctgcacatggtagaaacaaaaagtaagatatggacacactcatatactatccaggcttttcaaaagccataaagcagcatccaagcctcgctcattattatcataaaagctgggtggaaaagtttaaagtaggaatggagaaattgcatggaaagaaagctcaagaagttcctaataaagcagctcgaacataaaggtttggcacattcttaagaccaggaggatggtcagggtcagtgcttgagctgtagtctgactgcattcagcatctggagtgctggcggcttccagcaagatctactagactgataaagaggctctgaaagatctcttactggctatgagcaccatgcaggggcaaaaaaagatgtgtcaggtgatttagaagaaaagtatttttaagtcgagaagagtgcaattgtattaccatctccacatttagagatgatttaaaaaggcacaaagaaaggaagtgggctgttcctgggcctcctgtaactacagtccagccctgcttccttatatagatttccttttgcacacatactcttagtttaggtttctaaaaccaacagtttttatttataggtaagaaaatcccaatttttctaaattttcaccaaagatgatgctggccagcccctaatttgtgttatcaccatgccgggggcccctccttcctaccttcctgtctgagttccttgaagaaaccgggtgaacttctcagttcaataaacttttgtaagtttcttttctttctttaattcttttttttttttttttttttttgccaacgtgtcagtacatctgagcactcctgatccctgttggctgcacagacagctccagttctgtccttcctttactggggaactgctgtcagccgggctggattagagcccggcaacggttctgttgctaatgaattggcagggagaacaaaacactgcagctctcctggaactattttgtcatctatagttggagcacataaaacctcgggacttggaaaagaacaaatgtcatttgcttatttgctttaggatgtcaggaaccccagttcaccacgccctgaatgtttgtccgattacagcactcatgcaagtgacaaaaggttaaaggaaaactccaccctcgcagcatttctctgttcatttcccaccctccaggactggttggcaggcccggggagggaaaattcttatatttataaccctggggatagcagggacaggcttggcagcttcaaaagggctgagcaaatcttggaacactgggattgaaagagccctgaaggagcaataaggccaacattcccctctaaagatgaagaaaccaaagccagagaggttgcctggtgttgtggctgaactgtgtctccccaaaattcatatattaaagtccaatatccagtgcctcagaatgtgaccttatctggagataggtctttatagatgtaatcaagttaaaatgaggtgactggggtgggccctaatccaatatgactgctgtctttataagaaggggaaacttggccacagagacatgcagacagagagagcatcatatgaacacgaagatggccatctacaagccaaagagagaggctttttttttttttttgagatggagtttcactcttgttgcccaggctggagtgcaatggcacgatcttggcacactgcaacctccatctcccgggttcaagcgattctcctgcctcagcctccctagtagctgggattacagttgcgtgccaccatgcccagataattttttgtatttctagtagagatggggtttcactatgttgggcaggctggtctcgaactcctgacctcaggcaatccacccgcctcagcctcccaaagtgctgggattacaggcgtgaatggccgcatccagctcagagagaggcttttaa

SEQ ID NO: 44113 - DNA, 1288 bp, Homo sapiens
tatggctcttaaacttaggagagtttttaccattaggagaaaaacttcagctgaattaaattcaaaagagtttaattgagtgatgaatgatctgtgaattgggcagcatcctgagccagagtaggctcagagactccagcgcagccacgtggtggaagaagatttctggacagaaaaacgaaaacgaagtacagaaaacggaagtgaggtacagaaacagctctggattggttacagctcagctgtttgccttcttttagcatggtttgaacagttggccacatttgattggccaaaactcagtgactggcacaagagtagactatagtctgtttacccttccatttaggttatacttcatgatgtacagagaaacctttaggccaaatttaaaatatgtaatagggcagctttaggctaaacttgatttaacattatacatagagagttgagagaaattcatgtataatttcatctattttgtttgcagtttgattttttttttacaatgaactctttattcttatcagaaattttattcatttcatcaacaaatatttcctgagtgcccttctgtgtctgacaaggtgtagttgttaggaataaaatggtaaccaaaatgcttagagtaggagaggagatatgagtgagtgacaacaggagactttcatgcagctggggagagctgtcataaggtggtttgactgctctcagtgcagtattaagcctaagcgaagtcgggcagggttgcgaaccattggaacctcttgaaatcttaactttgttcccacagaatgccccctaagttgataaactaaaacagtttctgcagcaggctaaatctgattagtcatggagcattattcatgctccagctattaggcaaaaagtcatcaggagcaaagaaaccaagataattctttttaaaagacttagaaaaacaacaaaacataccttcaccaagatttcaaatcaggattcagagtagcagggttgtctgagatgaggtagacccgggaggtgctgggcccggtggacagggatgaggcctgctttgcaagggcactgtttggtggtgtgcttgagcaatggccgactccaggatccattcaagcaccacatccccccgccaaaaaaaagatgtaagaggagattaatgttttcatgtcttctaatacaacatccattctgattctgtaccccatggatcaaggaataatttcacatttaaagtcttattattattattatcattattgtttttttgagaccaagtttcgctcttgtt

SEQ ID NO: 44114 - DNA, 711 bp, Homo sapiens
cattgtcctatattcttctcttcaaaacatgtgtatgatgtggccacagcacagcattcagttgagacaggcagcaggaaggggcaatagcctggcatttcggtgacacctggaaggatgacctggttgttgatgcctagaggttggtgagggatattaaagtgtcagagccacatctggcttgttcaccactgtatgctcagtgcttagcataaggtctggcaaccagtcagtacttagttattgactgaatgactaatattgaacctgctgaccccaattttattttgtaatggttttggggctatggaacaacatcctagataatagcaattaccttattattttccataaagaatcctgactagttaattaattgattaaacaagtgtatattgagtgcctactatgaccaaacaataggatcacttgggattgagagagagccaaaggaggaaaaatctggagtgtgagcaatttcccatccccatcgcaggcctgtactttatggcctgagataagtaagaatggccaggcgcagtggctcaggcctgtaatcccagcactccgcaaagctgagctggggtgggtcacttgaggtcaggagtttgagagagaccagcctggccaacatggcaaaaccccgtctctactgaaaacacaaaaattagctggttgtggtggctggctcctgttattccatctacttgg

SEQ ID NO: 44115 - DNA, 1406 bp, Homo sapiens
agggaggcagttgcatccatctgtattccttttctaaaattttaattaattattattatttttttaagagacagggtcttgctctgtcatccaggctgcagtgcagtggggcaataatggcttactgaaggcttgaacttctgggctcaaaccaacctcctgaatagctgggactacaggtgtgtgtcaccatgaccggctaacacccatgctttctatactctattctttaatgccaaacactctccaaagtataaaaaaagtccttgataaaggagtagaacattaattttgctaaatctcatgtttgaatatatatcctttaaatattctatgtgatcaaataggaaagtcataataaagcacatctgcgcgtactgcagtacagtacgctggaagtcttgaggaaaagtacctgtgtggctgagctgaaggggacctagctgttttgcctaccaaatgctacttttacttgaattgcagtcaaactatggtcattcaaactcaggtgtttgacagagattttccagaaaaatgaattatataagcttgtcacttatataattcaaggaaaacaactggcagtatttgttgccaaagataaaattaaagttttcaaataaaaactagaattttggaaaacttgtatttgctaccctgagcttgacagtttcccaatgtttaaaggctcttgtgatgaaattagtgatagtattaatgaaagtgggttttgatattgtaaaatgaagtgtgtcaacatttggaagatccacagaactcagtgaaccaatattttccaaatgatcaaacagatgttacaaaatcatgcatgcgtaaaagatccaaagtgcacgatagaccaattggttttaatgtaaacaagtttcagattccacgatgcaactcataagaagctaccactcgtcaggttttggcacagtatcaaagaagaatatccacaattatatgaaaaagctattaaaagtactccttctttttccaactatctatgtgaggctggattttcttcacaaatctaaacgaaaacaggatattataacatggaatgcagaagtagagaggagaatcaattgtctgctagtaaaacaaacatcagagttttgcaaatgtaaattaaagggtttttttgtttgtttgtttttgtttttttttgagatggagtctcgctctgtcacccaggctggagtgcagtggtgccatcttggctcactgcaacctccgcctcctgggttcaagcaattctcctacctcagcctcccgagtacctgggattacaagcgcctgccactacgccaggctaatttctgtatttttagtagagatggggtttcaccatggtggccaggatggtctcgatctcctgacctcatgatccacccgccttg

SEQ ID NO: 44116 - DNA, 5336 bp, Homo sapiens
cgcgccactgcactccagcctgggcggcagagcgagactcagtctcagaaaacaaaaacaaacaacaacaacaacaaaaactgcataaatgttaatgaatataaaagtaaggattgttggactcagaaaaccataccctaaaatgaaagcctcagaaacaaaagtttttctctgaccttctgaatctcagtcccattctcccgaagctatcttagaaactagaatccctcttccccaaagtggaacatggaaaccttttccctcaagctggccgtaaaacctaaaaatatcactccaatttcccactatttctgtgtaaaaactagccataaagaaatgatctgacctgtcttgtttgactgcaggtcataagactcccattccagagagggtcctgccccagacgcagatgaaaaaaacacatgctcagagaggctaagaatctagacagaggggccttgctggagttccccactcagtctattagcattagacatggctgttcacataaacataaccataaaaaaggacaatttcccctgtatctttgggtcttctttctaaaggctcccatgtaacataaaaccacattcaaatacatttatatgccttttctcctttttttttttcttttggagtcagggtctcactgtatcacccagagcagtggcgtgatctcagctcactgcagcctcgatctcccgggctcaaacgatcctcctcctcccacctcagcctcctgagtaactgggactacaagcatgcccactatgctcggctgattttttaaaattttgtagagatggagtttcagtatgttgcccaggctggtcttgaactcctgggctcaagcgatccacacaccttggcctccaaaagtgctaggattacaggcatgagccactgagccgggccctttttgcctattaatctgcctcttgtcggtcattttcaacaaaacttcagagggcaaaggggaagttttcccttggccctgatagtttcaatgaccaataattaaaagtgttgcttctcattagctacacattgccaacataggtactatacactataaacttcttgacaatatgtaaatcaatagcaattaaataataagataaatataaatggtatcggagctaattaactatactggaaggaatgaactttaaatcattctagacaagggagtggcttctatttttaaagctcttcagggaagaggacaccaatgatctatctttagtcaccacttgcattaggcatttttatagcaaaaggatcagtcacactttaaactgacctgcttgcacagtcatttgttgcttggcacatcctgctggtcaagagaagagcccttacctaggataaatgtcaccgaagatatggcccaaaagctggacacgagccaggtagcctaagagtgggtatacagtcatcatctggaacagcaggaatatccttgcaatgaaggacagggtgtcactgctagggaagttgtctaaaaaattctaatccaagaaagataatgaggtcatgttaaaaatcaaattcagtacacacattcataaaatggaatgtcttctgcttattttgaacacaggtgctactccgattgtggtttgtggactagtgcccatccacaactacttgttaagtattttttcaatgaggtaagtatagaaaccgaaagtgttcagaaacttttacaggaatctgacattgccacaattttattctattttacaaaagtatcagcctgcaatttatttaacattaaagcaacagcaaagacaattttgtccttcaccacagatagatcgagaaagcattgctttatgtggttcaaggaaaataccagtccactttaaagatgtaaagagctaatttaattcagtgttattttaccctctctggctctgctgctttcctcctctgaagcactgtaagcacttttgaagtaaagatgacagaataaggtgagagtatgtctatcacctactacatcattgtttagtctatcactaaatttaaaaggatttatctctacttcctttcatgacccttttctccattttggtttggtatcttaaaaaaaagttaattacttagaatttttatcttttctttcaaatacaaataccacaaatattcctattcccaagggagtaggctttgtatgagtttgttcatatcagggaaattgccagcaaacatttggctgccaaagaacttctggagtcaaggaaatcaagaaaataagaacatttccaagctgccataatagcagtaattcaaacttatttctcttataaagatgagaacactattaacattattttgctgaaataaccattataattcagctgtaataaatcacattagtatattccattgtactctataagaggaatttcttctgaccagaaagtcacttgtgaaatgttgttttttgtgagaaactcttcagtcacttataactaaagactatactattgctaagtttttgatgggttaaatcaaagaaaatattagttatggcaatcttttattaaaatatttttttcttttactctgtctctctttttttttttttttaaccctctggtgactcataggacatctctctctctttttttaacagccaaatactctttttttgttttgctgcctgtcactcaatataagaatgagagtctgattaatcattagagtctgataaacaaagactctagtttatccagggcattcctgatacaggcttttaaaaatagggagttccttcaatgtattctctgtggttttataactacatgagaactacttgtaccagttccccacaaaaagagaaatatatgtacataatagtagacatttatttgagtaccacaaggtgcctggcatgtagtacattatctcagagtccatctaaaaatcaaatgggggtacttattatactatttaatggaaaagaaaaataaagctcagaaagaaaagggaaggtgcctaaattcccatacttggagtagatagcagagatggtattaaaacccaggcctatctgatgttatatcttgccactgtatcaccctacctactataaatacatgaaagtgtacacaatcacacagagagggtacacggtgccttacctgctcaatacaatctttggataatggtggtgaaggaaatgaagcaaaaaccaggactccaatatagagataagttaatgtcaccagcatataagcaatgcacaagtccctcacctgtaaatacagaacaaaagtcccataatactgaagaaccttgtagtaagtctaccttaataggctaaggagactaacaaataaatataaaatttgtctttttaccttgtacatgtgtgtatatacttctagatattcaatttgttcacagaaagtagttaaaacaaaatccacacactttacaattagtctggcaattttttttaaaaaagtactctgaagtatgtagactaagctacctgttggcagacttagaagttaacatagtggtttaacatgactgaaattctgacttaatttcaaaagataatttagttgccaaattacaaaatatttaactacaataataaagctaagggacaacaagaaagtaagcatagccacttcagtatggtctgcaacattttaaaaattcgtcctttggtaaattaacttatattattaaaacatgcctagaccacagcagagcagaacatactaaaatatatttaataaagaaagaaagctagttaaagaacagacaacaagcagtattaaagacaagcttaataaatctaaacagtaaacaaaaggaaatcaaaaggcagctgttcaaacagctgcacaatgttactggaatcagcaaacaaatgcagaacattaaataaagcggactgctttcttctattgcggttcccaccctcccaacctcccatatccatgcaaagtaaaaagctccaagatatttaatgtagccagctgtcagatccaaacagaacagattccccagctcaaaaatctggtcttcatcaccactgaagttatggccaaacaattcagcacaattaaattatggcaacaagcctattcatttttcattttaaacaaaaattactctgaaagctaaggaaacaaattagaaaaaaataaacttaaaaacatttgatagcacaataaaaaaactggacatttggtattagggaacatttctgactttttggattactttcttccttaaatgggctagctaacgtagtagagttttataaacttgaatgttgacaaattcagttaaaaagcaagtaacaagttatgagaaatcttaaggtcaggtctaaattgacaatcagcttgaaagtaagttaagggttttaaaccctaaattagatggtggataagcccatggagctaaaggcttatgcagattggttccagccctctcaaaatgcgtctaattgcttaggaatgaggaagaggatgaccgggcacagtttcaaaatcattcctctttagttcatgaagctctaggtctgacgggaggccagagttcagtcacccctagggttgcctcatgatcttgtgtgggatgaacagcaatgaaccaggccaaatctacttttttgtcaaaagtagtagtttcccattatgatggctgaaagtcattctacactcaacctactcaatgccactcaagaacagaggtagccttgtaaaaaaatcttgggaggcaaagcagctgggcctgagacagctctctgtaaagtgggacagccaccatcccatagacagttttcagcttatctactacctgatcaccacgttattttggtctgacatcttgcaaagaagtgtaccatagcatacctagggggaaatctgattaagatgcaaaggctatggtgcacagcttccaacaagacttttcccttccgcttctctgttctcacggcactatatacttatctcaaattcagcaactattctactgtattgtgacagtcattaatttttattataaaagtaaaccatgtgcatgatataaagaatttcaagtggaaataaaatgtcccttgacatccctaaaatagccaaggttaatagttcttgcatcatgttggtattttttcttcaaatgtgtctgtaccacaagactctgggattctgaggagagagaccacgtctttttcttctttgtatccccaatacccaggaccacgcctggtacataggaggaacttggtaaatgtagataaagaataatagccacactggctttattaagtgcttgtaggtgccaggctatattgctaa

SEQ ID NO: 44117 - DNA, 1270 bp, Homo sapiens
gagtgccacagcatacctaggttgtttgaagggcagtaggaatgctgcctgtaccccacttggcttatcagagcacctgaaatgttctcagttagaaaaatcttgaaacttttggttaggacttcatatttaccggattctccatgttaaaatgcaaatagccatggaaatgtaatagactaagtctctgacatatccaattgttttccattataataccaagctgacaacagagccctggagggaataggacagataagtactggtgaataaggggcagaagaaaaatatggtttacaaagaattgcctaaggggttaagtctgagtgaattcctgccctgggtaatactgggcatacagagaaggatatgaaatccctaggccctggggaaaatggaagaagaggaaacagagatagagaaagactgaaaaacaagagaagctcaaaaacaaattaactatttcacaatctgtttgtaggctagctggatgggcaacttccccagggcatagtccgagaatagcagcaatcctgaatatgcagcaacatcaagcaatactgaaaatcaggttctatctttggctaccagaaagtctgagaaaaacaggaaagtaacctcttagactggtacttgctaatggaatgtagcacatatatcaagataggagacttctaaacctttctgtccctccactcacattccttattccacccccaaatcagggggaaaactggtgggggaggggtatgcagaataaaaagtaggcctgcatagtttgaaaaagccccccaaatgacttgacatatattattcccctataacaacaagctccttcctccacctaagtttagttagaccccagttccactaaaaggataagcgaaccatcatactttcagtccaaagcagttattaaaattatgtgatttttattgccacctagtggaagagatagaaaaccacaagctaaactgaggataagtaatctaaatatatacttgacatactctgacagccaaagacagtttctcaaagtatggtaatatgtaagatgattgtaagtagcacaagaataaatgctatttaaactagttggtatttaatgcaatgcgtattagaaaaaaagcataaacaacacttcaaatccatcgttttacaaagctgggttgaggctaaattaaccctaattttaaaaagtaaatagatttttgaagaaacattcacttatattatacaggtactattgaagatattgccaaagtcataa

SEQ ID NO: 44118 - DNA, 1799 bp, Homo sapiens
caacttacaacttatagtgtgctcatctacagagcacggcaatggataagacactgcctgggagtcatgacaattaggtgttggtcgagtttgccattaaatggttacctggtgttgagtaggtttctccaactcggtggacctcagtttccttctctgtaaaatgaggagaatgcgcttgactagctgctctcaaacccctcttccagctttactatgctgagatgtcaagctacccactatcaacacactcactctcacaactgagtcgtgtgaaaagcgtggcgagggcttaccagtcatggccctcaccccctctgtggtcctagctcaaggcccaaagggggttcctccctcatgttccccctctagatgtccccaactcgggatggagaaaggtgctcccagccgtgatcgcgccacctcactcaagcccaagcgacggagcaagaccctatctcaagagagagaaagaagggtgctcccattcctgcaagtcccacaattctcctactccctccttctctcacccgagggtcagggtgttcatttaccccaaccctatcttttctctaaggctccagctgacaccgactcccatagacactcggatttcctcagaccccgagggactcctgactttctttccctgagcccttgaggagcgcgcgccgtgcctccggagcagtctccgcggctccaggctatggcctccctgagccccaaaagaagagacggttccgatgcgctgcaaagaactatcccaggtgacagccggcttcgccccaacttcaacccttcccgccgccttccctcggataccttcccacctccccgaggggcgagtttgctagacgtgggaacgtgatctacctgagcaggccgagccttcaacctcggagaactagacgagaagataaagattcccttcccaaattctcgcaatttgcgaccgcggggctcctagtccaaacaggaagcggcaatagcctgggtcgcaggggccggcgggagttggagttctgaatgcgccaagcccgcggtcgctgtcaaacctctcgccgctacggactacaactcccagagggctctgcgacggccagcacgcccatcaccgcagggcccagccccgaggcttcaggaggctgggcagccggcgcgcccaggtgggcgagtccagtcggaactgcagccccgagtttgctccagttccttgtcccggctggaggctgggaggggtagtagaaggaatgcaatctcttgccattcatagagccccggaggccacgtgagaaaacgctgatgcggcacctccatcgagggatcacccctcttttgggctttcctggcgcgtgttgtatgatctggttacgtccttggaccctacagacacaaagggaagctggtttgaaaaaactgttgagttggcatgctccctccgtcgtctagatatttgggtttgttttttaaaaatgtgtttgcaaattagtctctaggctaaaaggggctttagaaggattttagaggcccaccccacatacccagcaattttccccaaaacctccccaagtaaacatacagtctaagtaaaattaatgtgcttgttatgaaaatcagttcaaggtcagtccctgaaaagcatatggccaccctaagctcttcttacaaaggaagccagtggctctttttgtttctttttcttttttctgtttaaaccagaagaaacagtgtctgtaatgccagaaaaaaaactaaaaatttagaccggctccgtggcttatgcctgtaatctcaccatt

SEQ ID NO: 44119 - DNA, 1374 bp, Homo sapiens
agatacaattcaagttaagatttgggtgggggcacaaccaaaccatataaatattttaaggtacctgcagcaacgaaaatataatatgaaaatatttgtgatttataatggtgacaaagtcacaggcaatgatgctattactgtagtttgttgattacacttatgatggaaggaaatcctaaatttcaacagtaggttagtgaaaattaaagatgtaaattttccccatttaagttcatggacccctgaattctacccatggaccccttaaagatctaggtccctgttctagatggtagtatctggtttccctatgaaagtgtggatgctatggggtggggagctctcaggagcaagatttctaagatatgaagatacagttgaagatatttcataaatttctctattgtacaatcttctggaaaagaaaattgttgatacatatggttgaagtgtggcatggttgtattcttgcttatgcccacatcatctgttacccatgaattatccagagtgattctaccatttgatgctttactgagtatatcacaaatactttgtatgtatttcttggtgttttaaaaatgcttgctgctcaaatgttacatttaagtaagaatgtaaaaagggatttcttaaaaagtagaaatctagctcttgaaagggaataattaaagagatgaagttagattctttccattgaacctgattgctaggttacacctagcaactaaccaaaaaaatctagcttttgatcagcatattttccattaaaaatgttcaatgctggcaatatttattgtgtactgaaatttttgtgtttgtgtgtgtgtgtgtttaatttatttagctctgccagctaagcctgagaacatttcctgtgtctactactataggaaaaatttaacctgcacttggagtccaggaaaggaaaccagttatacccagtacacagttaagagaacttagtaagtacaggagcttgtgttttatcagtcagggcatgggggaggcagaggcttctgattcattcatgattcacatcccatatgaagcaaaaagtttcctcaatgacagcttctgggtgattactgtgtgcagccagtggcttgtggacgggatctggagctgcagagggaggggaggcatagccagtgttgacctcctcctggattccccattggctgagatgagtcaccagttataagcacagtggaaaaatctgtttatttactacactcaactataccctgcctctttccagaatgtgttatataaaactgttcattctttctggatccagatatagtaagtaaggttgtaaacccagaactaacaggcaattgaccatggtctgccactaatttgctgtgt

SEQ ID NO: 44120 - DNA, 602 bp, Homo sapiens
attcaggcattacgctccatctatgtgtataatcagtaacagaaggggaagccctataaattctgggaaatactgtctcctaggcaaatgtctggtgagtgggcccaagttcaaggctgaaaataagagtttagcttaaagtcctcaggattccaccttaaacttctcgccaagggtttgggactggcagtgcggccctcttagctaggacgcctggctggggcgcctggtccagggaagctggctcccttctcagagggagaggcatggaaataaaagactagggcatagggtactctccaacctttggatactccaggcaagagatgactcagagccagaccagactttggatgggctgagagggaatgtgtcagctttttagcccttactcctttacacgagtgggatggagcgaaagatacaggcagaaggaaataagggtggcttgtttacattgttttgggcattcttctagtttagcctcatggaattagatgaaatttagtaaatcccctcttctggcacttgaagtgttactatcacagcccaggatcttattcatccctggagggtaattacctgattgtagtttagtatct

SEQ ID NO: 44121 - DNA, 1338 bp, Homo sapiens
caaagtttctcatatcacagtttctctcttcttatttatttatttattatttttctgagacagattctcgccctgtcacccaggctggagtgcagtggcatgaccttggctcactgcagcctccgcctcccgggttcaagtgattctcctgcctcaggcacccaagtagctgggattacaggtgccgcaccaccacgccaggctaattcttgtatttttagtagagacggggtttcaccatgttggccaggctggtctcaaattcctgacctcaagtgatctgcccactttggcctccgaaagtgctgggattacaggcgtgagcctctgtgcttggcctctcttcgttatttaaacacaaaagttctgtttgcgaaagacccattcactaaaatgacctcatccaatgttaatttttaattttgagaatcacacggagatcaccagaaggaactggcataaaaggagacaagggatttagtcattattcctgggatatgatctcaatattaactaggttagatttcagtgtaaagttttttaaagaccattttaaaaagcaaaatggtaacaggttacattactgggatggggggaaagtctcttaagataaaagtggatacttaaggcttgaatactgttttccacgacagcattgtctgctgtctctcacacaactagatggaaatgttaggaacgagctcccaaaacctgtgcctatgattcacaaaggggatctggtaatgacgaggaaggacctcagtgtccaattgcaagtgaagagttgcatggaactatcttcataaagtacgagtgaacaaaatcaattctatatttctgcattgttccacatcatcttatttaaaatatggatcataggcagacatctgactatttaatcaacatctgtaaagctcacacagttaagctgtccaaaaacttttcttgggatcttctcgttgaggaattgggggattgttttatactgggagctgcctggtgtttggccaggggttggtcgtagcctggtttgtagggcctgagcctacttgcactttctgatgtgttcttaaggcggagcctgatcctggttcactccgtcttcctcactagacagtaacttcccaaagggcagggccgtccttttataacccacaaacccagcgttttctcctgtgctgttggaaagtttgctggcccctcttctctggacctcattttcctcgtccaggatgaggagtttggataaaatgatttaataaggatccatctgactttaattttctctaaatttttgcttttggattgagtatatattttgcttcaaatgaaagctct

SEQ ID NO: 44122 - DNA, 2423 bp, Homo sapiens
ccaggtttgagatgcgaaggaggcagattcctgactgcctatggcactgtgcaactctggattagaagaaacctgagacacattttaaacattttttaaaattaaaaataacttgtttattcacccacttacctgttcatataagcaagctctgccaaacaccgagcactatgctgggccaggagaggactgagctggggccctctctccagaggcccagcagtaggtgccaggatatagaaggcccttaactcagggggaaggagagagaagaatggaagatttccctcaagagggtatctatttgagttgatttttggtgaaccagtaagaatttcccagcttaacagggactggggactggagaacattctaggggaggaaatcatgtgcatgggctaggttagaagaaactcagtatgttctggaaactataaagtgtgcagctggggggttggaaaggtccagcgaggccccaaaaggacagaaagcaaatgtggggaatgaggtcagcacagcggggcagcagcaggcagcccctctgggagtggcaggagatggagaggagtggctggcggcaccgtgaaggtgaggcaggctggaacgggtgctcgcgctaggcagcgggcccggggaagtctgtggacagaaccacctggggtaggaccgtggtctgagcacccaggaaaagcccctgccggagatcctcctgtcactagttgccatgggctagattccaccattagaggagtctttctttggccaaaagaatgagactccaggggtcgtgtgagggtgcattctcaggaaagtgggacacattgacctcttttgcaggggttgctctatagggtcagagcaaatgtatgtgctagtaggggtggggagccagcctcggagtaaaccttgagggcataaggagaagtactgctctgggctcgaggctcagttaggacacttcaaggtaggcaattgcagggggctgcttgagggcacaaggtgccccatattcacaaataagggtggtggggagggagatgaggggaagagaaactcagaagagtttgaagggcctgggaagcaggtgtgcattctccttaagctagcctgggcatgacgtcatcaagaattttgcttaagtggttgggtacaattggtgtacacatcaaagaatgcggactttggatcaggttggagttggaactccactgtttgtcaaccacatgaccccgggcaagttattcaacctcttggaggctgcatttgtaaatggtgctggtatttacctcataagtttctaggatttcataacccacagtaaacacttcatagatggcatatatttgctcacctttggacaccctgctccggcatgtggcccccagcaggtgatcagaaaggtctgccggttcatttgaagaggagcggcccctcacccccagcagcaatgtctagtctcgattctgaccgtggcagttaaaagtttcttggaggtcctttcctaggcactgatgctggctgggtagccctggtgttcgtatgtctagattgaacaactggcaaaatccacactgactttgacctgaagagtggctgacttttcattctcagaacgcttatgcagaattatggtttctattgtcagaatctcagtgcctttttatttaaatattccccttcatgccattcctttaaaagcattatccctctcataaagcttatagagcctatttccaagaattttctataaattcatttaaaagctatcattagtcaacaggctgcttctgactacaggcaagactgcagggaaaaccttttcctacggggaagggacccagatgtatacttaatagttgtgtcttggacctgttactaagtgaagattgttctaggaaagtaggcctggactgaggtattagatttctaatcaacaggctggtctcattcagagtttgaaccagcactctgggggagaaaccacttgtggccgttgaattactctggctagcctgtctcagaaagaccatccacagccagggctaatgagacagttgaagaaagagaaatactttacctgagggttttggtttttttttggcttttatttttgtgtgtgtggattaccaccatatagctcaccatgttatcccagaaagactacaatttcatacagaatgcacagatgtttaaataaaaagccatttaagtgaggggataattctcactaaaaaaagctcaaaaataagaaatgacaattctagatacacttttttgacatgtaaaatgacataaccatagtcacagggaataaagaatcaggtttgaatgtccacaggtttctaaaactaagctctggcttcgtatctgttgaaaatctttagcggttggggaaaatagctatatttaaaaacaaatattga

SEQ ID NO: 44123 - DNA, 5938 bp, Homo sapiens
ctggtaaatcctttgctcattccaatccttaaatgctcactccaatccttaaacgatcattccctaattttaatatctacaggattttctgcatcactctgcatttaattaaaactgctttgcatccttgtagtttttttcgtataagtttgtcaatccaattattataaactctttgaaggtcctgattacatctcctgcacctttgtgagttcgtacagcaggtagtaattgcttagtatttgctgtgtaaaataataaagcacaataggaacctcaactctgatcattctgcctttgcaatcaaagaaacggagaagctgtgagaacattccatgcttctctaggagccaagctgcaaatgtattagggccagagaattctgactcccattaaaatgagcagctctgaaaggagggagcggggaatccctccctgccactgtagaggatttatgggttgcccttaagttcccaaaccaaattgtggcactggggtttttatgagaaacgtgtcaacatgacaaaatgattcagagcacaggatttggagtcacacagatctagttttcagcgagactcctgtttccttctctataaaggggacattttaacacctacttcacatgtatttaactttcgccctaacactgaactgaagtgcaaagccttggaaacaaatttaaataaattgaaaatactgcaattcacaaataagagtgagaacaacatttttagttacgtaagactatattatattaaattaggtggcagcagtatttataataatctaaattgcctgtgagaaaattaaactggtattgtcaatacatacttaaaataagaaaaaaatcccactacagtctgtcctttttgacactttctccttcctgtaatttttttctttcactcaagattaaaaacaaacgttcaagattatccctaaagagaaatagttggaaagcacaatttaatagcaagttggttctataaatgtaatatttcagttcatagttcaaaaatacttccaaataggaattaacatgaatttaagaaattaacataatggcacacagctaaactgatgatctgagtccgtaatttcaaattaagagttgttccaacttgaagctggcagtcatacacagtttaaagggtttgtttacagcactgtcaaaagcaaataccacaatctttcagaaaattcaccctggcattctaataactagttattttaaggcagtataattgttgaaatacttcacaaactaagccaaaatgcgtttccttctgaaggcaaaaaaaaaaaaaaaaaaaaaaggtgacgtcttatttttaacctgtgattttttttttttttcagtttcggattatgaaataaaatgctgttcatccactgaagaacagacccttgcttcctgcactatcttcaaaagtttaggtcggaggaggtaaaattttaaaaactgatttgttctccttgggatacagtgagatgtggaattcgttaggaatgataattattaatagaaaagatcaaaagaaggaaagaaacgttaatagtgtttataagcattgtgaactttcaacaaagctgaaacgttacgatttcaagatgaaaaaacggctttggggaagggaaatccacctcgagaatgaagacaagtgcggagcgaatagaatttcaggggagatgaaaaggggattgggaaaaacgtgggatctggtaacaaaaaggggggtttgttcttgaagggcgttctgcggggcgggcgttaagaggggtgcgtgcgtgcgcctgggtgaagtttgtactcagggctgcgataatcgaggtgacaaagttgtggaagtagaattcggaggtccgggagcaggaaggggaaggaatgtggggatttccaggctgggctgacaagttccgggcgctgctctcagggggaagggaggtctcctcgagtgccagatagcccgtccgaaaccaccgacactctaactccagctacgcgacccagcacccggcccctcctcacctcaggccgcgccgcctcgaccctccgcgtctccacagcgcacgaaccccttggcgccaggctgggccagacccgtcggcctggcaggcgcggcccccggttcagctgcgccggggcggcccagcgcgactccgcgggccttttggctgctcgccccggctccggaacactgtcagatccttctccgcagaggtagcgcgccaccccagtcccgcggcggggcggggcgctccccaatcccgcccagctgcgcccccggccggccaacgctgcgccccgccccctaccgggacctaggcgctgattggcccctgagagaccctttgcgcccaggcattggtccagtggccgcctgtcgacgagggggcgggactccgaggggtagcgattcccgtaacgcggctcttcgcgtcccggattccggtggctgcgtccgcgtcgcctctcccagactagatcgaagggttccccccacctcccctctgtgggcggaaagagcggaatgttccatttttctgtggaataacggggtcatgaactggagcccgggtgctgcccgccgcccgctgcccccgccctcccttctcgccagggcgcctgcggcctctcttcgcggccttccccgagggactcagagccgcgagggaccgcctagctcccttggggatggggaaggcgtgggagcctcttggggaaagtgaagagctcggtggccgtgactccgcacgagactgcggcagattgtggcggcggcttctctccaagacttacgtaaacgagccttgccacagtacttttttaaattagtaaatgagtttgggtgcgattgatcagtgagccccagaggtggtggcccaccaagcgactagtgtttctttgcggtttgtacctccccgtttatgataaaaaataccgggtaaaaacctattcatcccgcctccgcccccccctttccctcagaaaatggacctcaaggctcatgatgtttgtttctccccaaaggaagatgagaatcttgagttaaaagataaggcatgtgcgtgcgtgcgtgtggggtgtgtgcgtgggtgtctgtaaaagtaaacacccaaaggtagaggtttttgtggaagaatgagaggatataggaaggaaataatggtttaatgaacttaaattatatccataaattaacaattataaagttcttcattatattgaggattcagatagagtaaaacatagatcgaattttaatctcttagttgttgatcagataatttataaaagggcaaagtgggcctgctaacggagtcgcaggcaaagtagatggtgctgcagctgatgtgttcagctcttgctcctccctgtcatcctatatctaacctatagattgtgaccagattctgttctagctttgccatttagaggggtgtttattttaaaacaaatttttataaaaatttgttaaattgaaaattttgtatagatccaggaaacttgatttttttgttgttgttcacagtctcactctgtcacccaggctggagtgcagtggctggatcatgctcaccgcacgttcaaattcctgggctctagcgatcctcccacctcaacctcccaagtatctcagactacaggtgcccctacaatacctggccaatttttaaaatttttggagagacaagattttggtatgctgacccggctggtcttgaactgctggcaacaaacgatcctccggccttagtggcctcccaaagtgctgagataacaggtgtgatgcaaagatgtatttaggggagatgtatagtggttaaatgtaccctctggttctagattgcctaggtttaaatgctgatgcctctatttctcatctctgtgaccttgggcaagtcttttcaaatttcttcatctgcaaaatgagaataacaataccaacctaacaggattgttgcaaggattaaatgagttaaaatacatacagtgtttggcacatagtaggtgctctgtaagtatcagctataatcattattgaatgtctactcggtcaacacttctgaaatattttagtatcacaacatatattaaaaatgatgatattttgctggacggggaagggcaggtacacagaagtggattgatatgtcacaacacaccagcctgccttggcaccattaggaaaacaaatgactgagttagtgcttttatgggtgtctttttattggctcagctcaggtcctgctcccaagaaactcacattttatgggagtagttaaagtctgaggccaaaaggatgaatcaatattggagaagtatttttcagagcaacaggacggaagacctctgctgtgctggaattacatgactttgcagatacctctgtagagtattggccttgaaattacgaatttcagattaaggatttgttactagaaagccttgtcaaaatgcaaaggtaagtaggggaaagtagtatattaatggagaactctccatttgtgtcctgtgaccatttgagattttagatatgtcaagagcaggccgggtgcagtggctcacacctgtaatcccagcattttgggaggctgaggcaggcggatcacttgaggccaggaattcaagaccagcctggtgaaaccccaactctattaaaaatacaaagattagccaggcatggtggtgggtgcctgtaatcccagttacttgggaggctgaggcacgagaatcacttgaacccaggaggcagaggttgcagtgagctgagatcctgccactgcactccagcctgggtgacagagcaaaactccttctcaaaaaaaaaaaaaaaaaaaaaaagagattgaggaaactgtacagtgagaaagtaacatgaaggcaccaaaattacaattacttgggagtaagtgagcaaagcttaggaaattgtgccatggaacaaaggtgataaatgtcaaagacaaactttgcctgcatttctaattccctaaatctggtgctgactaggatatccctttacttccttgtctgtgcccagttatgtttctgaaattctgtgtcagccctggaattatcctcatgttctgtatcaccttaatgatttcagcatccatgttcatgactcattagcactctgacctcacaatttctcatcgttttcttttccaatcatcttcaacttcactctgtatcagcaacccacagatggagccacaccttcaacctagtcatcaatgaaattacttcccctccaaaatgctggattgtgagtttccctctctgtacctacagccacctacccccatctatctctattctgtggtcattcccattgaatctgtaatttgtcctcaatgtgacagcctgacagccagtctttcttctcatagtttatcagctgtttcctatcattttttatcttacttaccagtaagaaccccctttttttttttgagacggagttttgctgttgttgtccaggctggggtgcaatggcacgatcttggctcaccgcaacctccgcctccctggttcaagtgattctcctgcctcagcctcccaagtagctgagattacaggtgctcaccaccatgcctggctaattttttgtacttttagtacagacggggtttcaccaagttggccaggctgatctcaactcctaaaagtgatgggattacaggggtgagccaccgccccccaagaacccttttatcaaccattttaactgcactattctcttcagttcccttgaccttcagctatgtttaccttatcaggctatttcctaactatttcctttttccttgagctatcagccccaccgtaacatttattcttagtacagaaccttgttttactcccttaaaatcaagaccatcatttgtgagcatccttgacttttctccaacttaggaagcaaataga

SEQ ID NO: 44124 - DNA, 1858 bp, Homo sapiens
tggcagagcgagactccatctcaaaaaaaaaaaaaaaagagagaaagaaaccaaatctctcagtcctacaacctcaaggaactgaattttgccaacaaaagcagatccttccccagtcaagcctcagatgagacagcatcctcagctaacaacttgtttgcagcctcatgagaactgaagcagagaacccagctaaactgtgcctagactcctgaccacagaaactgagataataaatgtgtgttgttttaagctgccaagtatgtgataatttgttatgtagtggagaactaatacaacagggaaaagttaaaagctattcacataaatatttataatggatactatttctacacatttaaatcaagcttctcttacgttcataagaagatacgaatctggagaaggaaattatatcaagcagaacgctgctctggtgttgtgaagacgggatcccaccattctaatgtattcaatttatttattcaataagttttgagcatcaactatgttccaggcactgagatattaatctaaggaagacacacgtgttgtcctcattgaggagctcaaaagtctaatacataaaccaacaatcatacaaaaatcatagccatgttacagtgctatgaggaagatgttaagagaatattctggaagtactcatacataaatacttcagaaactgggcattataagaagtcagttgcctctctctactttcagttctacatttttataccttgtagtggatttaaaatggccacaaattcttcaatactcttctatggagagatttgagggctatttcccttcatcttgaatttaggcaggcttgttcagggtctggcttttaagaggagctttcaccttggtctgtggaagtcctgagtcactgtgtacaaagtccatctaccttattacaccatctggagagagctgagactacagggagagggggagtggcccggctgatcccagtcttcctagtgaccctgcccaggaacttggcatgtgagtaaagccatcttggaacctccataccagaccagccacgagatgaataatactaactgatcccagtcaatgccacatagagcagaagaactgcctaactgaattctttccaaactgctgactcaaaaatttgtatggtataataaaatgtttgttttaagtcactgttttgttaggagtaataagcaaccagaataaaattctaatctttatcatgtaccgtgctgaaaatctgaccatctcactctccttaaaactccgtcaatcccttcccattacccaaatccctcttgtatgtcatagaagtccctcattacgtgacctctacctacttctctggtcttgtctcctaacatggcctccaactccaggctctcatattacctatttgctaatggttcctgggccagcatccaacatactgttccctccttccatgccaagaagagacagcttattctgtttccttggccggtcattgccttcttcatttgctttgcctaacttgctcaccgtgtaaaaatattcatctaagtagttacttcctctcagaagtctgctctaggccatgagaaactcacagccaaaaatgcaaatgattccagatgatcattcactgtagaaaaggaattgatgggccgggcgtggtggctcatgcctgtaatcccagcactttgggaggccgaggcattaggatcacaaggtcaggagattgagaccatcctggccaacatggtgaagcccggtctctactaaaaatacaaaaactttgctgggcgtggtggcgcacaccagtagtcccagctactcaggaggctaaggcaggagaattgcttgaacc

SEQ ID NO: 44125 - DNA, 1602 bp, Homo sapiens
taaaaataactgaagggaggttgtcaaaatatggatctcccccgtctcccaggatctcattctagcaaaagttctcagtcttggctacatattaaaatcacctggagaacattcacaaaatgcccaggtatacagcctacctctaagaggcattctgagttcattgttctgggatataatcctgctgatattgtattaaagctccaggtacttttaaggtgcagccaggatcactgccccggcaatcctgaattactgacaggagtgtgtcctaatcctggtgtgctgcccccaggtgtgttggagtgtggagaaaaaaactcgagaaccattaatccagtgtttctcaaagggtggtctgcagaacagcagcatcggcatcacctgggaacttactagaaatgcaaattcttgggcctaactccagacctactaattcagaaactctcagggtgtgacccagcaatctagggtttcaggagccctcaggtgattctgatgcatgttgaatttcagaaccactgtcctaatctaacctgtagtattctgaaatgataatctgaatataattgagttagataccttcttttctgataaaaagaacattatatctataagcaggtgtagggagctttgtttagctaaagaaattaaagtgctatgataggaatgttagacattaactagaaaggaatctgggaataggggcagaggttgttcatgattttctttttgaggtacaggatccttcccagaaaaatcacaccatgtggtcagccatcttctctccttgagctaaagctctttttgtgttgactatgagtttatattttaacctactccaggcaaactcttccccataatcaaataaagttttcaaagacagtgaagattagcaaacaaagccttgcattagacagaagggctgggaaacactaaaagcaaccttgagccaagatgtctccctggtaatccagcaggtccaccactaggatagtaaataactctgatgacatcatggcatgatgtctggtgactctcggtcaccacagtaggggcagaagagtgaggttttctgatccactgatccatttggtccttcagtgacccctttggcgctgatagaatcttttttttttttttttttttttttttgagagagggtctggctctgtcacccagactggaatgcagtggtgcaatctcggcttactgcagcctctgcctcctgggctcaagtgagcctcttgagtagctgggatgacaagtatgtgccactacgaccagataatttttgtttttttgttttggtagagatggggcttcaccatatattgctcaggctggtcttgaactcctgggctcaagtgatctgctggttttgacctcccaatgtgttaagattacagatatgagccactgtacctggctcatagaattttttttttttttttgagacggcgtctgtctctgttgcccaggctggagtgcagtggcacgatctcgtcccactgcaagctccgcctcccaggctcacgccattctcccgcctcagcctcctgagtagctgggactacaggcgcctgccaccacgcctggcta

SEQ ID NO: 44126 - DNA, 1437 bp, Homo sapiens
gagatcaagacaatcctggccaacatggtgaaaccctgtctctactaaaaatacaaaagttagctgggtgtggtggcacacgcttgtagtgccagctactcgggaggctgaggcaggagaatagcctgaaccaggaggcagaggttgcagtgagctgagattacgccactgcactccagcctggtgacagagtgagactctgtctaaaataaataaataaataaataaataattccagagtccaggaatgcattctgaagtggagtattatggactaaatgtttgtgtcccccaatattcctgtgttgaagccctaacccccagtgtggctgtatttggagatagggcctctaaaaaagtaattaagattaaatgagattataaggatgaggttctgatctcataggcttagtgtccttataggaagtgacatcagagagcagtctatgcacaggcactgaagaaaggcatgtgaggacagtgagaaggggtcacctgcaagccaggaggagggtcctcaccagaaatggactatgctggcaccctgctcttggacttcccagcctccagaactgtgagaaatacacttctgttgtttcagccacccaggctgtggtactttgttatggcagcctgagctgacagtgagtgtggggctggttcctgggggacacacccctgcagactccttggtctgtgaggaagaaaggcaaccagagaaaagctagagtctcctctaaagagcaggccttggtgtagggacccccttgagctgcaaggacagaacagctcttcaaaggtgctcagggagaagtggagaaatgttgaatttcatgtatacttggcctgggcagacagactcaatgtggaaatttaagccaagaactaagtggacctgacagttatggtcacaggctgtttggctagaaattatcttagaggtcatctagccctcatacagttagagaacagaactccagggactttccaaaggttgaacagaaacttgttgagatcatggctctctaaaatctcaggcatatacctttgtatgtgttaggttataaaagtttcccaatttgtggattaactttcagaggcctgctgaatttgctaggaggagaactttgaagaatgcattaagaattcttgcttcactgcaggccagagctacttgtgtttgcctaacctggagctgatgaaacaaagcatctggttaaaaaattatacataaggccgggtgcagtggctcacgcctgtaatcccagcaccttgggaggccaaggcaggtggatcatgaggtcaggtgttcgagaccagcctggccaacatggtgaaactccatctctggccaggcgcagtggctcatgcctgtaatcccagcactttgggagcctgaggcaggcggatcatgagatcaggagatcaagaccatcc

SEQ ID NO: 44127 - DNA, 830 bp, Homo sapiens
aaatattaaggtgttagtttgaacttctgaattctttattttttttttttttttgagatggagtctcgctctgttgcccaggctagagtgcagtggcgcgatctctgctcactgcaagccccgcctcccgggttcacggcattctcatgcctcagcctcccgagtagctgggactacaggtgcccgccaccacgcccggctaattgaacttctgaattctaatggctgggagagggtgggacatggtagggaaaagtgcagatatgaatctaagaggctcgttttgaggaaggactgccagatttctacaaagcaatcagaaaaaggatactactatgctctttcaatatcttgttcttaaaaaacaaaagtgatcattcctggaactctgataagaaagattccagtaggctgtttatttacttaacattgccattgcctggactgaagagagataatcacttttagtttcaaactcgatctagtctataacacatggaaagggatttcatgtgttttctaggaagaaacagatgttacccataaaaaacaaagcaaaaaaacccaaaaaatctatattgctattgcaaaatctgagtgtgagaactcatgtcatattcatacacgataaatgccatatgttatttgtataaagaaaggtaataatgcattttcaaataattagttaaaataattttggttggtcaaaactgtattagaagatgaattctctgaggccaactggtgactgtctgaggctcccacatttacagattttatgttatttcaacaaatatccatggagtgtgggagaggcactgtgctaggtg

SEQ ID NO: 44128 - DNA, 1370 bp, Homo sapiens
aaaattccagagtgttatatccatccagtaaatggttatggagctctcctataaattactgactcaaggcaattattgtctggaatttaacgagagagagagagagagagagagagagagagaatttgacaaacttggctggcatacacattgatgatccttaaggaaaacaataaaactgcctcacaggccgtaagggaaagcacacactgtaatgacatctcagcaactcgtagcacagtgcacatttcccacaaggctgtggttccccgtgtcctcacccgccttggttgtaatagtggctagcaggccgtgttccatcattagtaacatctctctttgtgggaatagtggtgtaattgtggacagaagttcatgttgagttctatttatagcttctggtgactcattaatatgttaccttagcaaagggtagctccagagccagccttttattactgtattagtcaaaaacattctcactggggtattctgatacaatgaaaaacaaactgtaaaacacttctagcaatttgcatgtcagccttttaattggtgtgatattagcacccttgcacgctttattggaagctacagttgtcaaaggtacccatgtctacaagtgcttaccaacatgtaggttctgtgttaagggaaagaaaaaagaatccacttgtagtcttctgaagagttaaactctcagttgatctggaaaatatgttaaccaaccttcaaaagtattttcgctcccggaagtcttcaagccctctgtgactatgccctttgtaacatttttacacatgtgaccttcacactcaccactttgattccaacagcgaagtcgaagtcgtggtcaggagtaagactgagctgggtagagatagtaaggtaagactttgaagctgctgtacttttatcaattcagtctgaaaaacagtctctgtggttaagcccattaaatctcttgtgctttcatagcagcttggctaaaggttattactatgaaggctggagggagagtgggagataacttcgaccagagagctctcactgaaatgggttcaaaggagttactcatcttctattccctttagcggaacctcataatcggatagcacttactctgtgctttgttaaaaatatagcatacaggctgggcacagtggctcacgcttgtaatcccagcactttgggaggccgaggtgggcagatcatctgaggtcaggagttcaagacaagcctgaccaacatggagaaaccccgtctctactaaaaatacaaaattagccaggcgtgacggcacatgcctgtaatctcagctactctggaggctgaggcaggagaatcgcttgaacctgggaggcggaggt

SEQ ID NO: 44129 - DNA, 830 bp, Homo sapiens
gggaagagagagacatcttccagtacagcctggcaagcattctgcggttgacagagcaccaaagatccttataggtcccctttccacaccctttctcctcctgtgttcccagtggtcacagctcccagtaacagcagtgactcagtggttcaaacatcaaagtaaagaggcaattgtctggagttgaaagtggatatttaggcaaacactgagagcagtgaggagtgtgtggaacttggcctggagaaatcccctgggtgatatgcatggatagaacccacagttcagcctgtcactgacctctctgcaactaagagactgaaggagaagatggctgcaacacagagatctctgcttcagtcctggggatccccactgacagtttcgggttgactccactaagagacacactgtagaccagctctgggctaacatgcctcctcagcctccaagagtgcagattcctccctcactagcccaggttgcttgtctctaagaattccaaagaggtgtgtcagctctacaacaaagccaataaccactctgttttgctgagattctcctttacacttacagatgataaggagcttttctagaaaaaaagaggtggtgataaaaactttcttcccttagaatgtgaggtgatgcaatgactgaatcaattgaacaatgcccacatgtttattctcatggcgttctagttatctcccatcgtaattccagtcctaacttcttgctctaaagcatactgataaaaatcaccttttaatacaatcattattgacctcagccattgtattaatcagaagtaataactactgtaatagctt

SEQ ID NO: 44130 - DNA, 1957 bp, Homo sapiens
tctactaaaaatataaaaaagtagctagatgtggtggtgtacaccttgtagtcccagctacttgggaggctgagtttggggaatcacctgagcctgggaagttgaggctgtaatgagccatgatcacaccactgcactccagcctgggtgacagagtgagacctgtctcaaaaaattaaaaaaaaaaaaaatcgacaacgctattttcaccttacaatgggtttgttgggacataattccatcataacatgaggagcatgtgcatatttctcatcatggtggggttttctaaaatgagactgagtgccaagttgtgctgtggtagagctgaaacggataataagctggagccacagcaatctatttatattggtttacttccagcaagatgagaacattggaattcagtgtttactggaagaaataacacctatgttaaaccaggtgattaccaaagggaactaagaaaaatgaaaaaaaatcagcaaccctaacttccaacaactctaactggtttagcacaaagtactgagttggtgggcactttccacaaattgcctgtgtagatgtacaaacccaataaacaaattcaggaagaaggctttgcccagggtataccacactatgaaatttgaatgaattttctggaacaggaaaatgatggtttggggattatatatgtgaattatgggactagagagacctcacttttctttctttttgagacggagtctcggtctgtcaccaggctggagtgcagtggcgcaatctcccgggttcaagcgattctcctgcctcagcctcccgagcgccaccacgcccagctaactttttttttttttttgagactctgtcgcccaggctggagtgcagtggtgcgatcttggctcactgcaagctccgccccctgggttcacgccattcttctgcctcagcctcctgagtagctgggaatacaggcgcccgccactacgcccggctaattttttgtgtatttagtaaagacggggtttcgccgtgttagccaggatggtctcgatctcttgacctcgtgatccgcccacctcggcctcctaaagtgctgagattacagccgtgagccaccgtgcacggtcagaatacatttctttacttcttttgaagttaggcatgtccacacagtttgacttggcaaatgaaatgtgagagtaaataatgagattcacctctcatttcctctggtttggtcaccaaagaagaacatattgaaatggaatctacatcagccaactctgccggctggtatgagacatgtattgtgaataagaaacaaaccgtgtcagccagtgagatttggaggttgtttattgttaaagtggaagctagcctaccctgactgatgcaggcagtgtagggctaggtaatctacttgtggatggacatggattcagaagtagcctgtgacacagctgaacaacttaacagtctgatgccaaacaacctaacaggttgatgcttaaagaatgactcttcaaagatgagaacagcccacaaacaaaacaaaacaacacaaaaggaaaattcttcagaagctatgtcctgaagtccttctgtttgtaacaggactttctttccctctagctactgcccagcttggaaggctgatccgtacactttctcctttacaatctctgattcatgcaactatcatcgtcaaaaagagattgtggactaggctgggtgtggtggctcaggcctgtaatcccagcactttgggaggccaaggtgggtggatcacctgaggtcaagagttcgagaccagcctggccaacatggcaaaacctgtctctattaaaaatacaaaaaaattagccgggcatggtagcgtgtgcctgtaatcccagctactcgggaggctgagacaggagaatcccttgaacccagcaggcagaggtggcagtgagctgagattgcgcca

SEQ ID NO: 44131 - DNA, 855 bp, Homo sapiens
tctttaatactatgtaacattaattatattataaaagtataataatattattattggtttgcaccttggcaatttaaaacatttcatccaaatttataaatagttgagaagaatagaaaaataactggctcctgttgtactcacctgctctcttgggagaggagtttgacacacgccgtgtgaccgcagtacagggcataggccaagggcgtgctctcattgatgtcccgcaggttgctgtccattcccaactccagcagtgactggacacattcggccttccctgcagctgcagcccagtgcagaggtgtcctggaggggccatgtgaaaaaagcacaagcgtctgagcatgtgaattgttcaggctgcttagccagcaacagctcctgctcaaagtcaggttgaggtagggaaaatcttgttgccatttacagtatagaaatagtaagtgttaaatgagcccgaaggatgatggtggacatgtgtaggggcctctcctctagctctaagtattccctgccatctacactctctggcctttctaacaatttcctagaagaggaagtagtgggtcaaagggtatgaacagttttgaggttctttatacatagtgccaaactgccttccggaagattgagtcaatttgtcctcctactagctatgtttctcctccttctgtaatactgagtattgtcactaactttaaaaatctttgtccattttggtaggcaaaatatgcttcactgtcattttcctttttatttaatttatagtaaggtttgaacttttgaaatataagtttgtttgccatttgagtttcttcattgaaatgactaatgccttttgtcattttt

SEQ ID NO: 44132 - DNA, 1537 bp, Homo sapiens
catgttgccaaggctgctctcgaactcctgggctcaagggattcatctgcctcagcctcccaaagtgctgggattacaggtgtgagcctggcccacattcctatgaatggggtcttctgtgcaaagaatgactatccctctggtaagtcactcgggaaatgggcagtcctggggcaggaaaggaggtcatggaagacctctcctcagccttgtgcagggcctgaaccttgggcagaagggcacttctgagagggccaggtggtctctcaggcctggaggcagcctggcagctggacagagaagggctgggttgggtatatctgtgaacggggttggacatgagtatttggagagcatatatgtatgtatattgtgtggccccagaattaccaggtacagattgtatcttctgtcaattaaacacctttttcctgttatgctagaagcagcaattttataacacgtaatagggccatgtatttttcaacacagtgatcaatcacactgcatatttgaatgtggcagatgtgattagttccattctatgtgagagaggtctccaggagacatttattctgaaacaggacgggtccccagcagattatgtcctcccatttagacagtgtattgccaataaattcagcagatggagggctggatgttgatctagtcaggcttaccaacatgtgatgattcactcagaagctttgtgaaatactccttcatgacaattactaagaccgactgtttaaattcctctgaccatcaacatggaagcgatccagaagaacagggttttgctgagtaacgaggggagcatatagataatctctaatatactcatgtccttggggccagtctgtggtacctaatttcaagttgtctaaactttagctccttcttatctctaagcttcaggatgtcctgcaaacacagccaatctgcctcagctgtcacagcagggggctaaagggcagggcccatgattcagaaggaattcagcagagacaagagtgggcggatgtggtggccgctgaatggcaggagataatgggtccaaggatgcagcgttggttgagctatcagtgactgaggaatgattaatgaaacatgtaaacattccccagagaattcccagaaatacacagagagcaggacttggtaacagactttcctctctgaagacaagtaaactgcatattaaagcggactgtgacctcatagactgatgaaatttgaaacacttaagctacatatgctgcttctgggttatgtgttctgtgtcatatcttaggtaagtactacaatgttttaagtaccatagacttatgatgtgttttactatctgggaggcctagttcttcatattttccttctacctctttttattactactttacttttctttccttttcacaaaaactttcaataggaaaaactttcactaaaaaagagaagaaggaaagggaaatcacaattattgtaaatacttaaagcacataaacctgtgcaaactttgaaaaattaaactatttat

SEQ ID NO: 44133 - DNA, 682 bp, Homo sapiens
gacgcatgtcagtcagaattacctggggaggtttttcaaaatgcacatgcatcctggatctagggaatcagagtgcagtggtgttgaggtgactatgtagaaagtgcctgcttctggtgccactttcatctcagctgagaaccaacacatgaggagcttcctgggagcccagccaggttcctctgtggccaccgctacagtggtgacccctgaccagccagaggccagccccagggcatggagtcctgggcagagactggcagcgatggtggcagggcaggtgattagatactgaaagtatgtaggagggtgctatgggcaggtggagatgacaaaacaagccttgctcactgcatagctttgcagagaaactggtgcagagaaactgaagccaaggttagagggatgaaaacagagcagtttccagatcacttctgttttccccttacatcaggcacacatgtcaatcctgaaagtcccaggtgcccacttctgctgtacttggcacatggaaatgctgactgaaaccacagtcagggcagcagaaactattctcacagggtcctggcagtagctcagacaggtgccctttctgggccaacagaaatcaactgtgggggtgtctgtgctgaagacagagacgggctggcaagtttatgcaaaggatgctctccttgaaaaa

SEQ ID NO: 44134 - DNA, 1195 bp, Homo sapiens
taggctattaaaaatgttttagattagaggaccttccttagagtatctcaagttttacaaaaagttccttttttagagcttcatatggtggctctgtccttgggttattatggagctctttgggaaagcccttgactgcatcggttactgggcccattttgttgaaattacccagaagttagcttgacatttgttctgcctaagctgtgacccttttgcaaaagggccaggtcagtggaagggcacattgggtattgcaatttcaagagctcagaccagggtaatttggggaggctttctttggtttattctattctgaggattcttgggtgactaaacacatcctagggtcaccaatgatgtctggattcattttggacaaccacagaggactctgaagctctttcttagattgttccttgaaatagaattgattgcctctgaagaactcattcatccatttactcatctaccatatgctagtaaaattgtagttacaaaggctacagagtttctgtccctaagaaagacatgccctagtgggaagacaaatgtcttatttatgattgagacatactggagatattatggcaggacgggaagaatcacttcaatgaacagtttcctgggcattcctctaattccctctctccccctgcgggattatcctgaatgctttgaagaaactgcattcttaggggtacccagaatgacctatccacaaagtggcgtctttccacctttaaggagcatgccaggccttacactgcaccacgatggcttcatgggacaacattgccacccactggtaataaagagtctctgtggaccttcacctgggccctgagtcaatctggaactctttggccatgcaagaacaagttaaaggtcattgatacagctggctggcattgaaacaaaattagtctcatgtgacttttttcaaatatatcaggtgacacaaagcatacatatagaaaaatggtaagagcacaagctctggggcctcacctctagagtctgattctggcactgccacttacctgctagctatgtgaccttaggcaagttgcttaacatctctatgtccgttcttcacttgccaaatggataagaatagtgcctcccccttagggctgttctgagagctaaatgaattaattcatatgaagtgcttaaagcagtgcctggccca

SEQ ID NO: 44135 - DNA, 534 bp, Homo sapiens
ctcttaaacgagaccctttgccttgtgcagcaggctgtagtaattttgtgagcagaaacatttttaccatttctcatgtcttctccagtccctcagggtgtatttcctgagatgataagagtgttttagaaagtgtcagtcatatgagaagaagagagtttctttctaacattttaaagggaaaaatagctccgaactttccacatgtaccagttgagggaacaaacatgcaaagtgaccttcataccgtgggagtggaaaagaagagatttcattctgtggggaggaagtcttgcaacaatattatctcaagagtaaatatctgactgcaatcagatctttcttcctaaccaaatttgtgatgcaacacatgttgtgtttctttgaatgttagcatctctgtgctcttgcgggggtaggttttctgagctgtgaatggcatttcatgttgagcatctctcctgcatgaagaggacctggggaatggaattttctgttttaaggagtgtttctgtgttgaaattcagtaaagat

SEQ ID NO: 44136 - DNA, 1482 bp, Homo sapiens
tgggggtacagccaaaggccatttcaggcacactccataagtcttgtggtaggtccccagtcaaagttcttagcttctagaattgttggtagcacatctgaaggaattaaaagactcagaataaccctaaagttagtgaagactgctacacgattacttccacagaaaaacagtatctccgagtctctataagagcacccgctggtactgcattgctcatgtgatcttttcaggaccgtttcaatgcctgagtaacagtcttaatgatggccagcacttaacatagagctcactgtatctcactgtatgcccagcactgtgtaagcacttcctagaaattgactcttttgattctcactgtatgaggttgaggtaggtactacaattattcccattttatggatgaggaaactgaggtacagagtagaaacaaagtgacttatccaaacttgcacaggtggcaattggtaaaacccaggtaaggctgcagcctgtcaggccttggatcccgccctctgacccctgtgcactgtggtctggaagcactctttcactcagagacaaagccctcatatattccagtgaacttgtgacctctttttggtgctggatggacattccacattttcacattccattctcactgactcacggcagcttgtacccttctttccaccctgttgcacaagctgtgtggcatggtgttttgccttacacatcattgtgctagagtttatactcactgtagcaaaaataacctttaaatattaacccaaaattggaagcacacctgtgaacaattggctggctgtacaacagggagggaattaaggctagtggtaatagcacaaatattctaaagtgaggttgaacaagttcttttaaaacattaagataaatatcaaatggccaagggacaaatagttctcatattgaagcacagaaaaaaagtaaaatttttaaaatttattttctaagattagcataaactggtaaagacacacacacacacacacacacacacacacacacacacacgcgtacctatagaccaattcggtttgtgaatacaaaattgtaagtttcaaattaaattctactggatcaatttcagttgggtattgaaataaaataatgcatcatggccaaatacagtttattctagaatataaagatactttggttggaggatatctattaataaaatatgtcataccaatagaacaaaggaaaaataagtgattgtatgagcaaacaccagaaaggcatttatgaaatttgacccctataagataaacagataaaaagtgcttatctatttcaaaccagttgcaaacattatacgtaatagtgaaacaatagagaagggaagaaataagacaaattctaacaaatgcagtaagatatgaagcaaaaagaaatgaaatgtaataattataaaggaagagcaaaataataataatttattaatagctaactttt

SEQ ID NO: 44137 - DNA, 1686 bp, Homo sapiens
ccacaacgccagctgaattaaaaagcatttgaagaggtgcctgaagctgtggaaggcaggagacgtaagaagcccatatggcagagtttcctgagctaatgtgagcacatgcgatgatcggggctgctaagggaagtaagcaattcctgctatggctgccacaccccagtgggacttgcaggggaataacaggacactgctgtgtccaccactccaggagaaatgtctcttccagagctgctgaaaacacaacagatctccctctggggcagcctgacgccagaggccgaggggaaagaggaaagtgctgtctgatgcccactgcaacttccattctatctgaggcaggccatttcctaaggcttggaggctggcagaatggcaatcaatttcagtcaactgcctgctcacttccatcagtggcttgatgtggcacaaagaatgacaggctcccactcagaataggagagttcaaattctagcttttctaacccctgcaaatctggcaactgactgaatttctctggatctataaaatgggactaattctgtctacatcacaggtatgattaaactggagaagatttgtatgaaaccagcacaagtttcccccccccaccccttctctccctttctccctctaccttcactccttccttctgtgcaagccagcctagctagctggaacaggacataaacaaggccaagggcatgagtttgatgcccatataggaccagagtcctggatagacaactcgcaagttgtgtgctcatgcttctcatcacagaacaaaggcagtttgccactgaccagtgtcactgtggacaaatactatttattcagcaaggatgccaagcatttttaatccctgactcgtcaggaagaagaatttggcaaaggggggaatgggggtggggaataaatgggaataaatccaagtgaggcaagaatgtaattaggagggtcagattctactgctctggagcacagaaggagaagggaggaggtggtcctttcccttggaagaattggcacaaggaccccaattctccctttgtaaacctggaaaagagagccccttgaaaaattttggggttttcattctccctcctggagttgctctgaatcccatggctgtggatccctgcggagtggtgatataatggaaatgagtcctcaaatatctccatttgcactaagcagtttttgtgtgccatgtggctgtaagtgtaagtactatcatgcaggaggtatgtccattttttacttaaatctgtgtccttatattaaaagtagttggagtttagacccacatgacagccaggcctgatagttgggttccctatttcatttgacactctcttttgccccatatgtctccacactaggggttcagcagcctagccatgggaatggacttcatagaggctccttcttcttggctgggggccctggaccctgatgagggctgcccagagccttcccctgcagtgtcaccttcttgtgagctgagtctgaggaggtgcttggcttcccccaccgtgtagagatggtggcccgcgtggtgacagtcatttgctttccctgctttggttggttgcctcactctgcctgctcccttcttttcctccagctctttcttccccatcacaatgccttgttatgatctcctcttcccctcccca

SEQ ID NO: 44138 - DNA, 611 bp, Homo sapiens
ggaccctacttcataggattgttttgagatttaaatgaaataatgtttatattaaacactttgctttattacccattgcttctgagcacctttctctacatctctgcctctctctcaacacctcagatcattcttctgacaatgcccactgcacattctgtgccccccacagccttcctgagctcaaagtaaacatcaaattactgttcctgttgtaaagtgaagaaatcatggggaggtaccagggggtgggtggaagggctggacttggctgcactgtggcataggtgaaattgggctttggcattctgctgccttctctacaagtaggaactggtttcttcctggggcaggcaatgttcatggcctactcactggcatttgccccgtgtttcactccctgattttgtaataggtggatttttcttcctattgggaagggcaagtccctctcctaacttccagagaatgagtcatcattactttaagcccaaggcaatctcattcccctttgccagtgactggtttaagggaaggcaagggatccagttccaaccaatcagatgcaaggagaagtctgcttgaatcttctgctaaggatttcactttct

SEQ ID NO: 44139 - DNA, 791 bp, Homo sapiens
acatccatccagttacatccagcttttctattatttatttattttccttatttttttttgagacacagtctcactctatcacccaggttggagtgcagtggtgggatcatagctcactgcagccttgacctcctggtctcaagtgatcctctcgtctcagcctcccaaagtgctgggattacaggtgtgacccgctgcatgtgggcagcttttctgttctgccaacatttcttttgatgacaggatgggtgtttttccatcattttcttttggctacattaatgtccttgccaaatgtaatgcttgtcttactaaacctaatttcaagagtaaaaaatcaccaaactttacttatcttctgatactgtggcttcaatctgttggacagacatttgtgtctttggttgagatatagaaacaattgaacaaataccagggaaagcagagtttaaggcaaggtaaaactgaaaagaaagaaaatagtactcaatcctatcccaggcaagctgatgtcactcgttcggattgcagctatacaaggtcactctatttgacatcattcttgtttggtaacattttgctcaaactcctagtcctttctataaaacactagattttttattcatcagcctgcagaactctttcaagtacttgcaaaactaaccaaaattttagattgaataatgggttcaaaagacttccaaaccttcaggatcaaacgggaagctaatggaagattttaaagcagtggtcccttcccattgcatttcatgtttttcccccttttacaa

SEQ ID NO: 44140 - DNA, 2646 bp, Homo sapiens
gagtctctgcaggtacccagaattctgctaaaatttggcatcatcaaggaacaaaaccttcactcatgttattgcgataactttataacttctcttttccttatgccccatccaaaccatcctctacacttaagcacaagtgaatttttaaaaacacaaatctgaaagtgtaactcccctgcctaaaccttccactggcttgctattgctgttgtacttaagataaaacctcaagtctgccacatggtctggctgttgccgacctccccaggcactctgcgtgccgctctccccaccactctccgccctcctttccaccctctgttctggctatgagtcttcaagtaagtcattcattcatgtacatatagtataagtatgtatgtatgtagacatatacggaagcagataaccaagttagatatccgtttgactagaaagctctttcccctgtaatgtgtatgcctaactgcaattttttgttcttctgacacacacagaagccttctcagactctctccctttaattatgttccccttattaatttttcataattctcataacattattttcaccttaatagctcttactacaaattatatgtgtgtgtatgattcatgtgtatatatatatattcatattaaaagatcaattagtgttagcttttaaactaatgtaagagtctttagaaacaggcaaacagattagaaacacttttcttccttttttacttccttccttttcttttttccttctctttgctttgttcttttctctttttttttttaaatacaggcataaatatagaagggaggatcatatatatgtgtgtgtgtgtgtgtgtgtgtgtgtgtgtgtgtatatatatatatatatgtatatgaatcatagtttgcctttttgctcctccactaaattgttagctctaagaagtgggacatgtatgctttgttctctgcagtaaattcagttccccaaccccagatattctgggatttgattggtcaggggtggggtggggtctgagcaccggcctttactgaaagttcctcacatggttctcatgtacagccaagtggagacctgtttatctaacccaccttcatcattttaagaaggaaggagctgaggcccagagaggtcacctgacttggtcaaggtctcttggagctggctataagcagattgagacaaggactcagttcttttagggcctggtctctttgcacactataatgtcccttcacttaagttggagaagctttatcactgagtagagagaggtttctttcatatttttgcattcttggaggatgactaactcatgcttgttagcctgggactttccaggttttagcgctttaggtcctgtgggtctcaggtaaaggaaacaaaaatatgccactccaaaatatacttctttggtatattttgatatgactattcacaggaactgcaaaccacaggaaaagctttgaaaagctgtcttttggggaggcggggagatttgcatctgtagaggaaatctacattagtgaaatgaagttaacagcagacacaaacagggttttataaggcctcccttatccagacctaggaaagattaaatcacaggaaagagggactaaagttctgacacttcaaaaggtctgacagataaagttttaccacataagagcaggatactgtctgttctttccgagggctgctatccatggggctctatctgcataacaagatagcctttgctcaccatgccttttctcccctcttcctccaataacttgtcttgccatgccccaagcctctattccttgctgtatggtatataaccttcagccatctggctttccattgagtctcatactttgtgtgtggcttctgtgtccatatgcacattaataaaatttgtacacttttttttccctgtgaatctgcctattgttagtttgttttatagactcaaattatttaaacttcagaagcaagagcgaaggaaattctcttcatccctacccaggcaagctgagatggttgacatcactgtttgcacaatcactaagtccaggttaggaaagagaagcaatgccatacggtgattgaaacccaaattctaaagctagactcacctaggtttgaaccgtgacttgtcaattagatgatgacctcaggcaagcttcagtttctttatgtgtaagaagggagaaataatgttgtatgccttaaacagttgttgtgaagatgaaattagctaatatttgtaaagcacttagcacaaaacattgttcatagtaaaagatcaattatggttagcttttaaattgatgtaagagtctttagaaatggataaaatgatagatatacttttctcccttttttctttccttcctttttctctttccttctctttgttcttttttctttttaaaatgcaggtgtaaatatagaagggagatgtgtttctgaaggtctagcaattgctagagcactaaaatacctctttttttttttttttaaccagcgctcattactgtctgtcaactctaaatgccacccagacatttctaggtagtgcaattttgccctgccaagtgaaagcatttcatgacgctcaatcattaggcagctatttaaaacaattttct

SEQ ID NO: 44141 - DNA, 895 bp, Homo sapiens
tacaggctggacagattccaatagagcaataaaaagagtaaaggaaacagagatttatctgtcgaaggatgcatgagtccaagcacttgtagcttgcattaatggggaggagaggacgatggatggcaactctttgaagtgtgtgtctgcatttaaggagtgattagcttatagcaggagtacatccaggagtgggaagtgacgaaatgtggatgagaaacctctaaactgatagcagaaaatggtttttggaagagttacagggcaactccttgaggctctgatgtttttcacttttcctgactcacttgttttccaggagtcccagtgtctcctgaggaaatccctttcccattcagccggcagctgcagcaggtgggatgggccagaccagccctctggggatgctgatcccagggagcatccaggccggaaggtccaaacgggcaagtgactcatttgcttttcctcccttggtcatgtctatgactcatacactttcattcagtcccaagtatgagaaaggaacatcaaaaagtccaagatgttatcaaatatttgatgaaaaagaaaattcccctctcatatgacccttacagaaaatgtttatttagtcttttcattttgttgacatttctttgatttatcaacattgagaaggtacagtgaggagaaggaaggctgttaagtgagacaaaggagggttaggatggctcagtcattgctcccccgagggagtgatctaagctgctcacccacagacagaaagggtaaatgggctagctcttcattaataagaaaggactcttcgtttgagtaagtgaggagtatttacagtgctgtgtttgtaatcacatggtgcctgtgtatagatggctgggagacaggataaagg

SEQ ID NO: 44142 - DNA, 1342 bp, Homo sapiens
gttaataaggcttctctctgggaatgttttacaaatttcaaattggataatcaatttaaaatatatgcaatccagcaaagagacagcaaataccactaacgctcttcacttggtttggccaaatcactcacctgggaaaaagtagaaatacaccaaaatgcatttagaaaaatgtctggactctcagagccccagtgtttccagacaaacactgacagttttagcttttcctattaccaaggcaaaaggttttgcttttgattctcagctttacaggtttcttttacctttgtcaacctaagttttccatatttgttaacctcttttaaagacatgccatgtacagtagcgcttcctggctagcatgcccatcttgttccccagcccactgtgcaggccttgatcattctttaaatcccagatcctagttccctcttccatgaatcttcccagaccttctcagctcccattcatttccctttcttgggaaccctacaacactcattaagtgaatcattacttctggcatttaattgtgtactgcctgaactattacttattatttacatgtatgtatatcttctctttccagtgacaaaaccggtttcttacacggaggtaattttgttttgccacatataagtccctgcagaatgacaaatagacatttaataaatgcatattgaatggatgaaggcactttgtttcaaagggataaccctggagttgatttgactcaggagaaaatacagctcacacagctcattggaatgcttattgttttgccatttccttgtagtggaaagtcccagtcagttatcaattaatagtatcaacaaccattttatctagtgcttaacaggggatgacatccagaggtaacttcacagacagagcctgttgtgaaacaggttgaattctgccacattttactaccttcctggtctcagaccaatcacttaactcctgcaatgccacatgtggaaaatatattctgttatcaatgagtttacaagcctgtgatactacgctccagaagccagcaggaatgtgatactggtgtaactgagcccctggctttgcaagtttatacacttaagcatctctgagtgaaaagcaattatataaacacaaaggaaccattattagagaaatcatatttatgttcccatattgtatgtggtcagaggaaagcaagacaagggcaagacttgggcaagtgacaagacgtattagcagtggcagcaacagtgctgggtaaacagttgtaaatctcaaacgctgagccgtgttaacattttacagaatgctttgatccttttcagtaagatacaaagcaaga

SEQ ID NO: 44143 - DNA, 1978 bp, Homo sapiens
taggactctttatcatccacttacaaaagtaatggctttagtatctattgtttacttatgtctctaccattccagaaattgagtagagcaggtagcgcagagggagggagaagcagcttcagaggtcaagtcttaatagacaggccctggaccttgacctttggacaccctaactgggcctcttctaccaaaccagaccatgagttgcccccaaaccaattcttctgaagtaaccaaatgtatcaatgaatgaatattaaaatgaaacttgaacaagcctcaagtgcaaaggggactaagaatggagtctggtagggagaggcaccccaaaatgagagtggtgcagaaagaaaattaaaacaattctgaaaatgggtttctttcatttccgagttttgcttctgtcaatccttggggaccaggagaatatggcagcacaggtgcttgagaacaggttgtgctgcgatttagaaaacctattgactttagagaagttacatagcctccctgggcttctggaacctcatctgtaaaaggaagaggttggattcaaagatgtcttttctgctctaatatgttctggtttcaccaagcaagtctttgcctggcatctagaaaagatcctcagcccaaacaaagcaacatcatccagaaggaaaatgcccttcaggtctgtttcaggacttcagtgttcaccacgatggtgagtgacagcctttcttggccaccagctgtctggagcgacccagaggagtggcaggcattgccctcagcggggcaagtgaggaggagctgcagaggcagaggagagacagcagggtggaaagtgactcaggaatgagactgctctccccattcgactctcagtccaaaaaaccacactcctattgtgaaaattagacctttgagcagcgttccatgtgtttattctacttgtatcaaagaggctttcatctccctagagcaaattattaacacattccaccaaagttgtgagggtggaggcctggccttggagaaaaaataatcaccatcataataaagagttgcccgaaacgtgaacttaagaaaaactaacataaaagcccccacttttaatgatagtggttggaaaggcgccaaggtccttgtgcccaggggagcatggttggctgactccttgtccgtgggctgacccttctgtgtccaggaattttccatgagcaggccgtagtgtgggaggtggggacttttgcaggttcagcaggttgaggcactcacagccagttgcccttagccttaactggagaccagattttgttggctgagtgagcagtggctctcgattccaggcaataaatctttgcttctcaagatcatttggttgggaagaggagggagaaaaatagagaggagagaaagagggagagagaggagagagagcgagagagagagagagaaagagagagcaagaacaagagccaactctcagatacagccaagaggagcaacagatataaagtaagcccaacaatatttcagtttcatgaatggattattccctaaagggctgtgaggaatagtttctagatagagattatgccattttctaaagcaagttcacttgatttacaggaatccttcgatgcttaggcacctcctttgagatacagttagactatatgagtaaagggcccagtccaaaagagataatagagaatacagggaattatttactgctgctgaaaacaggaccccgggttcagactttgcttttgtttgctttttaaaaaatgtttccaagtaactccaaaatacatgatacctcaagtctcacgtgattgtaacaaccaagattcatgaatagccatgaatgtgttgtttgtcattaacatcagttttctccctttggggctaaagaaggagcagaaagaacagagaaatcagaatgcgagtgggacttgtacttcataaaacagccagaggatcctcctataaa

SEQ ID NO: 44144 - DNA, 944 bp, Homo sapiens
gacacgctcccttaagtccctgtcgcacacaataaattgctttctgaatattccctttacaactgcaaaaaatagaaatggctgtaactgtgcagagaaagaaaagagaagctgggatgagctccatcaggggccgaatctgcttctcgctggtggatactgtgataagaaacctagatctgaacggcctcacaatggcctatttatccggctcttacgcacggccggcagccccggctgggaatcacgggggtggcagccgtccccggaaaacggcggcattccgacacaggaaagcccgcggatcaactgatctgcagacaacgcttcttccttcctgggaagcggccacaaaggcagccagctgaccccggcccagcgcggctcccggccgaggaggacaggggcggggtggggagggggggaatcgtcgcccgccccgcccccaccccccaagtttcctttggcaaaagcatcccaggcgtggttcaggcagagtccacgccagcgaggctggggccgaaactctccacgccaggaaggcggggtaggcggacccgccgcccccagccccgcgcgcccgccgcgccccccacggcccccaccagctggctcttccggccggggcggccttggcctggggctggggttgactttggtggggggacaggaaggactggcacagcgcccgcgactgtcccctgaggaggaccctccctacgacttttggtcaaaagcaaaaagaaacacagacatgtgcgtcaccccgggaagcgcgcgggggtttcgctcgcgtttcaggagccgacttcgcatcctccctcggtaggggggtcgggggttcctaaaatttaccccccaacttcacttctctggcgacagagcaccttaacagttcatttccctctcgctctcaagtgaaaacatcttatttttgtgttaaa

SEQ ID NO: 44145 - DNA, 736 bp, Homo sapiens
tttttttgtacttttagtagagactgggtttcaccatgttggtcaggctggtctcgaactcctgacctcgtgatccacctccctcagcctcccaaagtactgggattacaggcttgagccagcatgcctggcccttacttcctaaaacttaaagaacaaaactcacagaggagtcccttctgattgactggtatacttcagaggacccacccctaggatcagcttgagtccaaactccactactgaaccaacacatggcaccttgggtgagtcacttaaggcctccactttctgtcacttattttctgatacctggaatagagatagtgacctttggtcttgactaaatcacaaacaaaaaaagtgaagataaaagaaaactcagtaatatataaagactggttagaaacacaggcgtaacagagacacaagggcagtagagtaccctttcagtgattcacttacagaggtagttctggagagtccacagggggtgtagttataaccagcaggtgctagtgtttatacaggacggatcaaaatctgtcctcaggatttaaatatactagactattgaaactggatacctaattccaggtttgagtaattatgaaaaagtagatgtatagttgcagtgggggaaaaaggtttatgtttccatttaatagttttccaaatgtatgttctgagaaagacttaacaaatgggtttataaggatcaagcagtctgctacta

SEQ ID NO: 44146 - DNA, 912 bp, Homo sapiens
aattttaattcatcattctaaattctccattacttcaaacacatatttcaggcagatttgatatataggtatttgaaattactaggagtcataaaacaaggcattaagtctggaatctggaattttccctttagaataaacctgcattcgatgattattcctacatgaaactgtgctattgcagcccttgctccattattcaactttgtaaatagggtagatggaatcataggaagcagtgctgacagttactaaagtgtagttggaggcctttacaagtttaataaaacgcaggggaaaggggaagaaaaagaatggggtttgccctggaaaggagattccagggtcaggagacaattgtgtaactttctgagttctgccctccctgggccaggccaggtcacttggccaattcttgccaaaacttttcaacccagtgactcaggaactggacttttccattctagcctgtgggaatgtggctgtgattttataactgaagtccacagaacaatgggatttgccttttgaaaaattgcttttcagacaccagtactgcaaaacacctacttctactggctcaccagtggagctcttaaaactttttaaaaacactcagttcttgggtgaacaacacacccagcctctccccaataactagaaaaaaaggtcagcatcctccacatttgaaggtcaaagtcctggtcaaagatgctgttttgagtcacccatggataatggccaatttgatagaagatatagaaacaaacaaacaaacaaacaaagaccatgtaaatcaagcttgcctttagatgtttggcctagaatagggagtatagcttagtgcctaaaaacttggactgtgaagagagacaggtctgggttccaatctcaaccacataggcaagttat

SEQ ID NO: 44147 - DNA, 2632 bp, Homo sapiens
atcgtctgatggctgctgactttcaatttgttttttgttttttttttttcctcccaggaacttttccatggctcaatgtaatcatttcctcaaatgagaaacatgccttttgtaaaaaacaaacaaaacccactgtcattggtagaaattggtgcttcctttaaccctgtcaggctcagcctgttcctttccactctttataaacttatttccctgaacaaccttattggtgacacagtttgtattgatttgccactcatatctctacttcttcccacaaccccagaattgctacaatttgggaggaaagaagctatggaaaatgaccagtatcccctgcattcctggctcttacctttcactagtgccctgactctaagaattttcacttaaataacatcccacaagttgcaccaattaattttaattcatagatctcagagatcatcgggatttttgaagctagaaggaacctcagtgattgcctagttgattctttcgttttaccaaaattaagttttggaataaatgcattatcctagatctagagacagaaccaagatgcaacaagtctgaaccctttctagtgaatacatagtaccaccctatatgcatgaaccaaatctgagaaaatgagctcgcaggtttatgcacagcaacttgaaaatgttcccaactccctcgaaacaacatgctaatttaatttcagccagcaagacctctttccaagttcccaccccaccacccaaaaaatagggtagcagggctgccctgaacattgaagcctcttggggaattccctgacatatcccaaggaaaaagggtattgatgcccagtttcaacagacctttctcacattcctgattcagaaatcttacctaatgtgtattagggttctactgaaatcggtctcaaacaccttatccagcaacgtttgagaaatctctgtgctacttgtcctgcccaccccaacctcaagccttgtcttccagaatggctccacaaagaggagagaacagagacggatcaccaccagagcctgagaagagggcctgtgaaaactgccctccttccaatcaaaaaggatttttttttcctgactgctatgtgaatagaacgttaaaaacttgaactttgagctgtgatccaatacctgaaattcctttcattccacaattaaagataaggctttcagtgaaaacacagcaggaatgagcattccccagactctttaatgcccaggaagagataaatgactgacgtgggccatttcttagagatggctttggaggaggaggagggaaaggagaggtcaagtgtactaaaggaagagtgagcacaggaaaatgaaaggctagaggctttgaagagaatctctgcccacttcaccatctgccctgaacaatgccagatctaattgcttccagaactgctcctcactttaaaaaacaaaaatctcctttgaccacaaagccaactgctacaggtttttaagtggacaaggatgtctttgggtggcatctacccagatgaagatgaataggaaatagatccttatccaggtatattagaaagcgacttcaaaacatgtaataaatttgtgctatcaatcattatattacctcatgaggtaatatatatgaatatagccttttcaactggggagttcaaagtgaaaaaggaaccatagatttgtagaaaacagcaaaatcagcttcccaagcactcagcagagtatcatatgtaatagaaatcacacacacacacaaaaagataaaatcgatacacaggttaaaggaatttccagattggtatgattgtttccataagtgaaaaagtggaattaaggatgatattgagaatgtggtagaatgcagtccctttttattttctgaggaggtggggtgggaagccattgagaaaggcagagaaaaagaatgaggattgtgctcctgtttacacacagcctgggttaatgtgtaattgacaagattaatggctgcataataattgcctctattgtttactgtctggatggtggccagccaccttcccgctctgcccaccaatgggtttgggtttgtaaggaatgcagtcagtggctgatagggtctgtgtgccaggtgtaaccttgctaaagaagacattcaagaatcatacagggagacctggtgaggttttgccatggcagggcatgccttcttcttgttgtaaatagtctaacttcaaatctgctaggtgagctgtatcagaacagggccaggcttggcctgacctaactgctccacctgagaaagacaaagaaaataaaacctcaggatgtagagaaaggtctcatttctgtcctggccatactgtgaaccaaaaagcagagtgttcctctgtgccattcctcgcactgtcccgggctgtgctgggaagtgcccacctttcccccacagggatgcacaaataccttcctccccactcttccctgatctgctttctaagctcttgcctcttgtgcactgtgagacaagcaaacagaccaagactctgggtcatgaaccccagacaggatttccatggaaaggtaccatgcgtccaacccttctcctgctgatcttgtcttgtcttgcctctcacagggac

SEQ ID NO: 44148 - DNA, 3058 bp, Homo sapiens
ctatctccgtgagaatccgcacccccccaccccaacctcccccctccttaatcatgtttcacaaagtaaatctatagacgttcctcctgggttttgggagattccccatcctaaacaaaccagctggaggaaaggaaaggaaggaagaaataaacgcaacacagaagttctcctcagttgacaaaaggtcaaaaatcattaacgtgtaaatgttgctttttccatcccaaagcaccttctcacgtagagtccagggactaggaggactcacaacgcagcgatgggcagccaggccctgcaggagtggggacagagggaacccggccggtggcccgaccctgcagggaagaaggacgtgcggcgagaagcatcggattcggggagggccgggacctggccgagggtgacattaccgagcacttcctggcacagcgctggtcccctccccaaacgcgctatatgtggttctgtacgggactgcctttcccaaagacagccaaggaaaaactaaagatcgacggggacacccgcctcccttcctcgccccaacggtttctcagaggctgtggggacttggtgagggtagggggtagttgtcccaaatcagcagcttcaggatgtaaggtattacagaaaactttgaagttttgttatctgtagcacagggacaggggtgggacaatagagaaggaatgttttcttttcaaaagaaaacacaaacaaaactttatttttctggtccgcggcagcctgtctgctgaacgttgacttgctttcgctttgcagcaggcgacggtcccgggcgccacctgcgcgtcggtgggaggctggtccacgcccgggtcccccgacgcccactgcaaagggcagtgggaatgacagactgtaaaccctctcgcctgcgtccccttcaagcaccagaaacccaagttggaactaattctttctttcggaaggtgcaactcccctcccgcgagctccgcggtgccgggccgagattgccgagaggaagcggcgcagcgctgccgccaaggctcctcctgtcgccggtgcggccgggactacctggcggcgcggcgcgtgcagcgcgcagagtcccgggagcccacgcctccgcctccgcccccgccccctccgcctcccagtccacctcgcccgcccgccctctcgcccggcggagagcacagcccactccctcccacctgcggccgccgggccgccctccacccacacctctgccgcaggccggacccagtgcgcccgcccgtcggtcagtccaggccaggcgcccggcgggccgcgctcacgcagttggcgcaggaggccttacgctggcggcgcagtgcccgccccctgcgctctccccgccccctccctccctcgcaggggccgagcgaatgtagcccgcgagagaaaatggcggcggcggcggggaatcgcgcctcgtcgtcgggattcccgggcgccagggctacgagccctgaggcaggcggcggcggaggagccctcaaggcgagcagcgcgcccgcggctgccgcgggactgctgcgggaggcgggcagcgggggccgcgagcgggcggactggcggcggcggcagctgcgcaaagtgcggagtgtggagctggaccagctgcctgagcagccgctcttccttgccgcctcaccgccggcctcctcgacttccccgtcgccggagcccgcggacgcagcggggagtgggaccggcttccagcctgtggcggtgccgccgccccacggagccgcgagccgcggcggcgcccaccttaccgagtcggtggcggcgccggacagcggcgcctcgagtcccgcagcggccgagcccggggagaagcgggcgcccgccgccgagccgtctcctgcagcggcccccgccgggtgagcagcacggccggggtcgcggcggggacttggagagcgggcagagggcaatgaatgaaccccgggcaccatgcacggcgtcccggggttcagcgcagcgaggctacgcgccgctcgccgggacctacgcccctgagcaccccccgaccccttcggagtcgggcggcgccccggacccagcctgggggaccggacggggacgtgcggaagagtttgttattgtttgcagacatgtgacaggcgtgcgagcctctctgcggggaaccgttgcgaaaaggtgtagggggccacggctggctttgtgggactcctggaatcggggctctccgaggagcccgggggcggggcacggccctgcggcggcgcccccggacgggtgtccccggggcaaaggcactggggggcgaggcccgagcctgaggcgggcggtggtcggaagaggggcggggtgggtgagaagcccgaggtcgggtgggagactgagaggaccgaagagaaagtagcaggtcccagcggccgtgacaggcagagcccctcggcccgcccgggactcgagtccctaggcagataccgcgggctgggcccggacgcaggcggcgcgcccccagcgccggccgcagggctccaggaggacggctcggtaacgcctgtcaaagccgtgcggcgggaggctgcacactcgcggaggcttgcagtcttttaggaagtgcggtttgtctaattgcagcccccaaggggctttgagtgttcctgggaatgcgaactgcactgctaagtcacttgagtgacttctgtttggagtttgaatttggcctttgaagtttgcatttggcggagtggtgtaagagccaggaccggatgtgtcagccattcagtttcaaagcagtggtgactgctccccgcagcccctccggcttggcccggggactgcggcgcgggtgcagtgcttcctgctcggtgccctggcgcgggccgcccgctgaattccaggggccgcagtgcggtgggcttcggctcagatgcgtcttctggtgcatatgaagtacagtatgtgtaaggtaatttagaccagcggtttattggcctcgcccatttttggctactggaaatttttatgttaaaggaaattcttttaagtgtgacagctacatccttgt

SEQ ID NO: 44149 - DNA, 745 bp, Homo sapiens
gctggtagacttcagggaagtttcataaaaggaagaattttaactcagcgtagaaagatgggtaaattttcctcatgtgaaggtgtactgcctggggtgctgcaggctggagatgagtattaaaataggaggagagtgagtgaaagcacaggaggaggaagggtcaggcaagtttggtgaacacagcaactggctatagaacaggagcagtgggagaaagtccagaaaggtctgctgagcttcagttgtacaaagctgtggagtttggcctttggtcatggctagattaggtctgaaagccttaattaaaaaaaaaaaaaaaaaaaggcaggtcttgtaaactgcatttctgcttgagaaattgatctttaaacttctagtctcttttggttttctgagatacacatctaacctattattgtaatataacattgtaaagaaacacacacacaaagcagggaaaatgattgcatagtgatcaaactatttgaaattatgcccagtgttgtttcaaggtcctacattttgtaaaaacaaataaaaacgtacctagatctttgatctagtagttgaataagttgactgtagaagttatgagtgcttatttttcacatttgtttaatcacctttgattgttgcttttgagtgttaaatgagttagggtatataataacaaataataccatttctacagttttgtatgcattacaaaattgtaagggaggaggttgcgttttaactagtg

SEQ ID NO: 44150 - DNA, 2075 bp, Homo sapiens
gctgtggtgtcgaaaacctatcaaattgttcactttaaatatgtgcagtttattgtatcccaaccattcctcaacaaagctgtttttcagaaacatttgtccatgtagttttgcctttgaatggttgggtcaatgaagagaaaaacgagtgaaaacagggaatcatgacactttgtttttttacgtgtaaatattcgcaaaacgcccaaactggtaactttgggaacacgggttcacgcagaagaagggctgctgtctggggaggactgaaactcgggttcccgaagtcgggctgctctggggccacggagagaaggggagagaacgtcgaggaagaggcagagctcaagtggacggaggatggaacacagagcgcggccgggacaaaggggcaggccagacagccgtgacagagaaactaggcggtccgctcctgggacgcggtctcgggggcgggttcgcccctgaggcccggtgacccttcgcccgcaaccagggctagcgcttgtgtgcgcccacggaagcacccgagcgaccggagaaagaaaaagtggtcaaggggacctccttccagctctacgcgcctctcattcagagaggtgaggtcaggaaaggggaaggacgaagccccagagcaacagaagtcaggcggtgccaggaacactgagagcggagccaggggaaggcggccgagcgcggccccctctcctcccgggccggggcgggcccgaggcctcgatccgccttccccgcgccgtcctggtcacggccccgcggggcagccatgcctggccgtctgctgcggggcctgtggcagcgatggcgccgttacaagtaccgcttcgttccctggatcgcactgaacctaagccacaacccgaggtgagagggcgggacggcagaacgaggggcacctgccttcggttcccagacgccaccacggcggcgggacgcaaagcggagagcctgaggctgactgccggcctgagatgggcgggcccgggtgggcagggactgaggtgggcgggccgggtgggcggggactgaggcctcggaggggtttaaggaacgcgggccagaggcgggcggggccgaggttggtggagtccgaggcccgctggaagcctgaagtgggcggtggcttcaggtgggcggggcctatggcctctttcccagtgtccgctgcgctgccgggcccgcgaggccgagctcgccagccggatgtgtcgcctgttcttccctgttgcgttcggcactgactggggagcttgtatctgggcaaaaatggaaactttttaaaaagactgcccttaccgcgtgagagtgcgtggctttttctccaccaggggttaattaggtgcttgaacttcctcagaaaagccaagccagggtttattttcatagttcatacaagtacttcacgtggttaaagaagcccatcccggctgtgagaatagcgtgcagtagctcgcgcgttaagaacgggcagaacgccactcaaaagcacgtcgggatggtgggtttcggattggggtgagtcccgccggcgttattaagggcgcaccagtgatcagctcaacaccgtgctcaccaaagaggccgaccgggcctccctgaagtcagtgtccgacaaatagggaaacaaagcggtttccggaaggttgcatgctagggaaacaggagatcagttgtatcatgactcggaaccgtgaggcgggaattacaacctttttgttcaagtaaaaataatgcagttagtacaaaaagataatgattatggaaataagaggtgcagtcattgaagacgttagtcgtcctggagggagtgtcacaaagtatacgatgttgaatttgtctttgaaactacaaggccatttttaaaaagccattgaatgtgaggtcattcattctcattgtgatgacattcagcttggctgttgggtgtagtacgggaaagagctgaacttcgtttctgcctctggctctcccacttactggctttgggaccttgaacaagttccctaacaattttgctttccttgtctgcaaaaatggaataatgtaaggaccccaca

SEQ ID NO: 44151 - DNA, 966 bp, Homo sapiens
tggaaaaaaagtgcaagatagtgttggtgggaggaacacttattccccgtgtctcatgtcttcatgtggagggcttccactggttaatgttcctagcctctctctccacccactggagggagattgactccctgattatgtttggagaataactaggcacccatgtcctatatacccttctagttccttccctgtggactctggctgccagcagaaagaatgtgtcctggcagttctctgccttgtgcagagaatagcctgtagccagcccagccagtgacagagtgagtccagaggtgtaatatattggcaggccaacctggctgcagccctgaagctaccttcccgttttattagcaatagttactttgacctccatcgacctgactccagctctctcagttccaaacttggataggaaggagggtgttctttactggatccctcaaaaattcatggaacctatatgaccagattctgattaccttcacttccttaccaccagctttactcacctagtttattgcaatttcagtagcctctcaattgccttccttgtttccactcctgtcccccttacagaacatatcaccaagtgtgattcttttaaatgaaagtcaggtattgacatacgtctgctcaaaaccctctccctatcatggagtaaatgctgaagtccttcacatgcataacctgctcatgacctcaagagctcctctcctttctccccttgctcactccatcccaacccacacctgcctcctggccactccccaaacctgccaggcacattcccaaccaaggacttttgcacttagttctctctgcctgtaaacatcttcccccagacagccacatagcttgttctctcccttcctgtcacctcagtgaggagcgttgcctcatcaccccactgaaatttacaatccctcactgctcccaaccctgacatattcctcattctct

SEQ ID NO: 44152 - DNA, 605 bp, Homo sapiens
ggctcggaggaaaaataagatatgtaataattaaagccatattccttaaaagaacgcttgtcttagcaactttgtaacagttactttttcaacatgcaagagaaaacaaagaacagtataactgtttcttccccaaactttactaaatgcacactgaaactcttaaaaatcaatgaagaaaaacctgcaggatacatttctattgggaatcctttagcaacagacctttgagcccacattacccactgggaaccaccgaagacgtaagaaaataggacaaacctgggctcgaacttccaaaagaagcctaggagagagagaagaaaacgtgaggttagatcgcacagccagggaaagaggcagcgccggcaacagggcgcagaggaggcggagtcgagcgctcctccgcagctgccaaaagtgcaagacgtagcttcactcgaatcgctcccggcccctttcgggccccctcttggctgcctcgccttcctccccgagtcccaagtgtacaaactcacagacccgggacgaagcccggagtctgagaggcaactccaagtcgcttcttggagctcagcaagtttccaagcagagaagcaaaaccc

SEQ ID NO: 44153 - DNA, 1803 bp, Homo sapiens
catctccggagtcctccaaatcccacccggctctccgaagccccaaacaactcgaaacgtaacacccttttctggaacgaactcgcgttctgagcacctagttcgcccctggggcccgggagccccaactccgaagccgatctcttcccctgcagcgtaggccagctcgaatcggacactcgcccccaaaccaaagcgcgagccccccatcctctctctcgagtccagagatgcagctcctctcagttccagggatgctggctccttccagagtgttcagtccctccctggaccgtcagcgcgccccccgccccagcgagctccagcccaggggctcctgccacaccgccccctccccccagctcaccagtcccgggggacatggccggggcagcttcgctcgcccagccttccttcctccagcccagagaaaactggagctatcaagccgctctcctggagagggcgtcgagggtctcggtctgccctttaaccccaggggctcccgcacctcccgggctgcggggtggggagtcccgctcttctgagaagcccggtggccccgcatcccgctcttctccgcgcccccagcaaagtgaagcgtgcggctccttcgcgccgcagcccgggcccggtgggccgggggcacagcgcacgactcccgcagggcagtggcgcagcccgctcccctctttgcgatccggccgcggagggggggctccgccggtttccacccacccgggcccggggaagaggcgcggaggcgccggcggcccgcgtcagcgaccggggacacggcactgcctcgtccctggggcagggctcactgcagccggccgccacctccgtccggctcggtcgcccggcccgaccggggccggagccgccgcggcctagtcccggagggagaccgctcccgcgcccgctcccgccccccggccagccccgccacggccagtcgccgccccgcgacccccgcgtcgccacgccgcccctcatggggcagcggaaagagccccggatcccccaggctggctcgggggtcgcggggagccgccgggcgcccgctccagcccggctgctcctgcccggtttccctgctcacctccgccatattggtacctttagggcgaacgagcagcgccgagcccagtccccggatggggcgcctgagccaatcgcagccgccgccgccaccgccgcggtccgcccggcacccgcccggcggcggaggcggcacggccccttatagggcagggcggcccgcgacgcccccggcccgctcgcaagccgacgccgcccggcgcccctcgccgcccccgcgccggccccagccggccagacccgcacccgcgcgcaccgtccttctcctcctggctggtgtaaagttcctgccgaattggaggcaagtgggggacggacggacgcgcgggcgcgggacagacccacgtccagccagtggaggcccaagagccggcgggcgcgtctgggaaccgacccacagacaccgcggcgcgggagggcgtgcgggaggcgggcaggagacttggactggcaggcgatgtgcaggggaactcgacagactcaacttccctaagaggaggaggcgatctatgaaatagacagatgtgggaggaagccctgggaaatgggagaagaggctggtggatggcagagtcagtccagaatgagaggactacagtcaggcactttgccgtttccacgaagggacctgcaggaatgggagatggagaccggtgtacactgctcacggagtggacaatggaagtagacatttgccaa

SEQ ID NO: 44154 - DNA, 607 bp, Homo sapiens
gaccagacagacagagaagcacctcagcagagcttcctaaaacaccttcaggatggcaggcattgtgtatgctcaatctgctgctgctattattagagtcacttcatactgactaagctgttattgaggaagaagtggattaagacttatggagtctgagtggtaaatgcatgatgcagggcttttagggcaagatcggtggcatgcagttttattcagcaccacacctcaaatgctcagcagggcaacctgtgttaagggcactctctaagcagcaaccaggcagttcaaatgtttgaatgactcatcctaattgaccttctactgcagtccaaccagcctcagggatgggcagtctggcagcatggtgccacaagataggaagcatggagcaaaggaggggaagcaaggcagctgacaaatgtccacagactgggcagatgagtcacattgtccccctgtgcctctgcttccccatgaagttcagggacaagaacacctgcctcctatttgtcttctgaggttgttttgaggactggagataatgttggccaactgcttagaactctgaaaattgctagagcagaaatacaaatggaatgtcaaa

SEQ ID NO: 44155 - DNA, 418 bp, Homo sapiens
ggagaatcacttgaacccaggaggcagaggttgcagtgagctgagatcttaaaaaaaaaataaaaagaggaaagaagatcccaccacattccaacagagacagctgatgacaatctacttgatacttgagttggatccagagtggggtgtgtacctgctggccatttgccatggatctgactcatggacctgacctgtgcccaagtgaacagggagcagcactgtgggcaaaaagcacacccaagtgaagtccctagatagaggtggcttctccagagagagaataaataatgaataagaaaattagatatctgggcttcatttattcctacaggaaacagaaaagaaaaattgagaaaaatttacatccttagaagactgcaaagtaactcacctctctgaagcagaatcagaaaac

SEQ ID NO: 44156 - DNA, 1581 bp, Homo sapiens
aaaaaaaagaaaaaaaaggaaagagaagaaactgtgatatatatatgatggaatactacttggccacaaaaaggaatggattaatggcattcacagtgacctggatgagactggagactattattctaagtgaagtaactcaggaactgaaaacaaaacgtcgtgtgttttcataagcaggagctaagctatgaggatacaaagacctaacaatgacacaatggactttcgggactcagagggcaagggtgggaaggcggtgaaggataaaagactacaaatagggtgcagtgtatactgctcaggtgatgagtgcaccaaaatctcacaaatcactaaagatcttactcatgtaaccgaacaccacctattcccccagtaagctatggaaataaaaaattaaaaaataaaataaaatgaagcagtcttgctattggtgcccaggctggtctcaaactcttgggctcaagcattcctcccaccttggcctctcaaagtgttggaattataggcatgagccaccacacctggcccaggcaatagtattttatcagcattaaatttattgagttacattatcactctgtagttattatcctaacgtccttgttcttaagattatttgctatagagatgatgggccataatctcaaccacttactttcatgttttcacgaagaaaagttgttttaaaaataagaataagaaagaagtaaaatgaaaaatgaaacaggtatcttagatatgtgtaagtatttggcaattttggtgaaacattaactaatcactgactactcagtgcccaaatgtctgtttcaggcagtgtgttcaaaggtcccattcaaggcaaatgcaatgaagatctgaggtctagtgtcaggtcaacatgagttgtaaagtcaaaagcattccagaagcccctttctccactaaatgcagagtttaaggggttctatgagccaaagttttgtggaagaacaaagggatttgcaaagcaagtgcttatcaaagtaaagtttagagggactctaataaagacaaaagcactggatggtccgtcccaaccctgctttccactttttactgcaacccagccctctaatttctaaattttttgtatctctgacattaagaaatgaagtcttgaaaaggtaaatctataatgcagggtcaactggctttatgtcttttttcttttcttttttttttgagataccattgggctctgttacctaggctggtatacagtggtgtgatcacagctcactgtaaccttgaccttctgggccgaagcaatccttccacctcagcctccagagtagctgggactacaggcacatgccactactctaggccaagttttgtattttttgtagaaatagagtttcactgtatttcccaggctaatctcagactcctgggctcaagcaatcagccgacctcagcctgccaaagtgctggcattacaggtatgagccaccatgcctggttactggctttacgtcttaaagacaccgtatcagagctgacctcactggctctgagtctttgaactggtgattggagaccaagtaacaggca

SEQ ID NO: 44157 - DNA, 3582 bp, Homo sapiens
tcatgcttacacataaaagcacgagcaggtcctctcccgacacataagttgcttatacggaaacaatgtggtgtagagaaaagaaagtggatcaagcccctaatagacttgagtttaaatgtggtacagccaagttgtggcgcccaacttccatattctgtaacgttaaacacgtcaatctcatcctgtttccttatctgcaaaatagtacccaccccagagggtgatacaagcattaaaatgcccggcacgggcaaggcatccagcaagtgttaattccctttcctctgccccgcagaggggcattattaattgcttaaagtggccaactcccgataaagattaaaacagaaggttggggacggtaaattttggtgagtttacgttccacccgtttttcaggtatcttctagaaacattccattaaactacaaaccccataatgcatgtacaactaccataaaatttctacgttatgaagtccttgtggcttaggggagggcgaacagccaaatatctttattttccagactttccctctttgagacaacctctccccaccttccctctaaacaaatgtgatttttctttttcatagaatgccaacttcccaggtgttaaagtgaggctacggttataaggcgaaaaggtgtcacaattagagaaacaactttgaacacggtaatactgatttttaaaaatctcgaatgggctctgtggttctgatactctggctgttgaaataattcacctactgcagatttagtagaaagaaaaataattagcatgattatacctagtagccatttctaccctcttgagagtctgggcttggctccccgcacgtctgctttcctcagccgcagggctcccgcgttctcatgcctgacacagtccgcgttcgcatgccacggtggagcatcccctcagcgtgccctaccgctccggcgccggctcggcagatgttccgcctgcgcagagctgagcataggcgccgtgtgagcgccgattcacccaggcccgagcgcgaggcccaagcggggtacccggcgaagggcgtgcgccgcagcgtcttccgcagcttgaagctcggaggagctgcggcgcagcttcgggagcttagagctggggaagacgctgcggcgcgcgccactcgagcctgcgcggccgcttcccggcgcagcacccccctctcgccctctgcgcagccccaccagcccggactccgaggcagccccggacggggggaggtgcgggaggaggggctcctcagggagcggcggggaattcccccttccaccgaacgttcccgattgttcaccgtcctcacgtcagcagcagggggtaatccccgactccagctgctcctgacgtcaccgcgtggagccaccgccccccgcgcgcccctgctccggggcctcctcgaagccccgcccccagccttagccacgccttctccccctccccccaggcgcccgacgtagagggcggagcttctttgaccgcggcgtgagcggttgcttgggccagaaggttctctggtggaggcgctcttcctggtgtcccgcccagtaggttcgttcgcaccgcttcttccacactctttctccctccttctcctcgccccgccttccctccctcctcaatccctctagttccttccccgcctcgccactgtgcacgatctcgcgagacttggcccagaacattgcggatcgggtcggcgccattttgggactgagactggttgtgggggagggaaaagcggcaaaaggggattattcaaagtaccgaaaaccttctcccgggatcaggcgcggcggcacccccaggccaggggcacctctggtggggcagaaggtaacaccgtcctctaggctccacgcccgagcccgggggaggaggggagtgcccgtgtccgtgttggggtttgaggggtcgggagcggcgttggtggcgcgaggtgtgaggctgcccgccgacggaggggcggcgagaagcaaggagtgagaggggggagaggcgcagataggcccctctaggtattgactcggcccgggtggagcggaggtggtggttgtgaggagggggtgggtggtttagccccggcggcttggttggggggtgtttggcgtttggcggaggctgggagcgagtccgacgctctcagtgctcggccttccttcccccggcctcttgcacacgcccgcctggttttgcaccactacccttctcagggctgagggagtcgaggccgagttgtggccttcggcggtttcttcagcagcgcctcagctttccccgcctctcccaggtccgtggcacttgccgtggactggggcgaaggctactttgttcctttgagtcctgtggggtctgaggggacatgtgcatttttgagagagaaccattctttggtttacgaaaagggccctgtaccttccaccccctcagttttgggagaaacctgttttcttaattcgaggaagtggaaacctacaccttctagccctttgctccctcagaagtggggaagtctcctcgggagaatttaagaagcgggtttgccctacttctagttcacctttctggccttactgggtgggaatatgcctcctctagtagacgttctgatttggagggagcctctttctctttacacttatctctgagttacattcgctaatactccgtggcagcacacctgtcttcgctttccttggtccatcgaagagggttggagatcttttgtaagattatgtgtcaatttcatagttttaaaatttattcaagaagtataagaaggtttgcttatataattccccagtatgggatctgcaccccttcccaggtgaaatctgcccttgccctccataataccgtcacctaccgtttttccctccctctactccgatgtcttgttcattcagtagacttttatcgggtgcttgcttgggtaaagaagcccttttccaggctcctgtagggttatatagaagtgattttctctccagaggttgactttttaagttggggattgatttttttagctcaaaatcaaaactcagtatataattttttttataacttttacaggtgattgaattactcagatatgaagatcatcatctaggttttgtgtaaaaggccctggatattttaagtggccattttggatttacagtgtttttggataattttgccccagaagtttattaaaattggcaagaatcgtctgtgaagtgaattgatagtagtgaacaattcagcaagctacttaaaaagagacccaggcagcatttcttcagtattttggttcaaacggattatataactggttacagtatttcagctggtggtaatttttgcctccccttcccccaccccgttgttggggttcttcagccgaaactgagagacgttgatttgtgtactgagtagtttcagcagtttcaaatgactgagtattgctgaagtttcatggcagtttatttttacctttattgaaagttttaggaatttttgacttcagctctttcatgtcacaatgggacactttttctgaatgaagagattgaaaga

SEQ ID NO: 44158 - DNA, 809 bp, Homo sapiens
ggagtgtagtgcttttcacaggtgccattatagcactctacagcctcaaactgtggggctctagcacttctcccttcccaggctcccaagtatctgggactacaggtgctttgcactgtggtggctcaggatgcctttcatttcttttcttgcctagttgctatggttagaacgtctactacagtgttgaatagagcttgtgaaagcagggcattcttgtcttgttcctgatcttaaggggaaagctttcagtctttcaccattgaggatgatgtgctgtggttttttttaatagatgctgtttatcaggttgagcaagtttccttcttgtttctagtttgttgagtatttttataattaaagggtgctagattttgtcaaatgctttttctgcatcaattaagatgatcgtttggtatttttctttcatgttattaatgtggtgtattattgattgatttttgtatgttgagtcactcttgcattcctgggaaaatactactttgtatggtgtttaatccttttaatatgctgctagatttggtttactggtatttcattgaggatttttactcagtactttggttgtagttagaattccttagctattggttgattttgggtgtttttgatggtctttgtgattttaaagcttattttaaagttttctgaaatcattataaagacagtaagtttgttattctgatgaaatcaatttgagtaagtttttctttgaaaacgtggcacaaatttggtagggtcagaaataaaacataacaagaaagagaaaaaagtctcatctatttgta

SEQ ID NO: 44159 - DNA, 497 bp, Homo sapiens
ctgaactccagcctgggtgacagagcgagactctgtctcaaaaaaaaaaaaaaaaaaaaaaaaaaaaccaaaaacaaacaaacaaaaaaaaaaacaacaaaaccacacacacaaaaaacaaataattaaaatttaaaaaaaaaggtacttgaaattgttggggaatggagacctctgttgattaagccactgaaatcaattcttgttattgacttttgccaccttctcattcgtgtgtgggtccctggaattcccctgtaccgagctgctcttgtttgtcttttaagtcagcattttccccagtcctgcctggatgcatatgggtttcctgctttcctcttttgtcattttctctgaaataaatgtaagacttcttgtaatttttaagtgatttcatagctaacataaagcacagtaataaaaattagcatctgggccgggtgcggtggctcatgcctgtaatcccagcactttgggaggccgaagcagggggatca

SEQ ID NO: 44160 - DNA, 1317 bp, Homo sapiens
atgctcaacctgtatttggtgttttatttatagttccagcatgagagaaaggcatctctgagtttcagaaaagattttggttgagcatatgaaaatattggctgaagaaagaaaaggcctttagaatttacagaaacatgaagtggaaatggctcttcctctgacttaggcagtgaatgtagaacacacccggagagcttaatgggatctttcacagaaatgaaactcctcaacaaatgtttgtcagcttaggtgaggttcttggctaaggcaccagtagtggactttgatattcttttacaagtgtatcactcaccagcagagggggccaaagagctttccacggtttggaaactccctggcgtcagagaaagcatcggtatcacctttgcctaatagtgcagcatataaaaaatgtttaaatttggtgtccaacaagaaatgccatagcagtcattttcttaaataagtaattttaacgtatatatggaatgacatatgcacattgttaaaatgcaaatacaaagaatacaagaaggctttttgtatataaaaacataaaatgttttaaaagacagcgctggggctaagactcagaactatgtgttttagacactgttcccccagtaaccagtttggaaacctccgggatagctaatggcttccctcagatagggagttgccctctccttaaaaagtccctgctggagggacagaaagggtgacttttgtggttctggctttgtcctatggccctttggattccttcccaccttactgatcatggtagtggagtgggtggtggctggaggagaggcaaaaagagcatgtttctgttctaaacaactgtcatacaggggctctgtgttgataaaaacacccatgcttttaatttcacataatttgtggtttaatttggctattgcagtgacagtcaagagatgattctctttggagaggctgagaagaaaaggaaagagactaatcagggtgtgttaaacttttttaataaaaaacgaacactagggggcagcaaaccactgttcggaggagcgtctgcacaaaatttagtaaggccgaaagattgttttcctgaacacgtgatgtgtttgttaaacatcctctaaaaagggatgtctgctgtcaggctgcttttacctgaatggtagtttcaatctttaggcggtctttacttttcagtttcctccacacgttccgatacctgccatcttctcatggagcacattcacatgtcacaatcagtgtttccgcactctgggcttcttaaagggagccctcctagtgcctcccacaaag

SEQ ID NO: 44161 - DNA, 609 bp, Homo sapiens
atttaattgactcacagttcagcatggctggggaggcctcaggaaacttacaatcatggcagaaggcgaagcaaacaaatccttcacatggcggcagcaaggagaagtgcagagcaaagtgggggaaaagccccttataaaacaatcagatctcgtgagaactctctcactatcacgagaacagcatggaggtaatcgcccccattcaattcaattacctcccttcaggtacctcccatgacacgtggggattatagaaactacagttcaagatgagatttgggtgggaatgcagccaaaccacatcaatagctgactcataaactgccctggaaagagaatctgacgtcctagtgccagctgccactctgccacctactgacagtgtgatcttggtcaagacagttgacaaaatgccttaagttttctcctctttactaattattacttttcaaagaggattaatcaaactcattgcttgtttttttgggatgaatattaggattaatgagataatgtgtgcaaaaactctttgtgaattgtaaagagctataagccttaatattaatcttgccttattgctatcactactctatcaagcaggggcag

SEQ ID NO: 44162 - DNA, 1695 bp, Homo sapiens
atctgcctgttttggccacctaaagtgctgggattataggtgtgagccaccacgcccagccatattctattcttacaaggacacttcctagaagttgcaagaagcacctttgcttttatagtgttggctaaaacttacacatagatatcctactttcagggaagactagtaatgtggtctctattttggacattaagcactagtgaaatacaagggattctattatgaagaaagcagaggagtttggttagaaggggacaacttgcagtctctaccatgagggtaaaacgggcatctaagaggtttaaagacaaggcttgtcaccctgaccatgaaaacattactttcctttctaactgttcattgttagcttctcgtttgaaagcaggcaccaaagggaatcactctacactcaccttggtttttctctcagttttaactcgattttgaaatcctgacagtaggaacatcttggcagagcctgaaagtgttcactagactcttggaggcagcctaggttcccaggagaagagcactgctttcaaactctaatggaaaaatgcactgtgaggcaggaggtctgggctagggcctgaaattctacatttctaacaaggtccctagtgatgcagtgctgcactgcacagaccaggttttcagtgcaaagatttagagaaagttctctatggctatctgagtcccagtttgtagcaggatattcaggaagggatagtgtaattgcccaatgagttcttcttgcctgctgtacagatagagcctattcactgagacagtgctattgcagtggagaaagagcttaataaatgcagacctagccaaaccagaaggatgggagtctattactcagaacagcttccctaaaaggtcagaggctagggtttttcaaagatagtttggcaggaagagggagagggaatggaaaatgctgattggttggggatgaaatcatagaggtgtggaaaatggtcctcttgcactgagtcagcttctgggtggaggcctcaggaccggttgagtcatgagtcaccagtccaggtagagtcagctggtcaccagaatgcaaaggtctgaaaaaaaaaatcaaaagacccatcttaggtaatactctagtgatgttatctataggggcaattagggaagttacaaatattgtgacttcttgcaatggctggttattgtttcactatgcccacttttagcagagttcaggccatcttgtggccttcctttagttttacacaggcagtttctgttcccaaaaagaaggggatagttttgggaacagctattgtcatccttgctttaaggtaaaccataaactaaattccttccaaagttagcttggcctatgcgcaggaatgaataaggacagcccagagattagaagcaagatggagtcagctatgtcagatttctcttactatcataattttgcaaaggtggtttcagtgggggtggtagtgaccagtatatctgtcagtggttttcatatactactgctcataagaatgcccttttggagcttggtaaaatacagacttctaggatcctgacaatcactttaaatgtaacaggtatacagtatacaggtatacagtaacagatgtctgatttttatagcaggcactctgagtaatttctgataaaggtggtcaaggagcagcattttgagaa

SEQ ID NO: 44163 - DNA, 2871 bp, Homo sapiens
gtgctgggggctgacctccacggaccacatcccttctgactgctggatgatgtggccaaacacaggagactggaggacagacagagtgagaggtcaggatatgtattccttctgcttcctccctatccagccaccttcctctaccaaaggccacagctcctgttgtggtggcctcctctacattgctggtttctctgggttcaggtgacctctctttcctcttacatctttaggtcagggattgtagcaattttctgctatttctagcccagaggtgcttgttggtttcccttgatcctgcccacactttgataaatagtctcttcatcgaaattattttaaatcacccctttttgtgtctgccatctatttcctactgggaccctacccacccacatactctctaagctcaaatgttttaaaaatgtaccctggttattagggcactaaccagctagatgcaggtatattttaatattcatcatattttaatatttctaagatgtaccccccacacacatattttagcacctctgaaatcaggatgagatttgcaaatggtgatgttttactcttgctactggcttggcatctgtgggtgttttcttgtgcatgtgtgaacttggtcattcattgctggtcatggagtcctcattttaatggagttatgtttgttgttggtactattcaatggtgtttaaagtatttcggtaggtttacattatgattcagctctggaatgaagtcattatttacacagaggcatggaacagagcagcaaagcataattttgatgtcagtgaagcaaatatccatcttggcagaatggaggaaattccatattttttaaagggctttatgggacttaaaaaaggaagatactcataagtagttggaactgtgttatatgtgttactgagatatgtgcaaaaggattgcctataataggatgagcaatgtgactaaaggaagtaggaattcccaaatcctttggaataaatcaaagaaatttcaaagaaacaaggagttggtgtcattgattggcagtgttttttatttttttctttcttagtggcacatacaatactggtgtgctttacaaattgttgactccttagatttgatgatctatggtattttttagaatgctattttctggactctagcccatttattgactccagtcttacctctctggtgaatttacagagaaacaaaggcatagcattcatctccaggctggtggaggatgtgcttcttaagtctccttcttccagccccagatcccacatactctaagggtttgaaatttgaaagttgatgagttactgaacctccaggggagtctaggacctctcagaggccaaaggcttgctgaatgtgctggtgtagagagaagactgctgccccaggaatgttctccttagctggggtgattgaacattttatctcatggtcctgatggaataaaataataggccttaaaatataattctagaaagaaattagggggaaatcaagtaacaattcagtggagtaggaacattcaacccagggcatcactgctgttttcttccaagcttccgatgcaagaccacttgtggccctgctgggtaagctggggagggaattaccaacaagactgcccctcagacccaggctgcagattcaaagcactttatttaggaagagttgaaggtacttacacacacctatttccccaaatggcaagaaatatgatcttttttgagtatgcattttgaaagtatttgaaataccctttttgaaaatatcccttttcaaatatgatcttcccaagggccatatgctgatggaaaaatgacttgagcgtggagtgaatttgtgagatgcctttggaactctgtccccaaaattgaaaaaataaaaaaagcagaataaacttagtacttaactctaaaggtctgctaacaggtcatgtacataaaggtagaaaagagattcagagacagatgaagaaattcaagagggacaaattctgttctaaagatagttcaactgctgtgccagcctccttttgtccctggtccctccatctcccctccccattctccacctttttgcatctgtctttctgctcagaaaaactggcctgtatggacccacaaagtgtttccatgtcttcatcctctgggtttgtccagtgaagaaggaatcccaggaggagatgagaaggaagggatgaatgaggtcaaatattgattcccctggctccctgccagataggttgcctggaacctctgtgtgcatctacggaaggtcacaggtcttctcaaggtgtggtgtctgcatagtctcttctttggtaacttcccctctctttttaggcctagtcagtcacagttctactaactattaaactgcaggttacagcactatctctgtggctcctctacgcctacagctttgcaagtatatcctcctgagagtatgctatttcaagtgtgccatctgcttctcagtggaaccctgatgtctgggtaccagatactcccgttttcatggaagatgttagctgctgtagggtttgagagattggaattaccctggttcagttcctttagccctgaatttcgggaggtaaatgcaaagccctgacaatgatgacctaattccctgacttcctctgggtgtcagagatttggatgagtttagaacattgatttttggactgggcgtggtggctcatgcctgtaatcccagcactttgggaggccgaggtgggcggatcacctgaggtcaggagtttgagacaagcctggccaacatggcaaaaccccgtctctactaaaaatacaaaaattggccaggtgtgatggcacgtgcctgtaa

SEQ ID NO: 44164 - DNA, 1653 bp, Homo sapiens
ccagtggatttttctggttggttcttggatatgttcaggaggtgttacgggctgaactattttatcccccaattcatatattgcagctctaactcctggtccctatgaatgtgactatatttggagatggggtctttaaagaggtaactgaattaaaataaagtcattcaggtggcccttaatccaatactgtttgtgttcttttaagaagaggaaattaagacacagagatgtacagaggacaccatttgaagacacagagagaagatggccacctaaaagcccagggcagaggcctcagaagaaatcatctctttgatcttggactctcggcctccagaatcatgagaaaataaatgtctgttatttaagtcactcagtatgtggtactttgttatggcagccctagtggactaatagaggaggattcgtttccacaaggaaggctgaaatcttgaccagggagaagctggtagctccagcctgcagcaactatctttccttcatctggtggcagctggggttttctcagctagcatggacctagaaagaattctagtagctgcccacatccactctggggttcataatggtgggctctggccattcccactccagacacctgtcacgagtatttgggttgagggcacatgctccgagtggatgtaggatggaagtggtctctttcttggtgatttcagggcctgcttagcaacggggtgtgggcaacttgctgcgcatactctggcttctttattatcttgtcctctagggccctgcaacccacagtcttgcgattttggcagaagggctgtggcatgcctagttttggaatgaaaggaatactggggaaaggtcaggtagtctgagttcctatcccaacattgtaaatgattagaaattttactgtgggcacattgctacttttcttcatctgtaaaatgaaatggttgcattccagaattctgtgattctgtgaatcattggtagatatagattacctagatggtttaaaatatgaaatctgagaaacaccaccatataaagttgaagctcaaactcaaacttctcttcctaggaagtgtggagagcttcataacttccatgctgtggtgcttctactggtgaatttcatttagttattcatttgttgtagctaaaaagaaagatttcacaataaccacttcttggacaggattaaagttcaactcaggaaatctcaaagtttggctactaattcgctttctatttttaaccacacttcatttcacagaataatattttcctctgtgtctgagtggtgctctagaaacagaatttagtaatgaaaacctgcttctcaaaagccctgttgctctaatgagtacctaccctgaagggtatgcccaagttcaaggtatggaactctgagcatgtaaaattttcatctgttgttaattattgctgtatgtattcagttttctgaagtcagatggtttgtagtaagacattgaagttttatgtccagtaaatatttgtatacacatcccccaaatgtgtagaataaacagaatgattttcaactttctgtaaattaaggttattttgaatttgaaaatgcttgagaaggaaaacaagcctctcggtgaaactgggaggcttaatttgtgctca

SEQ ID NO: 44165 - DNA, 714 bp, Homo sapiens
gatagctttaaaatggccttcctgtcactggaaatcatcatgaacatatttatataagagagcttgaaatgatgtggtaaacagcttttcagtgtgatatttctaaattcaatgagaaattagggaggattgatgcaatccaccaggctagtctaggctccagacctcatggagagctgagctaatgggtaggacggaatataacttaaccccaaggctgaggacaagggctgaagtggcagattttggacatatattgactattgcataatgggagaaaacggctgtgaccagatctgtgctttattttctgctctctgcactagaaggtctgataacagtgtgtgtggtttatgcccgagtgcagctgactcaggcagcggcagactttgagtcagtgtttaaaggtaagagatgatgctgttggccagaagcaatttcatttaggattagtgttgtcagataaaatacaagatgcccacttaaatgtgaactttagcaaaacaacaaaaatttttagtgtaactctgtctcatgcaacatttaggacatacatatacaaaaaattacttgttgcttatctaaatttcaaatttaagtgggtgttgtatgtttttatttgctaaatctggcaatgccacgtaggactgagtcttgttactgtgaggttgcttttctcttctattagtgcaaaccaggatctggcctagggtg

SEQ ID NO: 44166 - DNA, 1459 bp, Homo sapiens
atcctttttcttttcccaaatacaacactgacttttcccctctcgcattacatttcatccttctattcctaatgccatcattatagtctggaccatgcctattgcaatgagttaagtgtcttcgatttctacggactataacaccaccctacatgttgtgccacccaagtagttaccttttgtcctcatttgatataatttatgtctacactttgggctgtggcttctctgccatattctgttctatgcacttcttccaacttaaagatgagagatttatagtataactcaaataaaatcaagcttgttctcccatggaaaccatagactcccataaattttaatgggatcttagctctctgatgttctttcctatttggagtagaacatgtggcaaggaaaacaaaatcatttcttagtcttatctttctgtaatgtggtttctctgggctggttcctctgaaagaactggcttctacagtgaggtctgatgaatgctatgtcctgggctgtggtcactttgtatttgacatgaatgtatgcacttctcagcctcccaggcacggtttacaacattctttattgtttttcccatctggagagagataaggtataatacttcttattgattttggaagcatttctataatgcaaacaacacctatctgagaaaccttgtactaatcacagaaaaatgtgatcatgtgggtcgaggagtgcaagaatttccatagctgtaggtctgtgggagtatttccttcttatgattcagaccttggttcaaaacagttctctcaatggaaaaggtacagcacaaaagcaggatattggaattatttctgcattcattctggttgtaccttaaagttggaaaaacccttccttgctccatttccctgttggtgaattatgccctagatttccttgttcactgaggaacttactgaaacttctagcccaatagccttaaggggactctgaagcgagggagttcacatggcaccgccaggcacactgattgctagtgacagaacctagacagaaccctctatatcctgcctttgggtctagtgatctcctcatcgtggagtggagagattttagtgaaacacagtggacccatcttcaaatttgagaggtctagggaaagagttcaaatggaagcctatgtaccctatgtctaaatattgaaatttgtaagtcaggctgaaagatgttaaataaactataaacatatcttagtaataaactggaaagtctgattaaaattgtgacttctcaaaatctctatggagtactacaatggtgtagtgtgggagaatgcatctccgacctgacccattcatttcccttcttggaatcaactccaatcaatacctgaatgggccttgtgtgcccacattccagttctatccactcctcctccaaacagctgcctcttggggttaagtggcataca

SEQ ID NO: 44167 - DNA, 1165 bp, Homo sapiens
agattaaacacttgggtttatctacatgttctctccaaacaccactaaactttgcagtaaggaaataaaaagacattaaaaacaatgataaagagagcaggacaataacaataacagcaataacatttttaaagcaagagagaggtgaaccagtggtaactcagccctgaggaaacagagcctccatgggagtgggggaggcccagaagcaaaagtggtcttactagagtcccagaaagactcagtaatggaaacctaggaacttccaaaagtggggacaaattagggtcagaaacagggaaataggctgaagatacggataaaaaagcaaattcatcagagaactcctccccaaccctgccccttatctctgaagctttagctgggaaagccgggctgactcacttctggtgaatgtggtctgctctcctcctgtaggcaaagcccaggctcttacattgtggctgggcagggttccaagagggctagtcgaggcatgcaaagacttttgaggcctaggcttggaactgacacagtgtctcttctatgcattcagttgggcaaagcaagtcacaagtgtagctcagattcaagagctggggagggatagggtctacctcttgatggacagggctgcaaagtcacattgcaaaggaacgtggctacagggaaagaaagagttgtggccagttttggaaacaagcttaaggcacaataaggatgagattcctgaaaaattcagttttcaaacttgcacacaaaaagtaaggccatgtgcaaaaaaagattgaggtagaaaattcacaacttatgcaaagcactagtaaagacaataattgatactcaggaaattaacttgtactattgaggcaggctgcgtgtggctggggcctgttacaattgttgtgaagtcagaggaataattgagagagaatgttagtaacacatacacaagagcagagctggtaggaactccgacaatgcagtagaagtggccttctcagtcagtgtggctgccctgaaggtgccacagagacaataccacctgccaggagtcaagagtcccacaggtgtggggtgtagccgcttcgagggtgaagcccaggtttaagtacttgtttttaattttcaaaccacaggcaaacggtttctattgccagagcag

SEQ ID NO: 44168 - DNA, 4105 bp, Homo sapiens
tttggaaaggaatttttttcctccttgaggatgtgactatgctgtatgctgtgtatggttattttactttggttctggatgctttcagtggcaaggattctatgtgtgttccatggttatagatagcttttgtgtggtggctttctcaaatgctggttgtagctacatactgggtgggtttgtgagcaggttcactgcctccttgggtatcaggatagaggaagtctcaggaatcttagctcattcctcactgttgtgcgcttgtgtcagcaggttttgtattacactgtgcagttcaatctccaggccagtaggtggcatttacaggtaacagctgactatctgcagaagcagatgggcatatacttgatctttgtttactgagagaagctctcttttgcttcagccaatgggctgttctgtggaccacccacaaagctgggtggagctggactgtcaagctcaactttgacctcagatatcccaacggtaaacacgagcaccagacctgactgggtggttgagggagctcctggtgaaatgtgctgaggcttctgctgaggtttctacctcagctccacggcctggccaggtaggaatgcaattcaccttcctgtcatgtttctgtcctggcactccagacattcgggtcagacagacctcactatctccaagctgcagtgaatctgagagccatgaaaggtacctgctctgtgattctctaccaatgtggttatggtgtggaacttcttttctcagcccaaaacgtaaaactttgaggctctcctcttctctgcttcaggaatgctgctgctctatgtagagagtgggaagggccctgccattttgcaagcctgggcctggtaagcacactgccaatggggtacatccacccctaacagtcctagaatgaccatccaccagcatgcctatgtcagtctcctatgcgtgcagccatggctgtttctgcagtagttgtggggagggtagaaaaaagaggtctccctctccacagccatgctcaagcactggggccatatggccactggggtggaacatattcctttcccacagagctgagcatggcatctttgtctctgctggaagagacacagtcaactttaccgcataagtggaagctctcaagcacaggaaagaatgtgctctggtttcctttgccccagggaagaggtacttccttggtgggctgcactctctcttcccttaggagcagcactccctgagacctgggccatgggcattctgcagcttctctaggtccagtcaggcctgtgtggctgtcacaatcccagctggtgctggggaatgtctgtgggagatctggcaatgtggagacacaagggctgaggttacctgggcagaaaacagtctcacaatgggtatgcagcaaatatggcacctgctaccacagcttgggtccaggaacagggtgagtgactgtgtgcaagttggtagtctggtgtgatgtcctcaaaaagttaccaaatcaccacccatactagtgcttgggctcatgaaagcagaggagacctctaaagtttggaaaccagcagtctgctgcaagggtgaagggagccaagaacatttacctttttgatgaaataccaagtccctcaggagggtttgatctcagccagccttttgcttctgtctttttctgtatggtagcttcttcctgtgagttctccaatagttccggcaccctctctttaatattctatgtgagttttgattatttacctctacgttccattcttctttctgaggagaacttacatgtgacctctctagtcagccatcttgaaatttataaaacctgaattttagttttttatattatggaaaggtaatatgtttatagaaatgttttgatgtgtagaataatatctatagatgtaagtaaaggatatttaaaaggagtttttttctatgtgactgtacccaatttgtctgagaaggcagcagagggcaagtactttcccatccagcacatgctgtgagatcacctgtgcaggatgttcaagtgcagtagagaagggctgattttatgacatttatctcaatatgcactttgagcataagaaggattgatatttaaacagaggattttctgtgtactgggagtctgccctcactcccaacaccggaaaagtgctgggtgcttcactctcacttcaatctagtgtaaagtgctgcaaggtaaccaatcaggaatcttgatgtgttcctggatttggagggacacagtagtttactgtctgtgtactatggaagataatcttgaaatgaaatattggctgaagccatgtatgaaggtggggaaagagctaaggctgcactttcaccatttggcatgaagggggtactttcccatgggcctgatgtgaaagctggagcctctgaaatgaattctgcaaaggcaagggggccctggaagtatgagaatgtggggttggttgcagaggcaggagctgatgaggagtagcaattggtcagctaaagaagatacatcagggacctctgaagaattcacaatcatatgctcaagaaaaaagtcagctttggtcacaccaccaagagcatcaacactgagcaaatcaagcaggtcttttcctgctttcttttcttttgtttctctccccttgcaatcctgcggatttgggtataaggtagagagaagctgacagagaaacaagatgtctgctttctttgttttccactgtaagtttccgaaggaggcccaatctggagtagggagaaatagtcaacttaaaatgacttgtggaattttaactattacaagaacctgtttgaattagtgaaatgagacagttcttgcaagtagaaatgactatagaatttttaattgttcaacaaacagagaaaatcttttgggctccttaacatttcatccaggggcagggaaaaaaacctagccacaccccatagagcaggtattatgggctggcattgagatggaaagaattacaatgctcgatgactttattttttaaagacaggtttacccatgattattgtgtaaatacagttgcaatcaaatgctgtttgcttacatgttcaaatgattgttttctgtgaattatcaatgttaaattaaaaaaaccagaaagtgtttagtaaaaccatttcaaagtttatttatactattttaaaaaaaattctggctgcattttgaaaaattgggggcatttcttgaagatgagattttaagaagtttttcaagaaaaaaaacacaggaataagtgtagaaacttaaggtgggagaaggtaaatgcaatgcaagtagagaaaatgaataggtggctttaagaaagaattggaaactggagggatataggaggaattcgagagaaacaagtgcatgtgtgtatgtctgttgctcatagtggtgagggtataagcatccttctccctaaatctaatctttctcttagactaacaggtgccttgaactttaggaaaagtaaaatttgaaaatgtatctttgcattatttagtgatctttccttcccttaacatgacttttttcagagctcatctctgtggtttggcatggctacagttcactgtcctattttaaaagacaatcccaggttattatgaggagggttagctgaggagacagagcaggactgtctctcaaatcttcttctggaaggcatgaaccgagcatgtacaagcaataaacctatttccacaagcttgtcagtgtattaagccacatacaacattgatatattagtgctaaatctcaaattagctactggatttttagaactaagggaggagagccaaacaaagaagtttcttgtgaatctatagcagctccaggcagctgatgagctaccagccgctagtcctatgaacagatattctgggctgtctatttatagtgccatcttgtcacatgggctggcattgttgtctggcgttattctttactgtcagggagctttacttttggaatagccaactcctttcagtagactaaatgggtttttaagcaggccagcactgaatcctggactgtacagccaaaaaggtgtagaagttctaactccct

SEQ ID NO: 44169 - DNA, 1069 bp, Homo sapiens
atttctcccatgctgttcttgtgatagtgagggatttctcatgagatctgatggtttttaaagtgtggcacttccctgtttgctgactctctctcttgccatctgccacgtaagatgtgccttgcttccccttcaccttctgccaggattgtacatttcctgaggcctccccagccatgtggaactgtgagtcaattagatttcctttatttgtaaattacccaatctcaggcagtacctttatagcagcatgagaatggactgatacagcattcaagagccaatcaagttgattatgtggtgatccagtgagccctgatttaaagctcattcataatccctacattgaaagactggctctgagctatgttcaaaggctaaatctaacaagaaaaattaaaaaccccaaccttcaatggctagaagtataaaaagacctataataaagcctagtttttcataggcagctatggttctccaaggaagtagagccaataggatgtgtgtatatatagaaattttgttttaaagaattagcttatactattaagaaattcaaaatcttcaggtaggctgccaggctggagaccagggaactgaccaacatcacagttcaagtacaaaaactgtctgctggcagaattccttcttacttgggagagatctgtcttttgttctattcaggccataagttgattggacaaggcccatccacattagccaggcaattttgtttacttaaagtccacaaacataaatgttaatctcacccaaacacatgcttgtggaaacatccagaatagtgtttgacctaatatctggggactatggtccagtcaagttgacaagtaaaagtaaccaatcatgacaggtggaggctgatggatgtaagtaaatactagagagttaatattttataaataaaatttacacatgggtaataaaaacagaattttaaaaatttaaatttatttgctggactgttcattcatcctaaagtcatatttagtagaatatgaatttacgtctgtgtgtatgtggtgtgtgtgtgtgtgtgtgtgtgcatgtg

SEQ ID NO: 44170 - DNA, 7556 bp, Homo sapiens
tgacctgaccaccttaaaatttataccatcatatatcatcatgattcaactatttgggctacataacaataaatataattataacaataacaataataaattctacatgtttacttaaaagtaagcaaaatttatgctttgtcttaatggtcttgaccgagtcaatgttgaatacattataagcacagtctcaaataagaaaacaaatcaggaaaaaaattattaaataattgtgtgggattattggattcacaaaataataagttgattgatcttgtttacacttgaattggttatgataccaattcagcaattatttttgtcctatataatagccagctatgttccattatctcctgggaaaacagaagaatgagattcaactgcactagccaactctccagccaatacaggcaacgttctgtgatctagaaacattgctaagagtgtccgcaaactctttccctggaaacctcagaaaacagacaaatgtctgtctgtcttggatggcataattgcagtgctgtgctgcttgcaatgggtctgctctcagtgacctcacagtccccatagccaggacatggtaacttcagtattttgaaagattgagaatcagcattcctgtttcttaagggggaaaaaaggggccaatcagagacaagggtggcttgcttaaactgagtctagtgtgggaatgagtttctgcctttccccaaatggaattggtaggatattacgcttcctttttagaaatctaataatcagcatgtgagcttagtgtcttcactcctcatctatgtctgttaccagacagttcatcttttaaggtaaatgaagttgtttttttttaatgaggcattagagtgaccttaatccttctagacagacattcccaggatatttttaagaggtggccagggaaggagcgtgtgatttttggcagtctgctgacctcagcatgacctgaattagaacgccccatggaaatgctgtggcctccctggacctggagttcagctgatgactcaccaggggccaggcaagcatgagtcattccacattgcaaatggcactgaatgaatgccagtctctgtttcctctctagccttgttctagtcagtctacagaaacagaacagcaaccatttgctggtcccacttacgtctcaaatgaatcccagcaaatgatgtgtcattgaggataatacatgttgcagctacatatataccctgaaaaataacatttaactaagcaagaaggaaaatatttagaatggaattcaaatatactaatttgattctctgtgtcccatttctgatttgaacagagccgccgattgttacctggtatgcaattttagatccctgcattcctgttgttcctaacaacggcttgaaattccttgcaccttaaatggttttcctccctccttatcagcagtgagagttgatagtcttctactcgtgttctgaaaccttctctgcaaattgattagaaataagacgtacccaattaacaagattatgtgcattgaaagaaaagctatccttttgatgatttatgggaaatgagtgtgtgtgtgtatggggagtacaacgaaaacaagaagaaactaatctccgcatgagattttggatgtgcagaaatccatgttggaacttgcttgagccagccaagtaaggaacaaagagaaaaatatcttatttaatagctatcttcctggttttctcccttgcttttaaaaaggtatattgttatttgaattataggataatacatgcttattgtaacaatttcagtcatgagcaagtaaaactggtcatttcttttcctctgatgaatgttcagtttgctttcggttttcccaattacacacagtgttgcaatcaatattctttcacatgtatctctgtgtattggtgcttttatttctcttggctagcatcagaattcaaaaggttgcatatttctgacagactaggttctcaaaaggttgtggaaatttataatcccatctacagtatttaagaatcccaaattcctaatctcaccaactttgaaagctattaacctttcaaaattgttgtccatttgaatggaaaaatgctattttgggggtatttaatttgcaacttcatttatacttaccatatctactgcttttttttttaatttaaaaaaggaatgtgaaacactgaaacaaactcaaatattatggatgtcacttaagaataaaggaatggcttttttctattcacagattagatgtgcaggagaaaaacagtaatattaaacaaagcaaaagataagtaaaaacagtatttagttggagataaattaagaaacttcttattcatatcacagttgacattgttgttaattattctatgtgaattgtgaacttaatttggaaaatatgtactgatatattacatattaaaagctttgtttttgttttaaaatgtgctgaataaattttgttagtgaaatatattaaggtgaatacagaagagcttgtgcgttcttccttttgttttaaagtcatatttcttgggttcagagtgacacacaaaacagaggacttcaggtgcctgaggcagtggttctacatcttggctacatgttggacttgccaggagtcacctggcaagctttattggctactgatgcctccatcccacactccagagcttcggatttaattaatctgggatgtagcctgattaggggatttttaaaagcttccaggtgattctgatgtgcagccaaggttgagatccactgatctacaggatatctttatttcaccctatttcttatcctgcaagaaattaagaaaattgaacgaaggagatttgcattattaatgaagcataataaaatacagcttatgacagaaaaagctacacagcttttgctactttcaggggaccagtttaccgatgcaaaaaacaaaaatccttctcccataatgatgtcaactctctttcgctctctcttacacacacacaaacactgttttcattctgatagatcataatggcttgtttgtcttgcccttgagttgcataagttgatctatgtacccagggaaaaggtactgactttctatctaaagagatactgggaaaatgtctcagctaaaggaaaaaaaaaaaaaatagccacagcaacacatcactttctgctatggaacaatgttacccaggcaggccaaccctgattttcctgctttctgaagtccagccaacagggaagtgccccaccttctttttgccagaaatcgtaggggcgatttgattccagtacgtgctttgagcagtgaaatggggtgctggtgtcctctagagcggcagccttccagtgtttcataagccatgaaagtgcctccccaaactcagaaacctgtgtagttcctgggtcctggcctatagttttgtctgtgtcctcattatcacaacaccagcccctgtaaatcccagggtgaggaatggggcaagaataggcggtcggcgactgtgtgccaatggcaagaagtcagaggaagggaggctccatctacctgtcaagaccactacccctggggcctgtcacagctgacacccattcgtgtgtgtctattcagttaaaagtaataaattttatcttgtttaggagacaggtggtggagatttttacttttgtttttggcagtgaaggcctgtactctggagactagggattaggtcatatacaaaatctagaaccagattgctttgtagcctttcccttctctgtccttctgagggccatgcatctgataggtaggatcttctggactcctaatcagacagccttcccacctccttgtccctggtatctcagccaaaggcacactttaaagatggaccattccctctggagtcctaaggtgaaataaatataaaccaggaaccttactctgcagactgccctctgtctttgctaattgggataatattactcacagtccctttgtcttgcactctctggagaggtaggaggtgaaagcactgttatgtctatcactactgggcaacagaaagtgaaccactttagctattccagtgcctcaaactgttgggagaaagatgatataacaaatttatttggaaaaacatattcttcctataatttagaaagtcaagtaaatgcattttcttcatcattttgttacagaaagctgtaggatagttttaaaggatatcattttctcgagctgtagtttctgtctgttctgttgtgtttttgtgaataatgaggcacagctgaggagcaggccccttacacaggcaagttaaggtcagcaccccagccttttgttcactttcccagttgctttgtccctggagcttccccttctgggttgagattggctatttttcttgtttgtgctgtttttttgtattctttttatcaaattaaaattgttttcttttttacttaaaaattattaatcaacttggcttgcatccaaggaagataagcaagccaggatgagtgtatattcaagtttggggcctgtaattttgtcttctatgcacactgggctgaaatttcacaggagggatgagtcttccatatgcatgattgtataaatagcatggctttgtaatatgggagtgtagtggccttaaaatagctaaactggaatatgtaatgatagtgctagttttttagctttatacatctgtgtagagtgaacaacatcttattatgtgtatgtaatgtgttaacaaaatgcctagcagacaacggttggctttgcttggaggagaacgagcctatatgacagagacttggcacattggtatacagaggagcagaaattagataagaagtcatagtgctggggaggcaagataacatccttcaaacagttcagcccgaagctggctggacacgccatagaaaagggagaaaatgaatctgaaaggctacatgccagatggctaaagtctaaataacagttttctactgtccagggctattcatttgttagccctagaaatttatctcttaaaaactttttatccagttaacttttacttgagtttagtttttttttttttctttttttctttggagaggatggagtcaagtgacttgccagccatgagacagagtgagtgtgtttggattgaatacagaagccagagtcaacttttttttctgtcttttttaaataacaggatggagttccactactgcttggagtagaaggccaggccagggatctttatgttaacatgatttccttaaccctttaaagctttgaagataaaactgaatccattgtttgtgcactatttactgatagaatatcatgctaaactctgtataatgagtaaggtatccatttctcactgtactattttaataagtaattcattcacttttattggtaagagagagtcttaccaatattaagactcatgccgtattatcattttgactgaaagagccaaactttgtatcttccttccatatataccattggccacatcctttccaagattcaagggcaacatctctaattaagattttaacctttaacctaatcttaacacagaaaggaagcagagtaccataaggcagatgcccccttagtgtggcaaataggacttcattccctacagtcacaaggtcaagggatagtgatgttggtccctgatgacccatgaaacctcaaattctccactatgccctcgttttcttgtactgagtcatgccaatgggaacaagtgtgtagacattagtaaaactcatagaccccctcatggtctagaggacttcttaattcaatgaatggaaaattaagtttagatgaataaaacctaagactcactgaatcttagaggtgtcataagaacaggggaagaagtaatttcagagggccatgaataatacttgcattttaacaggaagtccaattggattctgatattttcatgtggaaatgtttctaaagaacagactgtaaatagaaaatacgtcagcttgtgaaagagaaaccctgatttttgttaagagaatgaactaggccctagaaactgcgactttaagctttggcaggatagaatgacctatttttcatggtttttattagggaaaattcctcaggaattgtacaagtatacttttggggaaaaatatttttgtgttctacttatcagcctcaatcagaggctcaatgctaaggcagtcctcatttgtatactaaatcaagaaaaacataagcactaaacccaaattattgtattaacttttgaaagggatataaaatatcataaaatttgtcccaggttctaattgtgttcaagcatttctagtgtattttaaattatacatattaagtttaaaaaaaattaaaacatttagcaaaaatggctatattaacttattacaggaggaaatcgaggtctattcctcgtaacagagaaaaaaagctaaaattataattttgaaattcatacttcctataatttcaaattgctatttttactttctgtttatattgtagtgcttgaatattcatacttcataggtccttagtgtatttctttttcagcttcctaagtaaaaggcactgagtaagctaaggggagatttaaatctaagggaataaaaacaggcctgaccttccatggatctaaggaaaatgggtatacaaggcaccagcagggaagggtgagtgatgcccttcacattcctgagaataatgacacatctgaatggaatgcaaatactccaggtgaagaggctgttcaagtagtgacaggataatgctctcatctgcacttcccatttaccctcatgattacaataacccaatggcaaaagccagctggctcatgtatcagcctagatttattcttgactcctttttttccttactgtaatatatgaaaaatggtataaaaatagagaacagagaccacagtgacatcccacacagaagctaatttgtaaattatcatatagttattatataaattgaaagtggccagttctacaaacagatgcaattaaaaggtgcctatatgatttaagacaacaaaggcttccccctctttcaacaacactgtactctaaatatctattgtgtgggcacatgatccagctagacaattacggagctcctgcacatttccatggtggtgggtctaggagttggtttgtgaccaagcatagacaataaagtcttcttgatgtgtgggcactagatgagatcttacttccgtttgaatcgtgagtccgatgacagatttgtgctgcgagtaattatctttcctgctatatagggaaaggctatatgaaaatgaagccaagacatggggataagcatgaaattgagagaaagaaagtcttgagggcagagctcctacatctacatgcacctttggattccccagtgacagaaatgttttaccattttttccaaaagccagtttgagttagatttattttgcttgcgattgaaagggtattaaaaactttaaaagaattcagtcagtcgctgatgctcggtaacttcc

SEQ ID NO: 44171 - DNA, 4187 bp, Homo sapiens
tctccctgcctcagccctgaaatcggtcatttatctaaaaagatgtgcttgattctatcaagaaataattacttatagaccctttcacacatttatatattttaatatctattatctctcttactcacttctactatttttatctaaaaaacatgagtctacactgatatctccatttccaattcatactagtgggatcattctagctttctgccttctcatgtttgtttattttttcatgccttctcatacttgtaattcccttttccagtggcgagaaacctggctaccattattcatgacataatgccttatttgctaatcatagaatacaaagaaaatggtttcaggttgctcatccatgtctatgtaaaagaagcccacgaataagaactcaatatttgtttagaattatatttgtttttagcctaagtgtatatcatttaaatcctgtaggaaaaagttacctgggttaattctctctccaatttattcagtgtaggtaggttattcttttgaaatatggtttgctatatttgtttttgttttgactcaattttagagttatttccctatcctttccgattttttttgtgtgttttttctttctttttcctttttttgagtatgtaaaacattgccatggtcccaaaagtcagacctgtacaaaaagtatacacagaggagggtcactgaccaccttctgtcattcctttcatgcttcccacctagcctcatccgccttctctaggtaaccaatcacattagtcttctacttatcgtccctttgttgtttttgcctaaataatcagatactttatttcctcttctttctgaaaaaaggagctctcttccacactctgcctcagttcttccagctttgcttcattcctttgcatagttgcttagtattccatttcctagatacaccacagtttggctaatgaatagtgtttgtttagacatgttgcttccaatattttataataataaacaatgctgcaaggaatatatttgtgcacaagtattttcaaattgttggaggtatagttgacccttgaaaaatgtgcaggttagtggtgccaacccccatgcactaaaaagtccatatataacttttgatttcccagcaacttaactactaatagcctattgttgaccagaagccttaccaataacataagaagttgattaacatatattttatatgttatatgtattatatactatactgcaataaagcaagctagagaaaagaaaattttattaagaaaatcataagaaagagaaaatatatttactattaattaggtggaagtggaacatcgtaaggccatcgtccttgttgtcttcttgttgagtaggctgaagaggagaagcaggaggaagggctgttcttgctgtctcagagtggcaggggcaaaagaaaatccatgtataagtagactggcagttcaaaggattctgttaaaggatcaacggtatatctgcagagtaaattacttaaaagtggtaattctatatcctaagggaatgtatatgtagctttgttagatattgccaaattcacctactataaggatagtatcaattttcattccaaccagcatcatatgatcgtgtacctggaaaccccctagagaatctatggtgactcagcaataaagaattcattaatgtgtcaagacataaagctaatgaataataatcaattatatcataaaatggtaggggaaatttcatttacaatggcgaaaaagaagacaagatacttaaatttaataagaaatatgtaaatcctatacatggaaaactttaaagcacttctgagagacataaaagtagacttgaacaaatagatcccttgttttaggtctgatgactcaacattataaaactatcagttctttctaagttaacttataaatttaacataagttcaataaaactaccaacaagtgtgttttgtttgttttgtgtgtgtgtggagctagaaaacaataatcagaaatacataaaagagttataaagagcaattagcccaattagatatgaagacatacaataacatatagtctctgtaattaaaactctttagtactgatgtttgaatagaatattagacaagtgcaatataaaaggaagtgcagatataggtccaagtacatgtaacacttaaatgtttaaaaaggtgacatttcaaaacactggggcaaaaataagtttttcagtaaatgaagcatggacaactatttattcatttgaaaaaataaaacaagctccatatcccacatcatacataaaaataaattagaagtggaccaaggatctaaatataaaatacgaaaccatacaaataccagaagtaaacataataaaggatgggtctaatttatctagtagagaccttggtctttgccacatgctctgaaatgactttcagggatggtgtaatcagggaactctacactttccctacctattggtgtctttttagttttatgatatacaaccctgcattagtcagctgcacccactagccatgaggctactgaagttggcacttgtgcatgtcactctctggtgggatggtgagaatatgtcatcgtgtttcacgatgtcatgccattctcatgcaatttccccgtcttcatgtccttttttgtccatgcctttttttttcttatcctttttatccttaaaaatagcttattgtaccacatccaggaaagatttttataactcttattccttattttgtttgccatactctgggtttcctatgcatatatttaatgtcacaaatactttattgtaaaacaattgctgatttgcatctgaattcctccctaggacataatctcttagagaacaggaaccttattttatttgatttttattcctagtacctactagaggctggcatatggttggtgcttgcattaatccttataggctagattgtgttgcaagaatcatcaactgtccaatcttagggacttgacacaacaaagatttaaatatcactcataaaatatattgaaaatctgggtaactctccagggtagttgtccttcctgtggctgctcactgatccaggctactttgatcttgtgactcaaagttcaacaaaatgtggatgcgtcattttatttacacttcaatggccagaacttacgaaatggcctcatccagttgcaagaagtttgggaaatgtagccttccatatttacaggaataaatgaaaaactggatattgcttaataattgttaatgagtgaagtactatcagggcatttctgaaaattcagcagagatcaaggaacttgagaggagtctatattgcaaagatctccaatcaaaagaaaccaaattagataaattctgtaatttattttcaggattgataatataataactccctgaagaaaacttttatctgaagtctccagatcattctaggtgtttccatattattctaggaggtatagtcttgtctcacagagaggtagcataccctaacctgagttcacaaatatctataaatcaaaaggtcctaagagcaagtgggtcacaaatcatagtcctagaaaagacttctgagttggagaatttgcccagtcaagaacagggacgaaggtaaaaggattcacctatctgaatagtaaggagagggttggcagaacaaaatattgtcatggtcctagatggggttcttgtcccagatgaaattagacaacagccaggaaatggggcagaaactcaccctggagtcttaacttaaggagtcatgggaagccaaaaatgagagagcatgtgggtagctgaggaggctcattcaggatatatggaaacttgaccttgagaagaggagtaattctaatctccataaattcttagaattaccagatgttgttctcgtgggattgatggtaagattgaatctgaggattgtattataagcccaaaccctctgtgattaaaaacaaaaagattttcttacttttactcttagttagaagcaacaaaaagtaacccttaaatgagcatgcaacaggatgaggaactggcatgggaaaacattaggcctattcatttgggccagggtttgttctgtttcccctgaacagtcgcaaaaagaatgccttcctcatgttccacccatcaagtttacaggattaagtaaa

SEQ ID NO: 44172 - DNA, 4525 bp, Homo sapiens
tgagcaggatgatacacaaaggcttagcatgatagatagtgtttacttatttttagaccatttgtatttttcatttcatgagacctctgccattgcacatttttgatagaaaagtagcaatctttcctaggaacatttctgctttgctctttgacttgtttcccttctgctggcaatatagtcatactgcaggctgttcaaggatagagttctttgtgaagtgatgaagatgaattattcctgccagacacaaaaacagttattttacttgttacttaaattggaaagagacaaagaatactgttcaattttaacttgccagcaggcgttcagggaaaaggattttcctaacaacttggagaatgcacttctaaaacatctgtcgacattaaagtgaggctaaagatcggtaccagtgcaaagcagagctcaatttttctctccaatttcaccaaaatcagtagggaaggcaaggggtggcagctttactaatttattggagaaatgctcgggtgaaatgttggaaagactctaattgttcatggactcccatgtaagtataaattctctgcattatatttcctatggaggttacagtgagtagagagaagtttttttgtggttgccaaaatttagataataaaagtgggacttcaagatttaattgaatagctatagccttgaatcaagagcaaaatagtaaaatgtcattatagatacgtatcaagaagaaaaacaatccatgatttctgaaactatagcagagttgcactgtgctacaaacacccagagcaaactcccctcagagaccgccctaaaggacaaaatggttcttaactggaaaaaaaaacaccttctggaatgtcggcaaagcatgtaaattacagatgattttttaaaatgactccccaactttgaaactcgtaagcagatcatgaacaaatgtgttcagcagaacctgtggtatggcctggcagcaacctcgagagaaggaactgacatatccttacattttcaagtcatgtttttactgtagaaaaagaaaagtgttgcctatcgcccagtcaatggaagtgtcagaggtgtgtgaagtagagcaactccatcttgaataggagctgggtaaaataaggctgaaacctactgggctgcattccagacggttaaggcattctgagtcacaggatgagataggaggtcggcacaagatacaggtcataaagaccttgctgataaaacaggttgcagtaagaagctggctaaaacccagcaaaatcacaatggccaggagaagtacctctggtcatcctcactgctacactcccaccagcgccatgacagtttacaaatgccatggcaacatcaggaagttaccctatatgttctaaaaaggagaggcatgaataatccaccccttgtttagcatatcatcaagaaataaccataaaaatggtcaaccagccgccctcagggctgctctgtctatggagtagccattcttttattcctttactttcttaataaatttgctctcactttaccgtatggactcaccctaaactctttcttgcacaagatccaagaaccctctattggggtctggatccggagcccttttctgtaacagaagatggaaacttgtttttcttttcatggtttgtgtgtttggtggatgaatcagaggtcagacttggtcagactctacagtcagccctttggaattagggatttttttcccaataaccaaatagtgaccaactcttctcctggcagtgggaatattaaaattgttcttttaggcctggctgattttcatcttgtgatgatgttttaaaaaagcagtcctattgtgttctctcatagtatctctctctccttgactccattcaaattgtaggtggttctcaggaatgctgtctagagatgtggagaccaaggtatatttagtcaaattttagtatcgacattcggttaattagagctatttgagattgaatgggagacactatgtcaaaaaagactcttaaaagttaaaattcaagctttgattactaactccatgcctattttcctgagaagtatctgatgtctgcctgaaacactgtaattcctttcttctttctttttttaatcccactcattccttttaaaagttgacttttctctttaatgccatagctcaggtgatctatgacacatcttcatttcaaggttcatccctttgtaattcactaggcaaaggaaattcgaatctcacagggacatttatctgttcacgagaagaaagaggaagaaaggggcccccttaagatagtaagggaagggatttagggagagacaaagatatttttccaggacttttttgcacctagatccattttaaggccattaatcctttgatatatgtttgcaggtaagagaacaaaggaatcaaacttgactgcaattggattccacatgaattatcaattagagacataagaacatgtgatttataggactgttttgtaagtgctcctttgtgtagcctattgacaaaggaagaggagagatgtgctgtgatttcccggccttgttccaaagccctgttgccaactgctttcagctatgaattcccaaacagattttagcacttacttccaaaaccagatgaagtatcaaaataatttctaaaaggctagtggcagtgcaaagtgacagtgacagggacttacaacagccttcctggacaccgtccaccacctccctaccagctggtgccctgcaagtgcatgcgtggtgctttttgctttcttctaacataatcctaatcgtgatgctttgaaatagcctaagtcatttttttttctaactccattttgaggatgaaagcaactgtaacatcttttctcagggcctggcatgtttgaggagttcagttaatatgtacttgataaataaagaaaaaacaaataatttgactaatagaaaaagcttctgaggaagttagacttaagaactgtattcagatcacattcagaagtagaaaaggagagaaaaccaagcctctgcttgaacatgcattcgttcattctacataacaactcctacgagtttgattcagtgatctattttgggggtcctgtggatgtggctatttggaaaccattaagaggcagtgtaccagctcagggcaaagcttctctacatgacttgcactagttacagtctgataagtctttcttgggttaaacaaggagaaagataagttttaaagttacctcttgtacctcttatacctagagtaagcaatgctttaacatatcctctgatgacctaatgagaaaagtaggatctgttcttttaatataaatcagaacatgtttactaggcaccaactcttctctcagccagacttaaagacatgtacagatatataagagagtagaagaaacagtttctgttcccagagtcaataaagcagttggattggaaacattcctataaacagagacatgatgaaccatttactgatagttcaggggtatttatgctaaattatgttccttaatacttatatccaaattcactgacatcaacttaaaatgaaaaagattaatctaaataaaatcttgatatatcagaaatttattactgaaggccagagactgaggtctggggttttgaccaacagggattggaaactagaaattagggcagttaattaaggtctttgactgctgactacagaaattcttagattgcttggaattttcagatgaccaaatcttctaaagagtaatagtaaacagctgatctttatatccaggtcatatttatcagtcctacagctcaatgctgaccccacgggaagggctgatgaaggtgaataaatcaggatacaaacagccaagagaaaatctgtaaatacagaggtgcttctctcttgccccaaaaacttttccctgttctactcccatcagtcaaccttctctgtattctatgagatcctaaaccattagaatcctaggctttgttttctcctttctcatttgtcatattatttgacaaggcggcacactcaattttccaacctttttattgtcttttgttcaacagtgctacattctagcctgggtctcaaaatccttctccttgctttgctttctctaggctgctgcccttcttgctaattttttgatcttctcaactgtacaaaggtcatctgtctgttgcactatccaagtcaatttgtgcagtgagtaaagacgcagagtctctgttagagctctcaggtttctgtgttcaagaatgctgggccagtaggctgtcttttagagtgagacagtgaagcaaataattccccaggatgttttctgagattccattgttaaactccagtttttcattaatggctctaaatggtcattattgcaattaaaaaaatttttccctgtggttatgtgtgtgtgtgtgcacgcatgtgtgtgtagggccagagtagtgcattggggatatgagatttgagggtgagaactttgccttg

SEQ ID NO: 44173 - DNA, 5024 bp, Homo sapiens
gtgtaggcttctgtcataactgacttactccatcatcaaaataacatctgaggtagataatggcctgaggttatgccctgtgttatatctgaggacactaaggctgagagagatttaaaaagttgtctaaactgataagccattttgattaagattagccacactcaaaagtgtaaacaacttccaaatcatcatgttttctcctgagaacaagggacaattcacaacaaatacttgaatgtgtcctacaggccactcattgtactggcactgtccctgcctttaaagtgctaatagtctcacgagaactagaatgatgcatggtactttcaagccacattggctaagtaaaacccaatggtatgaccagaacaactggtcttaaaaaaaggctctggcagccttttagcatagaggttggctaacagcactgagcacagaccttgaagtcaagatcttctggcttcacatctccaacaattaacttattgcttgacttcatatagtctgtttcctcatcagcaaaatgtaataataatggaaataattatgtactttacaaacagttgtgtgaagtaagtgagatactacttactaagtgctcatgtggtttctggcacttaataggcctccagcaaagttttggaggagctaagaatgagactccaggaatggaatatctcaaagataggacttgtgtgtgagggccctggactggaaagacactaggagagggttttgcatggggattcctcttccgtaccctaaacatagtgctaaaattttcagaaaggacttgcttgggaacactatgaataaaacagaatgtccccccgccccccaccctttttttttttaaactgctgacaactgctaaaatgcttacagacttagcctggattttcaaagaggattagatatcactaacaagattgtccaggtgcctaaaaatttatgcgatgttttctctgatgagggagtgctttgttgtgagcttgcagaacagctgtgatctctgtttatagggcttaccattatttgagtgtctgtgctctgcctcatgggctataaagtaagccaagtcatcctgtttgctcatggtaaaatattacaaattaagtcaataaatgcacttctcccaactgaaaatctgcacccctctggacatcacagagctatctgataccttgtctttctgtactctggtctctaggttccttgcaatctgcaacttgattgaaaaattcccagttctatattcttctgtatgaagaagtagtactgcatctgtaagccagatccttgtttcctcctgcttactttatcttttcccatatcgttctaggaagacatgtttgccttctcagtctgcggagaaaattagataagtattatatgttgcttttaatatctatccagacaattacatcaaaaacttttaagtgcttctcttctgttccctatttgactgcctgcagcatttctcaactaaaagctctctttccaaactttgctttaattgttaataggcatctgctgagaaggcttaactttgctttatggcatggtgtgggagatttcgatgtgcctcagcttgtttgtggcagaacttggggaatggtgagaaattagataacagtctgttgagccctaaacatacatcagtaagagatcactgcagaaataatagctgacatttgaaaagcatttcataatgttatactaaccaaccttcctgggttaagaactagattgagcagcacacaatccccatgaaaatgttctcaatttactactagctgagagccctgctgcagttctgttattaactgctccactatggcaaaaggatagaggagaatgttgaacagggcttttctaattagtgtttgtggtgctagtctgctggctgaccttgaaattggaataaggcaggtcagacattaaaactcagagaaagaaatcagaattctttaactctcttctctctatactatctttaactccacttctcgactcgtctactctacttctctcatactatcatagacctacaactgggcaacccttcatactctatgtttatttgtcttatacttttacaaggcttaataaaactccagcttactagccaaccaacatgagagtttttctgattctccataatgacttctaaatgtcaaatgagtaagattcagtttatccagttccttaggcaagataacaagcccccgatttctaataatgtaggaagcttgttactttttaacaactggccttgaagacctgggtggttcccaaaaccccttaatttgactgcaaagatgagtcactgaaaactctgtcatcaaccatactatggggacagtgctaacagagatccttgaaattcccagataatccccaaactaccatttggctaccagctttagcctcttaacttaaatcttcactagaactgctaacaacattacactgataaaagcttcaaaagagctagcatatttctgagaagtgttaacttggggatgtatcaagaattgggccatagaaagaagttatagaagcaaaaattgaatattcattcttgtataacaaatgcattgtagagttttgagtacttattgcatcatttaattgtcagtagaatagtttgatttaagctatataacagttttatcatttatttgtaagccttaactaggtagaaatatctttttatagaatttaaacaatatattaggagcagaaactgacttgctgagaaattgctgggtctttccagaggtcgtatgaatagattcttagacaaaacagaagtctaattctagaaaactgtctagttttcaaatgtctattataatctatctctgagtcttaagtgttaaggcctactgctcttctcattgtgttaatgggcttttgcttgtgcgccgcagagactaattttctttcccatatagatataaataaggacaatggtacaaaagagaaaatggtgagggaggccttggagctagagttgggagccttgtaggattccctgggttcctcagaaagcgctccctaatgtggaaaaccaaagtcaggtaaatggaagaggaaatgttaaaggagaattactttctggtatttatgctactttcatagacatcttttatagctcctgcaaaggcaagaaggaaatcattatgcactttgtatagtgacccaagccctggcatggaaattaaaatacttgctattaactctaactctgccactaaagtgtgtggcctcaggcatgctatttcttttcctccatctctttatttgtaaagtgagtagtgtaaaccatgggtgaaacactcattttctgcccaaacatttgatgttagaaaccttgtgatataatggaaataccacacatttaggaatataagcaaatttctagttatatgttgtgtaacactgattgagtgagctcttttagtttcttatcagtaaaataaatagattaacacacactttgcagggcagctgtgaaaataaaagataacatataataaataccaggaaatgtgcccagaatgtagaacagctttacattaaaaaacaatgtttattcaatgatgccatgacctggtcctaaatggccctgcattgcaggttgagttgtaagtctgacttctgtctccatggattaagcagcatggagtctgtgttactacctgagagtaaaagcgattcaaagctcttggctctgtctatgaatgaatgcaaaggcaattctctcccaggacctcttggaaatgctatgggagattagaggcccattgcacaatcatgccttaactcagcctctatggccctgggacctctctaacccctctctaacccctctcagctatgttgaaagctctgctggtgaaggaaaatgtagtgaagcatggcaagctactttactcacaccaagaaatgcaaagccctgacaatgtagaggggttccagaataagtctttgaatcctttttctgatattctcaaatacttgtgttgagaattgggcaggatgctgaggggtggggagtaggcaaaagatggcgaaagacatccacttcagcgaacctctaatgtttcccattcagttgggaatctaatgtttcagattcagttgggaatctgtcaaaaaacgggctacatcttaggggaaataatccatcttttaaaagtttccatcaacaacaaacttctctcatttacaagaaaatgcatcatttgacaccttggagattttacctggaggaagataatttcttgaagcttcttgtgcctgtgagagcccaaagctattttgcagctgcaatattgataatgtattcacattctccccagagcactggattctttaaccttaatattgagtctggaatgagattctgtcctctagaggtcaccaatgcaccagatttgaaggccacggaggcttctaaaatgctcaggaagagctaggtgtcctgttcacatatgaatgaaagagaaaataaggcaagtaaattatcctaatggttattttccagctagtctctgaagaagtaggaaatctggttttcaataaggcattttaaaatggatttatcttggtttatcttggcttttctctgcactgatctagctgaaggaaactcctatagtaattaaatacttcttaacagatagtttacttttgatagtgagagaagaaacttttctaaatagaagaaaaactgatgtagaaataggctattatagcctccattaaatgagtgttactttcactggtgctctggccaaggcagaaggtctctctgtgcctcctcagcacactgtcttcaaagggcatggggacacagaagcagggaaacatggccctttaattcacagttatataatttttgagttgctttataaggagagacgccatctaaagtatttatatctctgcagacaaattagaaactgcacataaagggatcactttgagagtcaaaatatgcctttcccttg

SEQ ID NO: 44174 - DNA, 2626 bp, Homo sapiens
ttatcaattaaagaagcatctcaaaaatgaatgagaagaatcttgagtcctcttggtctagtcttttgttagatcctttcttgatttttcaagtgttagagtcatccaaaggtcaataaaatctaactaactaaaaagcagtatcgaacatttattttgatgattcaaaacagtgagaagggccgggcaaggtggctcacgcctgtaatcccagcaccctgggaggccgaggtgggtggatcacgaggtcaggagatcaagaccatcctggccaacatggtgaaatcccgtctctactaaaaatacaaaaattagctaggtgtggtggcacatgcctgtaatcctagctactcgggaggctgaagcaggagaatcacttgaaccagggaggtggaggttgcagtgagccgagatcgtaccactgaactccagcttggtgatagaccgagactcctcctcaaaaaaaaaaaaaaaaaaaaaaaaagtagtgagaagggtaaaatacctgaaggacacaacttaacagtggtactggtaaaacctgtgcaagctgattaatagacatttcaacctctaggatgacatgaaatagcattttaaggcattataagagaagattcaagttcctatataagctcattcaatttcattttatagctcctgtttgctatttttctacaaaactatttatattctagaaaaaaacatatttttattcaagctctttaagtcaatatgagtctagctagacctgctgagttggttctttcataaatttatggtaaaagttcaatatatatcctctagctgtacttctcttttactatgtatgactggaaagattcactcttatctttgaagaatacacctcctactgattggtctcttgctgagtgctgttgactgctctgaagttgacctcatggttagcaattcattctaaggcaaatgaatcatttcatcagcaatagtcatgcaactatgaaatctcagtggtggtttccctggccatctctgccaattacaaataccagggacactacttggctgacttcagtcttcacatccaaataaggagagacaggtcaggttaaagctggacagggcttctgtgcattttatacaaaggaaatggggaggctctgcaggaattagtccatatgcaccttttcaaagaggcctggcactaccccctccccttcttcagtattctgtacattcctcaaatacagaatgaacagagtggagcaagttttacttacctctccatcttaaataaccactaacattctctcaaggatctaggatataaacctggtgcactaattctcatcacaacaaatttcttctttactttttcttaatgccttcaggaataagagaaaccccataaatcagaaaaagcctcatcttttaagaactactgctcctttagaggtggaattgtttgagtaattgtataatggtgcttggcacttagtaggaacttaacagatatttgttgatttaatgaataagtgagaaatatttgttaggctgcagttttaaatgagtacagctgtagaaggtccaagctcaccaagtccaagacgagagaatgtggttggtttgccattcacatggctggtcttggtttgggatttttgttacctgagggacagtctctgctgaaaaaaaaaaaccctagcagaaccaggctgctactgtgactgagatcattcttctgtgtctacatattttatatgccaaaggagagtacttcctttgcctgtctaagctccaaaactaaccattcctgtctctaagcttgtcaatgctttcaacagcatagcttggaatggtgccaaagagatctacaactagtttgtattcatttggaattttcagtacccattttccaagatagacaagagattcacaaattttccgtctctgaaaatgctcctgtttctgccttgaagggctgtatcatatctagcctgtaagaaacaagagaggtctgtgaagaacagcttggggaaaaaaaaggtgagaattgccttccaatgcagaattgtatgaagcaatcttcacttttgaatcacagtgtgcttcatgccaaaattcaatagccacatcgaacatcaatgagctgagtgtggaatacaccttttcccaagtgatctaatgcttttcctaagttgacttttgaagtgacacagacttctgttgcttcatttttaacttcttttctttcttattttatatctaacttctagctttgtccctcaaaactgatgttagtgcttcataagccagaaacaatgggaaagaggcacctcaccgataccaagatgtatgatgttgctgttcagttgaaaggttcgcaggaggtggaagtgtaagtggactcagtgcatggtgtgtaacatgttgtgagaatttactcctctgcagctttggtattaaagtctgaagtattgtgaatctgtgcatcacttgtaaaatcaacaaccataaaggccatttaaatatccataatatcttttgtcagtaggcaagccaattgcttatgcaagaagtagatcaatttaaccttttatttggcatacattttctcagtttttttttttttttttggcacaga

SEQ ID NO: 44175 - DNA, 1782 bp, Homo sapiens
ttaccaatgccctggttaccattaaaaggaagaccaggagaagtagtgtaggaagagtccaccaagcatgaggggacaaaggaaaatcacagaattgtggcaagtcagcttctgagtgaagaatgagatttctacgacagtagaggtggaggaagtcacattgaatgaaatctatttaagattggggagactattgtttgttgaaggccaattatgagtcaggcactatcaaaaagtattttatgcacattatcttatataattcacactgcaagtaaacaacaggggaaataatagctctattttttccagtgagaagttgaggctgaggaactttaagtcagtttccaagataacactggtagtaagaggtggggcctggatcggaacccattctctctggctcctggggtcacgtgctttcaactgaggcaggatagtgctgtggtcattaactcacatgatagagccccgcttttgagtgcatacagctttttctagttttagtcctaaccttctggaggttgttttcattccctagtgcaaggggtggaactctgcttctctggaaagtgtttcggccgaatgttattccagctattgtcactctgtgggggaaggagcctggagcaaaggtacacagactctcctctctgcaggggcctgacagttcccaggctggggcttgcccaggcatgatccacagcactctggagtctataggcaaacctagaagagagcatctgtgcctgtcacttatccctttacttgtcctgggtcccacaacagaaaatggtgacattcatatttaaaaaatgagatctgaaaaaaaaaaaagcaaaacatatgtcaatggaggaaaaaaagcaaaacatttatctggcactgtgcactgcatttgggatttcacatatgtgatctcattgaatcctcactacaagcttctaaggtgcaccttgtttttgttgcaaaaatgttaaacagaggcttccttcaggtcacacaggcaagaagtttcaaaactgcaattgacacttaggatgatttaacaccaaagatttgacagacacaaaaatattaggagttaagcaaaaagtgtttatgttgagaaactacaaatattctgaataaattaaaacaaattgtgtttttcattttctatccacaaaatgctgctcttttattttcttttttgggatttctgcaataaaacaaaatcataaaggattatataaaatcaaacaacatcaaacaggatttcataataaaacttttggtcaagtgaggtcatactttatatatcggacttgatttctcacagtggctcaaatagacatctgttgaccaatggaaaactatatctgtgaatgagccgtgacttataaagcctccaaaactctttggaaaagaagaaataggaagcacttcgtcttctattgtgtgaaagctggaatgaatatgccagctcaaggatgtaaaggcagtctacatcttatgtgtgtgcttagcttctttgttcagctgttaacaatgtatataaggacatgctactagaatattgtcaagttgtctgtaatttactttgacatacttcagcattaacatggtgagatgtgtgtgttttgggtggggggttggggggcggttgtttcatactattccctggggtggttaattgccctagatggaaatacatttccatggcatattggtttcctagggctgttgtaacaaattcacacagactatgtgacttaaaacaactgaaacttattttctcac

SEQ ID NO: 44176 - DNA, 3207 bp, Homo sapiens
tctgttccatgcccctctcctagcttcagatggttgccagcaatccttaatgttccttgtcttgtagatgcatcacttcaatctctgcctccatcttcacagggcggtctcctttgtatgtttctatgtccaaactttcctcttataagaacaccagtgattggattagggctcactctaactcagtatgactctatcttgattacatctgcaaaaatcctatttccaaattgggtcatgttcatgagttcctggtggatatgaatttttggggcacacacttcaacccagttagcatctaattaaaaagtcctgttacagagttagctatagcaagaaatttagcggcctgatgaagtcaaagtttgtaaagtggcatggcaaatgttagaaatatgttttcattcatcaaattagtgtctttagatatgtgcactgactggaattattaaaaacatgatcctccccctttgccagatgaggcatacaagtatggggagctctgcggtctgtacacttcagcatggtgcccaaggcctgatgctgacagtctcccattggtctgctgactcagagtgctggtttgcctggatttgcctacaccttgcctctgaaatacttttgcatctgctttgagagaacttttaatccagaatgtagtccaagcactaaaatatcagagagggagctagagaacatgcagtaccagttgtgtgttgtgatggtttctctgactgcttgaaaataaatgtttgtagttgtagcagaattcagtttgagacttgatgtcatacgtgatagcaaggctgtagaaaggtgaccaagaacactcacatctctcttacaataggacatgtctaccccaaagaacttaataattacaaacagcaaaattagcttacgttaattcatagcacatatccatggacattttctcgaaatgcaagtattctattctcctttgggactccatccttgtccttttttgatgtttgattcgtataaaatagtaaaactgagcattcagataattatcccatggttagaaaacttacatcattgaaggtttttaataagaaagtcgattcagcaaactttgaactcttcacctgggacttttcccatgtccctccccatgcctggcagtattaagatggcttccaggctgactcagtgtctctggaattccctccctcttgcattccaacagagcttcctttgctggcatttagtacatggtgccaggcatctgctgatttggcttgtgtttaatctgaattgttgctatttgactgagttttgtatttcatagggactgttaatcataagtcaccagctgagcagcatgtgtggttgttgggacagagagtttaacttattgttactattggaaacataatttttaaaaagttcttcaaaagtgcgtgtcatttggattgttcagaagcaactgttttagaaaagaaaagctctgtctcatccccttgtgttgttctcccttcatgcatttcaacaaataagcaagggctgggtgtggtggctcatgcctgtaatcccagcaccatgggaggccgaggtgggtgaatcacttgaggccaggagttcgagaccagcctggccaacatggtgaaaccccgtctctattgaaaaaaaaaatagccaggcatggtggtatgcgcctataatcccagctactccagaggctgaggcatgggaattgcttgaacctgggaggttgcagtcagccgggatcatgccactgcactctagcctgggtgcagagactagagagagattctgtctcaaaacaaacaagcaaacaaacaagcaagcaaacaaagtgatagacctgcattgtttcttccttggttgaggtccagactatggattcagtgaaggagttgtggccatggcaggcaggggtcactaaataaatgagacagcagagcagactaatggaggaaatagagcttgtccatgtggctctgtttctctcttcctaccctaatctctttatactcattaatcctaatgaaagcaggctggaggagagagctggtggagaggaaaattgtggagagcagaatctctctggacagaatagtaaatacaaaaccaaaatgtgaaatttgttcttgaaagtgacagttgcttgttcatgctctgtgaagtctgagtgtgtgtttgtgctgaggtgtgctatactccccaagagtaaatatgcctagagtcaggggtctcgtttcctgatcaatacaaataatgtatcaatcaccaccatgcttgtggaagtggggagggtgtagagaaatatggacacatgtaacactggtgacggcaaaggtcattttaagagttgatgctgtcagattaattaacctgtcatgtttaggtagctaatagtattttaagggagtttttcaagttgcacataattctcatatttcacaggacacacctttggaacaattacttgattttgtatttatagcagcttctccctgtccgtcccataaaaaaatgccaaaaagactgaccataaattggtcaaaactttattcatgggcgacagtcccattataaaatagaaggcaatatatatgtctcttctttttttctcttctgatgattttgttggtgattcaatctgtaaaccttgatgagttattcgcttagtcatttagcaaacatttaatgagaacctgcagcacaataaacatgaatataaataaatatgtggggaaaataataatgatcaggaattaaagggagctactgttgatgtttcttgactgccttctgtagcccagcattcattttaaaaaatatttttataattaaaaatatacatgtatatcaaagtcaaatcttcttcaaggcttataatataaaacaccaaattctgtcttccacagcccttctcacctctcatcacctagaggaagccacttttaatccttttagctgtttcttctggtatttgcctttagggttacataacatgctattctgctatttattcatttgttgattttaaatatcgcctataaacatcctacaatggaaggcatttgtttagcttccttaaatacctgccctcaccctaacacacacttccacttctgtttcctaagatcatgaacattataatttttatcagatcactgttcagcctatacattgctatgtttatataaatattatgca

SEQ ID NO: 44177 - DNA, 506 bp, Homo sapiens
aatttgtcttctctcatcacttcctcaagccaagatgagaattaagacaatagtctagtgtctctctttccaattaaccaactaagtgttttggatgcaagcccttccaactataggagtgacatttttgtctgttgttcatatttcctaattgtgagagcaaattgtcactgtctattaaagtgaaagcacaataggctataaatacattttaaaagtcactaaatgctctggactttaacacatatttgcttttcaggtattgctcaatcctactcatggcacagaataggaaagtggcacattcaagtaccgacaaatcccccccaccgccccatccaacctcaatcaatgataaagagtagataatctggtcagaatcttctttcaattgccagaaatcaacagtataaccccaactgcatctgtttaatggataaaactgaggcaaaatctccctacctttgctattctaattgttgttaacaattcaatctagcttaatt

SEQ ID NO: 44178 - DNA, 8891 bp, Homo sapiens
ggctggtgataagtactatgatgacttggcttcctccacattaaaaccacctggaattgtggatgaataaatattggctattttaggctttgaaagttaaggattccagagatggaatatgttacgttttgctagggtatttttcagatgtgcagttgtgcaatttagctcagcactttgaacatgtgttaatttgtcatcgatcgaacacctgctatgtgtcaggtctgttataggcattgaaattagaaagccaaagaggaaaactcttcatgcccttggggagctcacagtttaatgggaggtttagagatgaatactgataattttattacaggatttacaagtcgcccgagaggtaagagctggtaacacaggagcccttagcttgagaagaccagcagggaaggtctctggtttaggtagctaaccatacagtaagaattcgccaaataatatgtggagaaaggggaggatattcttggctaagggaggagcactgagagagcttggaacaggtcaagagttgcaaatactgtagtttagttagactgagcaagagaataatatgaaatgaggccaggaaaacaggcagggaccagatcatgataaggagtttgaattttatcctaaggcaatgggcagtcactgaaggattctaatgaaaagtgacatgatctgatgaacagtttagaaaattcattccggcaaccttagggaggataaattggagggcgataatcttggaggcaggacaagatagttaggaggtggtaatagttagaagaagaaacataaaaaggaactaggtaagtttgagttagctcagcaacaatagcacatacatgattgtgtgggtaatgatggagcatgaacaacatgtgcaaggtgcaacaagaacttgcacgaattatgttaatgcactttttaaagagatatatttgtgctaatagacatgttagtcattttcctgcatctcccatgaccccagttgttgctgtagagacttgataatgaattattattgctatttcataaatttccatataaatcactctgccacaaagacacacgcccaagaatgtttattgcagcactgctaacaatagcaaagacatagaatcaacctaaatacccattaatgacagattggataaagaaagtgtggtacatatacaccatggaataccatgcagccataagaaagaacaagatcatgtcttctgtgggaacatggatggagctggaggctgttatcctcagcaaactcatacaggaacagaaaaccaaatactgcatattgttacttataagtgggagctaaatgatgagaacttatgaccataaagaaggaaacaacagacactggaaggtgggaggagggagaggggcagagaaggtaactactgggttcaaagaaaacccaacagttatatctgggttacaactgggttatcggcttaattccttggtgatggaataatctgttcaaaaacccctgtgacatgagtttatctatgtaacaaacctgcacatatacccccgaatcaaaaataaaatttaaaaaactgagtttgggagacaggaactagcaacggtcttcctttactgacttgcctactcctaacctggtttatgaggtagatgggtaaacggagaagagtaaacctcaaatcaatgtgtgctcttccattcagactttatttttaccatctttgcttagaactatgccagccaagtgattaaatgctacaaaaatgtcagtggctacacagacaggtcatgagtcatattgggattaactggatttatccacaatttaaaaaatattgatgtgactctaaaagtattttaggtttggcaggactttgggggattctcttatttattaatttgttgataaggctagtaaaatcagtgatgaaaagcaataagatatcaatgcaaatattgactaaaatatttagatcaccagattccagagtaacaaatatatttctgtataaaaaaatccagtctaggaaaccagtctactatgtcacacaattaataatgaacaaataaacaaaatagtttgagcactttatctgtatcaagccctatgcagtgtgtgtgtgtgtgtatgtgtttgtgtgtgtgtatttgatgcatattttctcatttaagacatttaccttaaggtaagcagcctataaaagttgtgaccatggttcagccaagatgttctgacatcaaacgctaggccctgtcctctaacctgttcattttaccttgcctgctgtttctaataggcacctaattcttttctttcagaccattgactaccaagttgctaggccaggattcaaactcgggtctgcctgcctcctgaacccaagattttgagcatcacattggagtacacaaaaacatgctagaacagtgctactcaaagtagccagtccataacatgtcactaatccccaaggaaatgaaagaacttggtccagagtataaatgaacacattggttgctttaccgggaaatgtatgctatttaaaaaggagtgtcagcttactggtatagttggcttagattctggtcaagcttcttgattatcttgttgcaatgtgttagcaaagggttcacagacaggtggcacaggttcatggacagcatttgactagcaacacaccggatcactgtgtgggtgccaaattcatctgactagactatcccaaggaaactgcaagcaaaatgtttcataagtccatacatgcatcatggctaacaaatgtttcactaaggaataaagacgctttcataggcatatttgaaatttttgaatgagctatataaatcttttagaatttttcatcaaaagttgtgtttcaaagtgaagttaactttctatttagagcactgaagttgataagagttctacaattataccttgattttgatactacacttatagaagttatgatgactacattgttcaacaatttgggcctatgatttatatagttcatgttaaccatttttttacatataaccttggaaagcctgaataaagtgcaccctagaagttctatagaaatatatatatatatatatatatatagcattaaaataatagaaaagaggtggagactcaaatgaacaactacccatttcttcataactaacatctttagtaagattttcataaatttttacaaaactattttgaaaagcatgagttttgcaatgcaatttggaggtcaacaatgtctttatcaatgtgtttttttggtacaatgatatttaccaacagtatatgggggaaattttatttccaacattcttacaggttttattttacttcctttctgtccttttttcttttcctctctctttctttaaaaaaaagtggtctacccaaagcaaagtccagtgcatttataaattctaagaggcaaaaaaaccattattatttaatttaatattcattgtttagctggaagcaatttcaagcccagttgaggtaatagtttttaatacttcacagcacattgagacttacataattttaaaaactgctgcatgctgatgtccactgatgtcttagactataattttataactttgaatgatataaaggtttacagttgctatttttttgcatattgcctatcagaggcttgattaggaatgtgatatgaatctgtctaatggagcaggaactatctgtatggggttaagcttttaacccaaaaatgtttactgagcaccaattatgcacaagtaatttgaagtattggccttgtctctgaaaggtgctaacagataaacaacatcattcttccatttaggccgtaattctgttcagaaattaaagagcaaaggttgtgaatgtcagtttttctttctttcctaaaaatcaataggtaattacactgacccaaaaggcaaaatgaattcactctgtgagtttaccattcataggacaggacttcacatttacatgcccatttaaacatgccctgctacagtcacttctgaacatgtaagaagagcttctttgacattctgaaaaaatattaactctaaaagttagagagtaaacaattttaagtgttcaaatagtaccttcaaaaaatgataaataatttcaatttctctttcaggtaataacattgagatattgaggttcactgggaaaaatatttttgttggcacttggcacttggaatgcttataacatcacatctttagtggtattacttcagctataccctgtctcattgtttatacagatagtgatgcattttggttaagaatcttaataacaataatcctttatatttgtacagtctttttcagttccagggcagtttagatttaccatcatattaaattcttgcaaggactctgtgagatgactgtaagattattattctcattgtgccgttgggaaaactgaagctcacagagtccaaaggctatgaagcatggactggaagctgcctgtctgggttcaaattctggctccatagcttgccaaatatgtataatttggagcaagttacttaacttcttttgtatcagtgtcctcatcagaaaatgagggtaataacagcacctaccttactggattgttatgacagcttaggttaatgtatgttaaatacttaacagcagtacctggcatatggtaaatgctacatgcatttcagaaattgagcccagatttctgactgcatgtctagtgttcctttcattacaatagtgtttcaattatgtcttgttacaccacttcatgtggtggttgacagggtactgaactagaggcaaaagtactactacagaagcatattctgatgttgtagcttctacattttcctgaattaaaaacaattaggtagtaataatgttcatgtaaactatttagtaatccttcatgtgtaccaggctgggtatcaagcaaataacgcatcttttacatgtattattctattcaatcctcacagcagacctgttcatctccacttgcaaacaaggaactggagtcaccaagaggttaagttgtgcagcgagtcagagcatagtgataggcatcaaaagggagtttcacgtctgacttaatattggtatctgtggaatgaaacaggaatgtgcttaatcatatcaagcgatctgatactcaaacctttgtcttcaccaggggtcactgtcctggcagttacagcatattgcaaaactgaaatcaaagctaaaggccttagaaatttttaatctaagcaagagctgattgtgttttagtggtggatatccagtatagtttccaacaattgcaaattgaaagtaaagggaaagtaagctaacagactccttaaagtatccacagtcttggataaagcttttttcttccaaatctgcaattattcttttaaggattcaatttaatttattatttaaattatttttaacatatattattttaaaactaaattacatacaaattttcttttccctaatctaaagttaaaataaatcactttgtaataataactgtgtagaattatatgaaaacatcatgtctgtattttcagtgccttaagacacttggaatctttggagaatctcacgttctaattttattggattagatatgcatggcttggtggcctcagaggacaagacttaggagtagccccaaaacatagtcatcagaaaaaagaaagaaagtggggattattcttttaagcaatttaacccaaaatccaggttccatgttgttccggcttcagagtgaaatttttgttctcatctaattttaaagttatacaacaacaggaatgctgttaagaaaactctgagcatgaaccaaacccgagtgacaatacagaaccctgtttttatagatgtttgcccctaaaataataaagtataaaatataaactgacaaaatggaatgcccagtcaaataatatgatgtgactttgcatacattttatatctccttacatgtccaaaggagacatattttgtcaacatacaaattctgagtggcctaggaggcaagcctattcacagtaatcctcctgggaaaataagaaaggaagagtaagtactaactttagtattaattagtttttgtgacaccatggaacttccaacttacaggctggtagggatagggcactctgtctctatagcattgcaaaaactgcttttccttccatttctgcttcagatcacatgttctggctcagcaggggctaacgagatggagggagcagaatctctgtctctccctctcagatattctgataaagccctactcctgtcagttggagatcaggtgtggagtttctgttgggtaataatttccaattttagttatctagagtttaatagctattgttttaagttattgttttaaagaaataaaaatcactggtatattttaaagcatcttaattagtagccatgtattattttcaatagctgataaacaattaggctttaaacattaaacatcaaatcattaagaaattcagttgaagtaatcagaactaatattgatgaagaggagtatgactgactaggagggcattcatttttcccccaaaatcacactgggtaaatatggtaacagatgaataaggccacacacaaacatcaacttagtcactgtataagcatgccatttaaagtgatttttaagctgaccatcacctaatttgggtaactacatttctaggttctacctggactcctctgatgtgtgtgccaagacagacaacactttcataagcacattatagactcaaacaaacagaagtgacaaaatgtgcagaaggacattgtaaattattctacaggggacagcttcatgtctagataattgttttcctccttcttagtatttgttgctaatcatgagaataattgtccaattcacctactgtgtcttctcacaattactattcaatgcatttttcagatattttaagacgttctcaaaactgtggagcaaatcatacaaatggggtaatacacatgaaaacaggtacttcccttgccccgctcatacatttgatctcttctttcctggctgcttgcagattgagttcacagaaacatatggggataaaggaagaaggctgatttttaaagaagcagattagaacccttcccacgcttggatgtcatcctcctcaaagtagattaatgttctctactccatttctgttttcttctctctggttttactgtatttttttttcttttattgcattggcaaaatctgcaaaattaaaaacttgtcctttaagggtaaacatacacagagagtctttttcatctgcttaagttctaagtcagcagaatttaatttccctgagcaaaatagttccctgactgtgtcttgttaattactaaagtgttccttccctaaatttgttttcattcttgtatctcctttgagtttctctcaggaagaagtacccaatcaatctcagggtcagtggctgggggtgccatggccttgcacctaatgctgtttccatatctattgaaccctcgttttgacaggacgttggctaccgagttctccttttgcatctctttcctctcttctcctgggtccacatcctccaatcacaatgacccccatcagtttcaaaggttccatgatcctttgcctttctgacattatgatttcctctgttaagtaatttttttcttttgtagcattttttacaatttgaaattgtgtatttactttgtgattatttgcttaatgttcatttccctcaccagactaagctccatgaggtgggggcttgatctatatcatacatgtttgtaataccatgctttgcatagccaggcacagaataggctctcagtatcctgggaatgaatacaagcatgtccagaattctttaccaatcataacaaagtgccagtgtcacacaatttgcatttacataaaacaatcagatcgttttcagcttctatcggttatatttcagaatgggagtctctgattacatttcaggagattttcctaggtttatcggtgagctctgccaaaattgtctcaaaaactacgtttgtaatttataattctcatgggaagcacacagacaaggaaaagagcctgaaatagagaatatagttagtttatgttgaatctatgcattctatttcagaaagtaatgttttccctgccttagaatctgaaggttcattcatttatccaataaataattattgagtgacttttatatgcccaacattgcccaaggccctgaagattaggcagtgaaccaggcatggccaaaagtcttctattgcacaactaactacaaatcattccccaagctaccctctccaccctcacccaccagcacagacaatcagtccatttatctcatcgttcactctggatctttcaatgaagtggaagagaagaaagactgcttatgaagaaagtaaagaattttgaattttttgagatatatggaatatagaaaaatatagatttcaccagcaattggggttggaaataataggctagtagatttaaaaaaaaaaatccttaaatattaaaatgacaacaaacatatcctggaacagtggttcttaactgggggttactgtttgggatatatcataatcacccggactgttctcttccccctgccccaaatgcagccccatttggtcacatacagactccacttcagagtgtattgccctacacaatgatgtattttgggtgataagttctgcacttattaaacaaatgatcagaacttctattctccactattatgctgagaataaatcatgaagctgttgattcttaatcacatatctactttgctttatcactttttgcaattctagattgtgtg

SEQ ID NO: 44179 - DNA, 2840 bp, Homo sapiens
acttaattttttcttatttaaaaaaattaaaaggaaacattttatgggctcctaaatgcatcatggtactaggccttccatccccgcctaatgggtaacttggccccatcactttcacaccagacttgtgttgtaattatttatgcatgtgctatctccccttctaggaaaagagctttaggttagaagcctgaaaactctttatagcaactatctgaaataagtttattgaatgatatacaaccttccagggtctttagagaaagaacactcaggaatttacttagttctgcatttactgaggcagggtggctaccactctttggtatgactaattatgattcctacttttttccagtgagaaagctacattattattgttagatttaaatgttcctatttttaatgaagtactaagggaacaagttagaaacaaactagtaatcaagaaccctggagacttgtttccattttcaaagtttcctttgttgattaatactttgtttttagaaaagggtgtatgtgtgtgcatgtgtcccatatatgaacaaaaagtgacctgaaaaaaaattgggaaaatgaggcttttctttacttcaatctggtacattagattaactaacttaatgtgtatgaagtcactttttatacattttatacactttttacacatttaggttgccacctaaaatgtatacacccatgcccataattgattgtaagcctacggcactgggcatattagtgaaatgcagagaaaatttttcagtttttaagccatcacactgctctgtccctaaaatcttgagtgagttgaaaataaaaactacaaaagtttatgccattagcaatgttcttgacctacataggttttgatgcaagccattttgcagatgaggttgctctctctttaactgatttcatggtcaaggttggaaccagcataaatcaccttataagaacaggcacatatcttgttcacttctaagatatatgtttcctgccatggcaagtgtctggcagaaggcacttaactccgaaagcattgttacagggatcagcaaatacaattccctcagtacacagcatctccagaaagttcccagaattctgaaacaagtgatttttatggccatgccaaataaagtttattcaagaaaatgctcccctatttgtaacattctcaagagtatttacagcaaatgtttggagaggtagtgctgtggggagtagtcaggtgatctggaatgccatttgttagtgagagctgctgaacacatggtagtcatttcatttctcctcaatgggggcaccaaaggctggctccatagaagtacagaggtctttcatcattatgctctactaagatctcactcaatgctgccacaaatttaacaatattttttaaaaacttcttcatggagccaattataattttctcacaggtatatataatattcatgaaagcatctttagaaactgttatttttattgctctgtaacaattaagctaaataaaaaccatatccttaccatgcacaggtagctccaagacctggctccaggctaccactcccacagatggctgcctggacataaagcccatccactccaagatagggagccagcactgctactggttgtcttcccaaaacaccagtgattactggcagggtactttcatttgagaataaaaacaaaaccaagtaaaacaaaaatcacacacacaaacactgacttcctaatgtggtacttttcattcagagagggaaaataaacataaaataaaatgaaatcataagcttcagagagtaggatcatttgcttgcaaatcattcagatgcagtagcagctagtttgcccagagtttagattaaaagtgtcaggttccttcagggggattttcccaagcgcggatgaaaatcacactcggatgcagtcattcctttggaatgtagcaaatttagatgacccaggtagctgtggaggctgctttccaagggcatttccagctctctttccttctctctgagagcaagagtgatgaagtgcattcttgcctactcatctgccctgtgatctatggatccacaatgaagtacaagtcgagcatgaatcagcaaaatgctctattgaaaaagaaactgacctaatgatgctacggtatgaagtatgaagaagtaggaaggtatgaacaacaagaaaatccccagtgcacccagcctggctcacactcttgctgggagactcgcccaatgttggatttcaagtaggttcaaggtaggtttgccagataaaacacagaatgcccagttacatttgaatttcagtaaacaactgataataatcagtggactgttaagacatctacctttctgatattctctcttctctgaagcctccctggatccttgaggtaccaaaagcattaataataaaagcaacaaccaatattaaagagcttccattttcaagagcacttttcacattcattagccagctctttagtttgtctttacgacattcctgaaggttgatattattatgggcaattgactgataaaactagaggctcatctgaaattaaggcatttattcattcaagtaaatgttacagttagatttaaagctctggtatcaacttaactgcctcccaaaagcactttgtgcctttatttttaaaataaagcttatgaaattctcccagatacctcgtttatctaccttgctttcacctaaatttcgggcttccagaaaatggagattgattattgtttatttttactaacctcaccatgccctgatgttcaataaaatgtcttttgatttaggccgggcgc

SEQ ID NO: 44180 - DNA, 16720 bp, Homo sapiens
cttcacctctcagcaaggacagagggctttctgtatcctggggtttcttgccttggtgtaccaaaagagtcaaatcacacatgggcttggagaaagagtgcaagggttgagtggaagtagctctcagcagatgggggagccagaagggagatggagtaggaaggtggtcatcccctggagtcgggccattcagtggccctcctctgaccacccggccaaactcctcatcgttctgcggatggatggcctgcaagcctctgctggtgcctgttgatgtgatcttccgggtgcgttcctctcaatatccagctgcttgtgtcttcttccgcccgtgtgtttctctccacatccaggtgcttgtgtgtgtaccctctagggtctcggggtttttataggcacaggataggggtgtggtgggctagggtggtcttgagaaatgtgacatttgggcaggaaaacagaaatgtctgtcctctcctcagtccgtgggcacaggcctagatatggagccctagccaaaagagtcaaatcacacatgggccagggacctgcctttctctatccagtacttccgtgccccaagcccgatttagtacctgacctttaactccacttaaaccaataatgcttaaaaatggcagaaggtagctttggatgaagcccacactttccctaaaatcacccaaagtacactttctggaattaaaatcagcgtttgtaaacaacttggaaatagacaggccccctgaaagtttcacctgactctgcactaggctcacattcaaacgtctgaggcaccagctgagtgaatcaggcaagcaaggtccatggagagggctgtctcttctctgggggcaggcacttctcagctccagctgattgttgatatgtagaaatgtctgatcatattgtctgatcatgaagttttgcaaaggaagtcagaagttttaattttcatctgaatgctcccaatgactaactgatgacaattgctggaaaatattttaaaacccactctaaaactcgctgtacttcaagcagatgtctattctctggcaatatacaatctcagctctaaaggtttgccttattctctacatggattccatctttgcctttcatttctactcatgtcatgttctcaaaagaatattactggaataaaattacatgcttgtatcagaaaattgtattgacattcatctacaaacacaaattcccaggaaaacagattgcaaatgaggttttgtggttttggttttttttttttttgagattgacttttatgctcagaagtggatttggttttaaaaatctgacattcagtatacttaaacatctagttcttctttgcatttttaagtttaattttaaaaatttacattctgtttttatatctcaacaaaagactttaagaggactgtattataggatcccagttaaaacttaataactttccctttactattttatattgcatttataatatacttgacttcctttttaaatactgttttgcaattgtctgctataacaagtattcttaagtatataaacattcttataaattgagtaaattaagcttaaaagatgataaatttatcatatattataataccaaatttaaatgtcacaagccttcagcttaaatttctaaggcaatatcagttacttaaatttcagtttttaattgggattataatactaatacattactatatgtgaagtattaacacacagtttcaatgttagggttaaatatagagattctttctgtaacaacaattatcaattcaatcattcagattatcttaaatacttaactaagtcttcttaagatgaaatggtacttcgctaaagaagctattatgctatctaaattaaactttttgtttgtaacctaggctggctgagattttatatacacaaccacagctgtagaccgggatatttactgcagtgccgtctgagatgttaaaagaatataccaagccctattaattattcagaatataggagtgatgtccttcttctcagagcacatatagttcacatccccaggcttaaattattattattgctatgttggagctggttttaaaagtttcgtgaggagtgattgttaaaatttcaggaattgtgcaagccagttgttaacacaaccattatgtaattatagaaacttacaattaaataaattatgttaaaaacaaaggcaataaatactctaaactcatcactaattgtttccttacattttattattatctatttcttgaggttatttatgtctgttacatccatatgctggaaatactttataatgatgtactgctgtgcatctctttccaactccacattcagcgacatcactctggtagtgagaagtccatcatggtaaaagaaattataccacagaaattggcaaatgaaacaaatcaaggttctggccacctctgaaaaagctgactgctaaacatttattagtatatcagtagttatgttattatctaattctttgtctgcactcccctccagaataccctatcacgtttggattttgcatttctttatctcttgaaatatttaaagatcttctatgtagctccaaagttcttcaaaattcatatagttctgtacttatcatattttttctatttagtaggatcacataaatcacataataaatttatgtctcattgaaactcttttgacatgtctatatgatcataagtttaaaggtcatcctgctgccactgatttcaaaggggtataaaagaaagacaattttagttatttcactgaggcctgttgcttatttattgtctgtttgtttatagaaacagggtcttgccctatcgctcaggttgtagtgcagtggtgtgatcatggctcactgcagccttaacctcctgagcacaaacaatcctcccacctcagactctcaagtagctgggactataggcatggaccaccatgtccagctaattcttaaattttatgtagagatgggatctcactgtgttgcccaagctggtcttgaactcctggtctcaagtgatcctcctgcctcccaaagtgctgagattacaagcatgagccaccgcccctggcctaggtctgttgtctgatttcttacagtactaatttttttataggcttggaacagagaatgtgttccaacttgcatggctgggctaaaatatctaatcatttagtatttcatagcagagatagatcaggagtttgttaatttaactcaacttagaagtgaagtttttgtactgcaatcattaaaatcaattttgttttacatataaacatattatcaggctaatcctagagcaaaatctatttattctattcagttgaattccagacattgatgaaccatgatattattttctaacactgcatatggaaatttaccgttttaatttgagttcactaatataattaaattgtggcaattcaaacaaagagatgccttccattagtaaagttaataagacataacgaagggctagaacaaagcatgaatctaaacatatagaccagagtctctcccaagtcaggaaaaacaaagtggaatctacaggtttctttttatacaacagtttgttacaaggtttagaaatatactgattctctcatgcattgaatagccataaaataccaacactggtttttctgtgtaccttatggagatgcagctatgcatttttagtcacacctattttcagtagattaaaatctctacaaggcaaaaatggtctgaagatgttacgaatcacagaggcctaaagcaggaatgactccattcttcatgcccacccacgcaattttgttccttctccaaccttctactgcctatcatcttgctgcctagctaactatagctcttagcaattatgtcactttggtatttaagagaaggagaaggtagaaatggtagaaaattcgtggaagagaaaaactaagaaagaaaggtaggcagttaatatgctggttaaggctcagattcattctctgcccttcttctgctttattttgcaatattacaatgaccctaacaactgtatttccaaggctatttttttcgactgcctttcagctcatttggtcaatgggagattggaggccaagaggaagaaagaattcaaaatattttgtcccccttttttctcacccaaaaaggcacaggggtcatctcaagcagtgatgacatttgtcccatgatctcaaaatcctggtaagcagtgaccatcatgattctagtttctgccagaagactcagttctgggctctggtaacatgacgttttctctgggtctctctagccattgggagagtagtgccttcctgctgcagtgaatctctgggttgcctcaccaccgagttcttccatcatctgtataaccaacaatctccattagattccttctctctgaaagtcccaaaatgatcccaactggatcacgacttacacagaactgaagactcgatcacaacttacacagaactgaaagtgggagaaacaagaatgagacagtttttttttttctagataattacggtccctgccattacagatgtggaaagaggcagaaaaaaaaacagaacaagaacaggaagaaatacttattgagtacctttgttgtgcaagtgttttattatcgttttatcttcacagatgagaaaacagaagcttagagagattaggtatttactaatgatcgcattattaacatgtggttgcacagaaatttggactcaagatttgactccaaagcttttccactggagtatgatttccctagctgacatgagattacattcagaaatagttcttgaaggcttgatgggactaagagataaaagtcgtaaatgttaaataacctaagatcaagttcactgtcatggccacaccaagtttagttgagggtatctgttattttattttttaagaaacagggtctccctctgtcacccagactagagtgcagtggcatggtcatagcttattgcaacctcaaacatctgggctcaagcgacactcctgcctcagcctcccccatagccgagacatgcaacaaaactattaaatctttagaatttgtgagggctaatggagaaacgttcctggggatcaaaggtgttcattaaagaaatctattattttacagttgttttttgtggaattcagggtacccttatttggaagggtaatttatttgggaattttttattctccttctcccatggcaaagatttatcaacactgttatgttttatggagatgtcctctgtactcctcccccagaaatgcagttgggtagaaggggtgacagaaatccatccttatgtgttctcatccactcccatgatgttttccaaaacttagttacttccaaatgttgctttctcttgagatgtagacctgcatatccactgtttactggacctatgtgggcatcctcatacaaatctgattagatatgtctaaaactcactatatttttccatcaagctcttccttccatattcctaatttactatagttaatggcccaagaatgcaacccgtcccccactgactgcctcagccaatccttctgcacctcatctactttcttaggcaccacattcaaccgggctctagatcctgttaaaatcaactttctaagttcctccaaaatcaatcttcatttactcattcgatagttgactgtccagtaccagatctggtgctcagtactgggaacgttgaaatgaatcaggagggccaaatgaggtactgcctagctcttcttttgctccttttcattgtctcaggtcccttctcacctgagtcacagcattaatttctttactgtttgggccgtttccatcttgttccccaccccgtctcctcttctcccagaataaattttaggaatctgaagtactatgtcactttcctccttgaaatttctcagtagtttggcatagccttcaaaatgcagcctaaaagccatgggttgcaccattcatgtcttccagccttttcctataatacttcagattgcacacccacttctgtgaactctttcatcccccgggcttctatacgtgctattcccactgcttataacactcttccctatcgcatatttctatttaacccccactcatctttcaaacacagtaaaaacaaatttcttttctggaatctattcactgagcccagcccatgcctggggcttcttcctcatgattcctgctgagttcccacaacacccagtacatacctttatcgtaaaatcacaccacttgtcacactaataggtaaatgcactgtctcctccactccattgtgacttccttgagggcaggggggcctcgggttcactctgtgtctccaatgccaggccctggatgtggcacacagcagatgctgagtacatataagaatgggtaagtgtgtattttgaaatcatgaggtagtatacaatcttccactgtgaaactcaaaaggaaggaacattttctgtttggaaactattgtttcttctctgcttataaaaatacaactgaatttgtatacatggccagagaactccagccagcaggagttaatctaggagttgtgaaatactcataacatattccctggatttggcttttattaatacaatataccaagtggagttttaacaattttagaaaaatgtaaaagtgcaactagcatctctatactatgctgtacaggaccacaatgtaaacacagccttaacaaaccaaagcacttcttttcataggacagtattttccttatagtgggattacaattgaacaaaaaatatttacatcttatgcagatgcctgtaagttcagagtaacaggatgagcagctttcctttactacacctgtcaaagagtagatcccactgaaaaagaaaacctcaaatttacctcttaatttaatagattaaaagatggaccccaaaccacaacttggttcccataccactcctcaactaccatgcaccagaaggaaaataaaatgacttattcacaaagtatttctcactactggaattatgtgctagtactgccagtggcactggaagtgtttaggcaggtttatgctgagtaatatgtttaggtggtgcatgtattctaattcagagttttgcccatattaagataaacttcctgtacctattgacactgaataacagagatctatttaatctggcttcacctccaagctaaacaagttttgaagaaatactacagagagaaattgggtttggattttgtaggaggcttatattttggttgtaagaagaatggtgttcttaagctagatctactctgaaagtttatgattgtacttcaggtattagacttcctagaaactgtagttagaaaaaattaaagatctaactctctagtatgcttctatactcagtggcttcttggcactgcttggcacgatcttatcaaaaaatgtaacgatgtggtgaagagttctactaaagacaggagaccattatttctgcgttttcatactctttattgccaacggtttaaaatggtcaacataaaaaaaaagacattttgataataaatactgctctttgggctgtaataaataaaaagtttattaacaaggaatgcacttttccagccacaagtatcttcaaaaattaatgaaaaaaaattatatatggccatagttcacagttacgcagccaaaagctgctccaattacagcctttaaacaacatgggagcttcctcccttctccctccccttcaggaagtatattcacagttccaaagtcctctggctgaaatgctctcaacagagagaatttaagaatcaatgcacctttctgcaaaattgtctgaaaaaccttttaaaacaggtatctcaaggaaaactgcattctggttcactcttggattgtccaaagtcaagaactgtatgccttagcctgttctggttccaaccagtccagcaggccacaggggaattgttttcgtaccaccacatgtccatcttcttcaacatactctagatcattcttttggcttccctgtagatctcacagtggaaaagaggagtcccatagggtccattcgaaaagtctttcagttacatctttgtaagagcatgttcagggcatattccattcgattttttaattctgatgaacagccagacatcagcagagttgtcagcctgaaagttgtagatatcctatcctcattgatgtaggtgagaaggtattcttcattttggctacagatgatgatttttgtatgatcatggtagaaattcaccttaaaaaataaacatagacattagatctctcaaaatattcgagaattagaaaagttcagtcaatcactaaactgtctaggtacaaatctttctgtttaggacctaaacgtgcactttcctgaagagttcatttacctgaaaggtgccatcattaaagagcatcattagggccttatcagattttagccactgaaggaggtagagccgaggtcttcgaatatcagtaacactaggcagatctccaccctggaagagattaggagagtgagttagtgcctacaaagattttgtagcatgcactctattattattctaagaaaatcctctcaaacttaagcaagcatcagaatggctttggaaatccctgcctccacctcccggagattctgattcagtacaccaacggtaggtcaggagaatctgtttctaacaagcttcaaagtgatgcagacactactgctttgtggcctacacttcaaatgtcaccactctaaagccacagtacttacatccatgaggttctcctccatgtaatgagaaaagtatttcagcaccgtcacttgactaataaattgctcaggagcatctgttgctgggaaaactgagcattggccaagctctgcgtaatagtgaactgttctataaaaacaggaacgaaagggagagaagaggaaaaaaaaatagaagcagttaatcattgtttttagatttctttagtgcaagactagagaactgacaggatttcattaattgatacacttactttttgtctggaaggaggctcatgtgagcaccattgttgaaaaggacaccgacggtgtggtctgagagctggtacccaaagccatatttgttagagtaatcaacccatttggtgacccactgaaatgatgtgctcagctgctctttgggaatgcaatcagcttccggcatgttttccagacatccccgaagaacccttgccactgtgtctgcaacacttcccatggtactgtcttcaaggcctgaaaagtcagacagaaatgtttcaagttatacaatattttagcaataaaacctcaggctttggtagatgctaagtttcactccattaattcgaaagacatagaactcaagattattttccaattcctgtaatcttactacttctatgttaaattaagctacaaagtaaattgacttaaattattatgtatttagcactggcatttcgagtttcattatttaaaatacgattgacaaccacttacattcactgctgctgctacagctgccaagagtccctctgactatcatccgaatagcatccccaatctgctgcttgttttctactgcgggtgttccagacctggcaactgtggtggtaggtggctggagctccttagaagagagaagatttatgcaatgagtcaagcatctaaattcatttaagggtgagaattccagattaagatgagagtgaggcaattgctgggaaagctcatcaaaaagcaatggacacaagccagataaaagataacgcagtaaactcacttgcatgcactgtaaaactaaaagacttccttttagttttaacttccctttcaaagggtttgaagaaaaactttaagtaaatatgacatatttgaaccatgataatcatagtccaagtgctaattaataaagagtggaaataacgtaaagcgtgagtatctactttactctttcccaacacacctcatctgtcctgtgtttgctgggttgctgagttattgaagtctttttcaaatcatgcctaagcttgtagatgtcttcatcttctttagacactctatctgtatatcaagaaacagaattacaaacattagtctatcttaacaaggtaggaacagggttagtcatattttctccttcttgcattattgaccaacttatgagcatcctgggcaaaaatagcattttacctttgcctttagctgcagctacccccaaaagccctctttagtgtttgcaaaataaaaagctatcaatcacaattcaaggtatggatttattatgctataaatatcaacatttaagaatacgcaaatatggccaagttatgctaatataaaattctcttttaactaatttaccaaatttaaatataatattgggtacgaaaaaggaaaagaagtcttgttaacttactatgtgtgtcaatatatcttgctttgtcttttttgccaccaaaaagagcagcagctgctttcttaaagaaattcttagctgggcttgataagtggaaatctggaactgtatgacaacagctagaagacagtctgtccggagtgaagccctgtggaatattagaaaaagccttcagtaacctgtcaggtaactgggatcaataccaggtaattaaaaaaaaaagatagtgcaccaacctgcaaaaaaaagtcatgtcgaatgatgtcatccaaactgggacgatcctctgggtttttggacaacatactagcaattaagtgcttggcaggagccagcaatgaggacggcattgtataccttgcttcccttatgcacctataagtttctttgagatttgtagtttcaaatgggggcctccctagtaacattgtatacctgtgtgcaaagaaacacatctttagcaatggtcataaagcaactcttttcaagtgttaaaatctaaatccgaatttgctttttaattattctgctgcatttacttacattacacagcccagggcccaaatgtctgattcacagccatgtccttgtttgttgaggacttcaggagagagataatttggggtaccacatatcgttctggaaagacaaaatattgagatcgtgttaggaactattccactacttaaacttggttctcttgacatgacttgatgggagacaaaatcttaaacaaaatcttaaaatctatactgaatttctatttggaaacatttgacttttggcatctgaaaattcaattgagatctgaccaaatgagttttggtaatttttaaaaatgcacacacgttgttttagcccacatgcaaagtgttgttaaccaactaaagccagggacgtcgtggcattttatacattttaagccaagaaaagacttcattgactgctttcataatcaatttagaggcacagggtgctctgtctagtccatagtgggcatttaataagtatttctttaaattaacattgctatgatttatagattttattaccggacctctgaaacattaaatgcaaaataatgaaggcatatttggtctccacaaaagtctactaggatgcatctttctgactcttacctccttctgtgttccaagggttctagcctggctgccagaccgaagtccccaacttttagttccatggcttcattaataaaaaagttccctagacgataaacaaaacaaaatgtgaatccctttgaaaatgcgttctaaccaagtacacacacatccactttggagccaggcagccaattgttatatgaaagtcgcccattcaaaagcaagattgcagacacgagatcccaattaagaacattaatatgtaaaaaaaaacagagagagaaaaaagaactctaacacaaaactcagcttttggcgtcaatgacttacctagtttgagatctctgtgcaagatttcttgttcatgaaggtatttcagtccagacacaatctgcctgaggtagtatcgaacttctggctctgtcaacacctttcttgctttcaaaatatgagccattgactaagaagaggagaaggaaaaaagagaatctgtcaaaacagttatcaaaatcactggtttccctttgcaggatgagcaatgaaagttaactttgcagtgtaagtgctgccacagctaaaatcccagataaaatactctttgaataccatgttaattcggggtaagcaaatgttctcaaataggagttgacacttacccttctactgcagtattccaagagaatgtaaatgttttctttgtcctcgaagtagtggtaaaactgcactacatgcttatgatgaagaattctgtgaagctctatttctttgtcaatctaaatgaaaaagcaaggtaaggcttattagcttccagtcacctcggaaaagccagtgattacacatgcagaagacattttcctaacagggaagggccatccttgcacacaaagaaaatactttactcaagagtcatacgcaccttttccctttgatgaggtttagctactctgctgtgaggaataatttttgcggcgtagactttgttatttgtcaaatctgtcatctcgtaacattttgcaaagccaccctgaaaggaaacaaagccgagacggaattgaggatggcacaaaaatggacggcagatattttaaataaataaataaatgggaagaaagaaaagcaaaaaaaaaaaaattgaggaatggaggagggtggacagagggaggcattcgacttcgttaaagctccctcatgaagagaaatgcattgctggaaacagcaagttcaaacagtttctcttcttcttttataaaggggagctttatggagggagttggaacggggagacatgaaaaataatctctgatgagacttgtcaggaaaattccctgggagcagatagagggagagaggtctgatgtagaaagccctcgcttccagactcaagatgcatttctctgggctgcgggagacacacagttctgaggctaagaatgcaaagccgatccccagcgctgccggcgcacaaaagccagagggcaggtgaggagcccacctcgcgctgggatcggacccccgaaaaacccggaagcggcgggcgagggaccccgcgggcttgcccggcttggggtcgcccggacagacctcccgcccgcccggcagcccggcgccctccgcttgtcacctttcccagcactttgccccggcagtagcgcttcccagtcgtggggtcgacgataatccgcgagatctccggccccgagtgcgaatggtggtgatggtggtgaggggccgccgggggcacttgcgcctgggactgaggtggctgcgattcctcggggggctgcggcggccgcttcttcttcgagtccgctccgcaacccttgcccagcgcctgctcgcacattttggtgctggcggctggctggtaggtgatagtccgcaaaagctccatggtcgccttgccgccccgcactgcccgctgccaccccctaggcgcggtcacacgtccgagccggccgtggtcctcgcacccttgcctctggtgccgactagcacccaacaccccggtccacttgtgcgagtgagagcgctcggcgaagtcttatatacggggaggcgggaagggggcggagactcgatacgcgacatcacgtcacggcctatgccccgccccacggccggccgagcgcgcgtggccgggaagcaagtcttgtcccgccacccgggtctcgcttcccagcggagccgcgcgcctcaaacgccggccgccgagatctcttgcggccgcgggaaggccttcagagccgtccgtgggccccgctgtcccgttcttcgaaggctccgagcctcagcgtacaaaacagaatcgcgagggccgacgcctggcctcacccccgccccagccgcctggtggcagggcagtgccgtgacccgagcgagtcgggcgcgggtgtagacgcagtccctcccccgcacagcccttcccggccgcccggggcctcctgtgtcaaggtatcagggtgcccggagcccgccgcacgggcaggcgaggcctcctccggccgtatgacagggctcgtctgcagctgccccgcagtgcctgcccgcgctgtgacgagctcgctggtgtctagctggggcagtgccgagaggccgtgggggtgaaaggccgggattcgtggagccgggcattcgagcccatcgcgctagggcagacacgggcccgcagccgggatcccgggccgatcggccaaccgtgccaggatcccactcgaggcccgtctggcccccgcccatgcccctagagcgagcctctgtctgaggtcggcccctgaaccttgcagagcgaggtcggcgtcctggcaaggcgtcctccgcccgtagcccgaagattggaaagcaagggcgccatcttgtggaatgttccggaatgccgttaggtgtcgaagtgggcagcggttgacaaccgtgggcctttgacagttactagtactaaacatcgatgccgattgtgagtttccaatcagagtcatctatgacttcttccgaatgcatctgttgagatggctcatgagctgccctggttcctggagagtcaatctgagactttctggggtagggagattggtaggatgaagagaggagcgtaggccagtgagtgcaaacacagcttagtttcccatttccagattttgctgtgcagtttgactaatctaggaacacgtttttttgtttgtttttcttgttctaattacgatagagtaacatttattgaggactgtgcagtatttttaaatgccttatttcatcctacaacaattctgagagaaatattgtaaggaaggaaaaataattttccacctttcaaagttttggcctgggtcgctgtaaccagacagattaacaagaaaacaaagaagcttattaacatatacgtctcatatatacatgggagataaccaggaaaattagagatggtttaaaatcgggcttaaatactatctttagctaaaccaaaagaaaagagtggggcaggcaagttaaggaatcatgaccaggaaatgtacggtaaacaggagtggggtttcttatttcttcattgataagtttttcatgatttagagtcattcttcctggtacagaggagacacttttacaaatggagttttgtggggtttttttgttttttgtttttgttgtttttttttttagtgaatgtacgtttcccttacgaaagggtaatatgccatttttagagcatttcctgggtctgctggttctcaaaataattatcttaaaataatctttatcccagggccatatttggggtggcatattctcatctcctacattattattcccattttatagatgaggcttggagaacttaggtaattattgtatatttttactagatcatcgaggttaggttaattagcagcacacttgaatctttttacctatgttaacaggatatggtaaatagttttttgaagctaaattccagagaaatttagaataccagattattgaatccctggaaggtacatacaaaaagttgctgcagtccactgtcaaatttaggtatgtgtggtatcaacattaatcgaacatttacaaaaatactgtgtctcaaatacttccagcataatgtggaaaagaggcttattgccattagagaggagaaagggaaaggctttgccattagcgaggagaaagggaaagtctttgctgtcacttccgtttttgattctttaaagagtgcagggcaagtccaggcatgtttctcataagtgacaatagactttaaccccaagattgtcagggatggaataaggggtggggcttaggggtggaaattcagaattacgtaattatcctctttattcataagcccaggggtgacctttgcttcccagatttgtgcaaacctactctctaagatgtagaaggcttgcaggtttagaaaatattactagaatttatcaaagctagtttacacaccatgtctttatggttgataataaactgtatatgtatacatatgtgtgtatgtgtatgtgtattcatttgtggcctaagataaaaaactgaagaatagattgtcatgatttttttttaaatgtcaatttcttctttgattagcatacactatggtatgtatctttaccaaatggacttcagtatttgataaactgttgaacattccatgtgaaattcaggtctgtctgccacaacatggaggcatttaataaaatattaacgctgtgtaaatcttatgttgtcttctttccgactgagaacatgatttttttggggttgtggtgccatcatgtggacagaaccaaaattgtagtctatagaacaaaaaaggaaataaatgcgctttctattaagtagactaattactaaatatcatggagtcaatttggtaaccagtaggaaggaaaaaatggatccatgcttcatatctggcttattttcaagcaaatgaaagtttgaaatacgtgaaattttaagacaatatgaaagaattctttcatagcctgaatgtggtagaactttcaactatttacaaaatctagaatccctaaaaaaaaaaaaaaagcaagattcattaatgtaactatatagaaacaaaaccctttcattgat

SEQ ID NO: 44181 - DNA, 867 bp, Homo sapiens
aaggataagtggcattgtttcgaaagctttctacctccccagtacatataccttttgccatctctttaattagagcacacttggagcccaaaatagaatctcctggtaatgtaaatgtgcttgaaaatggttaaaagggtaaattttatgttatatatattttaccacaataaataaataattttaaaaatcaccattaaaacaaataaaacttaaataccccaggtttacctccagatgatattgtttaattgcccctgcctggaaggcataggtatttattaaacattctacagatgactcagatgtccccagggttactaacctctgacccagctgactcctgtctctgttagccacttcctcttgcaagttctcctgcacattgacatcctgttaaagtcccaaaaacttttatcacatcactctcctgttcagttccttcacttgctccccatgactggaccattgtcaactgtttaagcagtaacttctataagtgaggaaggcatcattgagtataatagacagcatttaatattaattttaatactagggaaatattttgaatcttaaaaactgacacatagcaaaatatatataagcctagatttccagggtcagagccaggtccatagtttgtaaactatgtggctacccaagtgggatgaaaaacttctcacttggtggttcatgtctagaaaactgaaattccaaaatcaaggcttcatttcgttgggttaaagaagcaaagaacattaaaatgcaaatgtccctaagggggaagtctgacatgggattgcctttcctttctagctggactattaactgaagggaagatctatctgatggggaattggtagagag

SEQ ID NO: 44182 - DNA, 766 bp, Homo sapiens
actttccttatgtgtgtaccgttaatcgtctttctcccctacgtttggtgaatgagattgtaaaactgccccactctgcctaaggaaacgtagaaactttcccgattcggatggggaggggtagggcggagagtcccagagaccagctctggcttcgtttgcattggaaattagcacaaggtagtgttgtttcctaatcagaaaatcaccatctacttccgaaggcgatagttagcaaagaaaaatctccagctgagataagctggggtcacattcgcctgcccctggcgaggaaaagagcaggggagactgggagaggtaacccaggagcgtttggaaaggagtagggaggctccgcggccgagcccgactggcggatcgagcctgtttaatggtttgcttgcttgccgggagttgtagttcaccgctcgcccgtttgccgggaacacccggagggcgagactacagctcccaggagtgcacggggctcctcggcagtacgcgtgtgcggcgccaggagaggacagctccagtgctgatgttggagccggttagcgaaccccaagagtgcagagtgtggagcgtggagcgccgggactgtgcacgcttgaccggaagcccagaccagtgcggtcctagccagagagaaaggacatttgccaacaatgagacacgaagcgcccatgcaggtgggtccataaagaaagagtggcctcgggaggaattgaaagagatgcttttccccttgctccgcgcacaagcagtt

SEQ ID NO: 44183 - DNA, 805 bp, Homo sapiens
gtatgccctggttgcaggctgttagcatggggaaactgtaggcatgctaacaagaagtgagacatcctatgttattggctggtggtgcatattttgctttctttgattgatcctaaattggaagcagggacaaaaattggggaagctgtcagtgattaatcaagtcctggaccttttgggaaaattattacaaaagtttttgctaagcctccaagattgtcactaattagagcagtgtggcttcccgcaagtctgacttctaacaggctggctttcctggtgtttattgtagataaggaggttggtttcctgggaaggttgctgcaggttgtgggtcaaagttctgcttttacatgtgttctgggtgttgtctatttgtacgttgagtctcacaaatatacctaactcagaaccaactttaataagagcagcaagagagatagcacaagaaaaagtaaagggttttgggtgtctgatagcttggctctaggcaagttattaaactctgtaatgcattggttttaattttctataaaataaggataataatatttgccttgcaggcaaaatatatttggcttgtagggctgttttaaggaattacctaacatgtgtattgtgcctcttttggtgttctcatattttttgaactcatttcacccttaaaaactattgaggtcatcaatgaccttgtttttatgtgggttatatctactgatatttaatgtattataaattaaaatgaagaaaattaaaaatatttattttcattttaaaataacaataaacccattgtatgtacaca

SEQ ID NO: 44184 - DNA, 777 bp, Homo sapiens
tttctgtcctatcaagtttgcattcatactgtagctttaattacatattagaaaggaggatggagtggttttcgaatctgctagtattaaaacatttttgctgatgcctttaactagatgagttgtaaagcacattatttatacctggaagaactggcttctcttacccatttaatttttccaattaactgaaagccaggttgacttggctttggttcactctgtggtcaaaatttagcatcatgggtattgattaattagtgatgagtcatttggcctataagagcataaactacctgatggcaaatttacaggacgaaaattaggccacagagtaagtgttgttcttcgttactaaaaatgaaactaaaaatgtcactgccgaagtggaactaacaggagcaacagagagaatcaagccaagtgttctttccttcctctcctgtctccctgacctagataagaaaccttacccaatcctaactcctagttccgtccacccttatttgagaccctcccactaagggaccattgccattcactagatcatgatgggtatgacccagtgaatggcaacataatgcataggataaatgtgcaatggattttttttttgtccatcagatttgggtgtttgtttgtatgaaaaatttagcctcttacttgttgtctaccatgaccatatagaaaagtcatgaaagttttggaatatgagctcccggatggaatgtgagaatatgagttctgaagttagatgcctgcattcatttcccaaca

SEQ ID NO: 44185 - DNA, 894 bp, Homo sapiens
tattaatctgttctttttcctttggccccaggagctgggatgaaatcacatgatttcatcattttgaatccatgcggctcctctgagatagggccagatgtaaccagaaggatttatagggtgtaaaattcagaatggattagaaaagcctttctatgttcagcccaacacatcctaaatcaacgtcccctgaatggaccagagcaatctctggctggcctagtggggaggttgtcatggcaactgactggcaagctcagccagtggaatgtgaatgcaaacaatagagtgataagactgtgtacagagcagcatactaaggctgcttctgcccaggtacagtggcacataggtgaaagtgtgaaactgttgctgcattttgtaacttcttaacaatctctggcagctcatttgaaatttaccaagtgccctttcccagatgttggtaaaaacattcctgctgatagataacagaagctatggaaaaatcagcacccagctgataggtgcagaggtatacaaagccctggagggctgttggaataacactactcaaaaattttctgaaggaggttgaagcaggtttaaggtaaatcttatgactcttcagtgccatcttgtgtccttttagatactgacaatttactagaagcccactctcagaccgatcattaggcagcagcagggcagacatggaaaagttagagctggattatattggagcttggtattcccttttacagcagaatatgcacaccaagccttctgagctttaaattgatttaaaaaattgaaattaaaaattttggtagaatctggaaataaaaacagaataagatgccaaataatgccatgaaaagattgcaagagtctacatggtgcgctaggggttga

SEQ ID NO: 44186 - DNA, 1149 bp, Homo sapiens
cggatgcccggtgccggcacatgagggctgctccttcatattgcccagcccggcagtgcaacgggggcggaggctgtgctcgcggggcggccggcctcggggaggcacggtctctccagcttggcgtctcgggtcggcctccagggagggcgtgcaaagagcggcgagccaactttcacacagcgacgcgagcggaaaaaccactatgcgacttttcaactgtgcggcgggcccgagtcccagtccaggagcccggctctagcggatggcgagggggtggcgagcgcgcttgggtgcccgccccgcagaggagcgtctggtccacagccggatctcctcggtccccaacccggagccgcggccccacgcccgccccgcctgccgagccttctgcacggcacttgaagtgaatgaatcagccgcggccgggtgcgcggccaccacgtttcctgttttctttctcaactcctcgggcggcaggcgcagcgcggctccaacgccgcagctttccgggaacactccccctcacgcccctctcggccctcggcgctgcctggctcctcctcaacccccttacgaaaagattccgaattgcaaaagcctgtccctgtccgtgccacccgccgcgtccttcccctcgagctctgccccgggggccccgccacctcgcagtgccatccccccggcgcagccgggcgccactcgctttgaagtgcagacgaggaggcgcgggcgcgagcgtgtgtgtctgtggggctgctgtgggactgtctgtgctaggagagcggcggaaaacccggcgtggagcgcctgcagtccgccgtccggggtcgcgcccgccgcggggctcaggagggaccggcacgcaggcgcgcacggccgcgcacctgtctcgctagaaccccgcgcgccccgccgagccactgccctccaggttgcccagaccgctggagcctctgcgactccacgaccggctgcttcctgcgaagtttcacaaacaaggttatttaggaccctcaaggtttctgagggtttaagttttagggtttctgggggttcgtttctaaaggcttaggattcacctacttcaaggaggcagggttgtgggaattaagaccgcattctttttctacccagcccagtccctac

SEQ ID NO: 44187 - DNA, 442 bp, Homo sapiens
cagcaccggcttttaattttcaaaagcactgcaattgcttggtgtggtttcaagagctggggtgccattctccctgatgatgactctgctgacgtcaatggcattcttatcatgcctagtgcgacatcagaaaccagtcctcagaggctcctcttattcacagtgcctgggctctcagcaaaatgtggaccggattctgaaacgcaaaggactccccgttcctaatcagcgctgcaatccaccagacagtctccttctgccggcagcttgccagttaagactttgttccttagcgttctgtcctgcaaggaccccctgaaggagaagagagggctaagtggatcacagcgtgtcctccgtgtctgagctttcagagccgtgtgtgtgtgtgtgtgtgtgtgtgtgtgtgtgtgtgtccctcaaccaaggttagagactagtc

SEQ ID NO: 44188 - DNA, 1890 bp, Homo sapiens
atagatataataaataatagtaaccatacagtgggattagtttccaatggtaaacatttcaggccttcaggccttcaggaggaattttgaattgtgatgaaatggcaagtgcctattccatccaggcataaaaccaatcctagccaatttattaaaaaaaaaatcctgcattgttactctttagctaatgattaactaaagtctgagtgactagtagaatgagtaattttgttacataagccagagaaggtggaaggaaactaacatttattcaatacctactgtccactgggtacttcatctatatattctcttctaatcttcaaaacaacactgtaaggtagttgttacaaataaggaataattacaacttattccttattttgcagctgtaagttgatgtttagagaggtcacatccaagtctcttggaccatgcttcttcattatacaaggaatattgatgttgccaaatattaattcaggagctggtacagttagaaattagtaacacacacacacacacacacacacacgcgtgcatgcacgtaaaaagcaaggttaaactcgcaaggttaggcaaggttagctaccatatgatagcttaaagggaagaattctgtgctgataaatggagtatttttctccttaactgagtcatcctgtgtcattgttaggcactgtagacagtacataagttaactgagatctgatacttccttttatcccttaaaaatccaacacagggctcactgtaattaggtataaataggtgacttaacccttcagatctttctggaggagagataagtgtcttatgagattgaaataggagggatcaacaaagattgcagaagaattaagggctagcaaaatctgtcatgattccaaaaggatcaagttgaaagtgaaactagttcacacattttcacgacagcttcagagttaacatcctataaaggaatctatcaacattgtgacatttgtttaggcttctataagtgagaaaatgtgtccttccatgcaatactaaatgtaattatcatgttatctatttaatccaacttcacataaatcccaatgattaaatctactatctatttagaatattatcacatacttaggaagatatatcaataaatacttatgggtccttgtggtaaataaatactaatgtatagatgaggttatacttgccttagagagtttacaacaaaaagagggacgggtagtgaaagacataatgtccatgaaaaccaccacattattgctttatttgcttcacaggcctcatatgtgaatttttttttaaactatagattcttacctactaaagtaaagtttcagtgagtgcaaaatttgactggcttctatcctcctatgtccccagtacctagaacagtgcctgaacttaggaagcactcaagaaatattgggcaaatgaatgaatgaatgaatgacacagatcatgaatgttataatgagaaagcagagaaaaaaaattatctgggctggatagtcagagaatgtttccaggagaggggatcccaaatatggacttttaaagctgataaaggaaggcaatttccttgagaagaatggcatagacacaaaggctaggtaagggcaaagagacacctggagtaatgtggatttactgttattctatcagtaaatcttgatgaaaagacttgaggccatgtaaagaagaactctctaataaaaatggaatgggttcccttggggttggtaggagaggtgatttctgtgaggggaggtactggagcttggggtagaagaacacaacaaaaatatgatagcaggcagccaaccccaaggcacaagtgaaactttttttttttttttttttttgagacagagtgtcactctg

SEQ ID NO: 44189 - DNA, 1258 bp, Homo sapiens
ataatctgatacagtgagttaaataaaatatatccttgaaataaattttacctatttctttttaccttttaaatgtggtaccagaagacctaaaattacgaagtgtctcataatatttctatactccagcgttggtctatatcctgagaaatacataaatgagaggtcacctgcatgagatgagtgacgtagttaatgggataggctattcctttcctaactctaaatctctattttcggaagatgactgaggagaatgccaacattgtcttaattcagtggcacagtgggccctgaacatgatcacattgttaatctccctactctcttgtccgggtcaacaatttcacagttgtcagaaaatgaacaactcaaattcccctttcttggtatatcttacatttttttatgtctcaaaggagaattatttcattcacatctgtttctgtctttcaatgaccagctctatcttcacgtcagtctcaatctaaagccaattttatcagagaatcccagagacaagcccaaagaggacttcttggatctggcctgagaaaatagtaaccagaaaaccaggggctattcaggatctgggtgtagcctgtatgcctgaatttttttccatgggggttcgttcgtagtctgatagtgaaatccaaatggtgtgtttgagaactgttgacaataatccagatgtttgctctactaagagtcatatgtgtaataaactaaaggtggacaacttcaattgaatggaataaaaggtcagagctaagcacttgtaactctctaggtattgcaggaattcgggtagtatcatttataaagaaaaagaatctaaaattctaccaattttcaggcattcagtgcatatgaagcaatgtgtccccaaagttagatcatccagatgttttatgttaatcagagtaaacatatgattcatcacagattcaacaaagtcaaaggcagaaaattcacatctacttgcaagctaaggggtgtagtgctttttccattttctatgccagctctcttgacatacttagcacttacccatagaataattgaggtcattggatttataataaaatgccattacaagaaatgctaataaaattatatgttctgtacatatagatgtatacatatacatatattttatataattctgtgtgtacatattgcatgtatgtacatacaatacatatatgaagtatttcacccaagagatattcccacttttcgaaatattgtgtat

SEQ ID NO: 44190 - DNA, 792 bp, Homo sapiens
aatgcacattccatcttgtctgaggagctgattaccttttccttagacacctgtaacatccttctcatcaaatttcttcccttaggggcccttctctccatcaccactaaactattttccttcctagagcaaccttcttagggcaatatgaaacacaacattatgggccaagtccaaagtcctgactattgtttcaaaggctgttagtagattgttcaccttcttttgcctttgaaaggtgccatcctgagcctggaatgctttgtcagcattcgccacttcatttatcatagtttacaaagtacgataaaaggtgataacagaagctttccgtttgtagttcatccatgtaataattttcttcaacttaagagcaaagccatgaaaaactaaaaagaaagttccaaagaattattaagtaatttaatgtctcttattggatatagaaatgggactatcatataaaggtcatcaagattgtgtagtgtcttgtactttgctgacagtaaacattccaagtactctaacaattctcattccactccttttggcaagcgagaggctgcatggttgggtgatggataaatgctgaactgattgcagaacaaaggtcaacatttatgacagtttttattaaactctagcagttgggaatagatttgaaaactgacctttttcttttttaaatctcagttggaaaatattacctattgtttatttcaatgttttaaaaacctcaatgataaataagacacaaagaatatgtttttaaattgcattgccaatgaataa

SEQ ID NO: 44191 - DNA, 914 bp, Homo sapiens
tataaacagccatatagccatcaataaatatatccattatttggctaaatcctctttcaaattctcatcatgggtgattttgatggcaatacaagcactgacaatctctcaaattcttaaaatctacagaccttgaaaccagatcagcttttgctaaatagctaaactatttccagctttcctctctggttaatttttttcccaactatccagtgtgttgaataaaaactaacttctcaccctgaccctcccatttcagcagacatccaaagcagttaccaaagggcaacaaaacacattttcactgacaaacaactagaggaaaggaaagcagttaccgtctcctctgtggcttaatatcaattggcatgttgatcgcgtatggtgatccatgaacataagcgcttcggaatctagccaccttccccagagtcaggtactcacagctgcttggcaaactcattatatccaaaaggcaagaagtaaaagcaaatctgagtagtcagaccagcattcctgggaaggctggaaagaacatgtcagataatagatttcagacatatgctgctcactggttgcccggtgcttctttgcttcaaaagtaaacgcgtgtttctcggaggctaaatgtactaccttgttttctgttcattctgttcatggatacaagaagctttttgcttatttctaaccaggctcatgctctgaccaattattggctgagtagataaagcagaaattctgtagctccacaaaagcctatttccactcagaccaaatctctgagtaggcagcaaggttttatccatttttgtctaacgttgaaaagaacatcaacctaatgtaatagtagtttggtaatcagagttatttacctgtaaacaaagcatgcatatctgataggaaggaaataa

SEQ ID NO: 44192 - DNA, 463 bp, Homo sapiens
agattgcccagtagaagagaataagatttgcttcacataagaatttcctaggaggggtaacaatcagaaattgaagaataagatataaacctctatggtagagacctatgtgtcctatgatgggtaaaattccagagttttcttagcaggggcatttttgcttgtacccaggtaattatttaccaaaagcctggcaggggctcctggggattacctgtacttaaatttggatgagagaggattactgttaaactccagcctgccaagaattcagagtctgtgagaactctggccaactagcaggaggtggcccttaagggaagaaaatggaatctttctatcgtcaacaattccctttctctggggctggagagaggtagttggggacttgatctttaggaaaataagaacacattggagagtttaatttcatctaaagattagagctaccatccataccagg

SEQ ID NO: 44193 - DNA, 479 bp, Homo sapiens
acattctctttgggaattatcattacagggcacttccagtgtgcataagaaaactgcctcttaattttatagttacttctcattttgactcaaaatagcattcgctaactggatcatcaactttaatcatcaggcttaatgccaaaggacttttggcagcttcatagaactagataaaccttcaacagatggagatttgtcatcaatgaatttcaaaaacatgtagcaaaggctcttttgaaggtaagttcaagaggggaatccctgaaatgtttgaacaatggcaatatccttgagatattactagtacggagctccccacaggcatcattgagaaaggctcaaactccattacattaatgggtaagttctgctgtgttctagccagtctttctgcctcttttctcttcggttcatgtgtgtttttaaaatagtaaaacaaaatgtgtgtaatttccagagtcaatgtcagaggttca

SEQ ID NO: 44194 - DNA, 483 bp, Homo sapiens
caatttcttaaaccaaaatttgttttagtttcagctcacccaatctgctaccttgcaaccacaaatgtgtttatgatttccccctccaaaaacctgcctctagttcagaagactcttcactgggtaattattttccacaagcccaaattgttttctgtggtatgaggctgggttcaatgctctttacacttttgcccatttgcagagatcagcatttcctttcgccagaatgctcctgctgacgagaatgctgttgggcctcccagaaagaaagcagagacagttcatttgaccactgcctgactcaaacctctgctactgtttttttctgtccagataagggagctaaagtcagcaataattggaaaaagaggctctcatttggtcctgttatgctactttttccagtaatttcaaacaacaaatatgtagcatttaatattatatgccagccctctaggaactgtgaatgaagtaaacaaa

SEQ ID NO: 44195 - DNA, 2161 bp, Homo sapiens
atccaatcagctgaaggcctgcatagaacataaaggctgaaccttccacaagtaagagaggattcctcctgcctgcctgagctgggaggttggttttttcctgcctttggacatgaactgaaacatttgctccttttgggtatcaagcctgccagctttcagactggaacttataccagcagctctcctgggtctccagcttattggctgcagatcttggaacttctcagtctctgtagctgtgggagtaaattccttaaaataaatctctttctatgtatgcatatatcatataggttctgtcctttgaagaaccctgactaataaacatagaaataaattttcaaatctattaaataagtaaatatgtatctcacatataaacttgagcccatccccctctctggaattccataaaaaataattttcatagcctttaaaatcctctacagttccaaggacctgcccagggcaaggagactgaaactttttatttttaactctttttttcttacaattttattttttaggggtgtatttttaggaggagctaccagcagaactatatcccagcattgctgatactaaggtaatgcccgtttactttcctctgttttgtgtggctcattgcaaccagggactggaggtggtggtggaggagcaggagagtaagtgggggttctggatggtaccaaaatgaccacatacaaagacagcacaacctgctaaggctgcaacctgctaaggctggatgtctggcaacagtggcctctatccacacagtgctcaggatgcaagttgctttttagggacacctttgctgctccctttacctttaaggctgagtgttacatttccagaaagaggtataccctcttcttccatattaaagctaattttaactaagtgacaaacatcactagcataaacataaaactgaataaatgcagcaaagattattatggtctctgtttgaagagacagtgtaactacaacttagcagaacacaatttattgtgacttggggaaaggcagagtatggtttttgcttgggccccacctgggcagggctgactcccagctcctctggttatgttctgcttcccaatatcatcaactactgagaatcccaactatgtaaaacatccctggggaattccactagggtctaggcttttccatgacaggcaggttcttagaaacaagtcaaaactatggtttttgaggggcttcccctccaagccaaatgttttcatctaaataccagcactaactggtgattcagtatctgatgaataatgcttatgtttttatgctcaacttgtaatggactataattgtctacagacaaccacttagcatatctttatctttgcagactggctctgtaaatgtcatatctttgtgaatacttgactcccctatcatttgagtgtctgtgcctattaagttctgtatattgaaaaattctagataatctagaccagttaaagcccccactgaaacactgtgtggagccagacctcatttccttattttccttctagaacaaacaaatgaagcaggtgcaatgatgtccgttccccttctttcatcccaccctgagtcaatggcagcagcaaacccaaagttactgcaccttcattcctgtgataccgattttaatctcactacatttaatttcactacatttctgagacaaagtaacatacatactagcaaaagctgcagactacaagttagcagcctgtagtttaagcttcaattctgacagtaactgtctggctctagtgaaaccatttagtcatttgtttcacattttctcatctgtaaaatgtaatgtgggtcaactctgaatttctctgagagttctaaaagtctacgattcaccaaccacaacttgacaaccagtaatatccaccatgatgcatgagactcaagctaataaaccaattagttaagcaatccccatggcaaaatcagatccagttttggatcacttttttaaaataattccaagaaaccccagtctcctagggaagactaggatgtaatagattctgaaggtcatagagattaaagcaaattatattgtggtactatctgcaatatctggtgggtttttataacctacctagccactagcacagtggcttttaga

SEQ ID NO: 44196 - DNA, 787 bp, Homo sapiens
tgtgtcagccatctgggctttattttcactgtacgccaccgttatttattaaagagtagaaatgattaacacagagacatctggccctgcttatatacccacactgcaagtttttaaaaaaagatatacccaggaaattaacattcatatttggatacaaaagtctggattgaattttgttttttagatttatgtctctaccagtaaggttttacaaaataaactctcttctcaagaatgatgctttgaagaaaggctactaccaaacttagcagttacatatttttaggtttattatataaatataaatatatataaacatatacaaatgtaaaataagttatacacaatcttactgcagaatagtttttctagaagaaatgccctgattggaaccaagaaggtaaaatctctaaatgctttcattttgcataagattagagcctacactgtcagaaaatgattaacactcagacattctcactactgtcaaaatactgcacaaagagagagaatgcaggattgccaggggcattcccagctccctgacgtcaattcagatcaaattcagataacttactatgccagctgcttgatttttccgttttgtgaaaatcctattctctttaaaatgagtttgctatctaaataccatcaaagctactttgaaatattgggaaaagggtttaagcttttttttaatgcttttcacctccctcctcatgacaacaagcttgtagagaatgatcaactccttctgattccttcaattattatcactatcatg

SEQ ID NO: 44197 - DNA, 1588 bp, Homo sapiens
agtctgcatgctgccaggtaatttacaatccatgacaagcagagccaagtgaaagttatttacatttattctactggtagaatagaagagatgagagtgaaaaggatctgctgaatcagatcatgtttgactgaggagtgacagggaagttttcttcaattaatagccagctgcataatttgagctaatgccagctggactttcatcatgaaacgacacagaaataaattattctgtactcaggtgctggcatagtgaagtgaattaatccacttaaatctggaggagggagagagaaagtagattacactatctgaattttttgagcctgttttagccacactttaaggatactgaggttcatgataattattaaaatgtccaagtggatccatttagactcaaatacttgcttgaatgaacaaattcttagaagggaggaaccagagtagaaatggctttatcaaggtcatggtggtttctttcaccaattagtgaaattcatattcaactcagaaggtcagggggaagtgggcaaaaagagtcttattaagaacaactttataggggaattcttgagggggtaaaaaggtgactacaaagatataaaggaatccaggacaggtttagagaggtcaactgcctgctggttcattcagaaaagattaacagacccagctgctgggacttttctggctaggcatccttcccagtggtcacaagtcaatgtgtctcctggctgcttggctatgttcccatccgtctggatggaagagcgcccacccctacacgccagaacttttccttaggggaaagttactgaggttccacgtcaggcaaactttgctcacccatcacttcaagtaaacaactcttctatggagatttcttagagaaaaaatgcacttgaaagcatctaaccaaagcaatgaaggtggaaaaaacaagttatgtgggaatctgagtatagaatatacagacataaaataagctctccaaatgaggaagcagtcacagcttgacctctgaattgtttgctgtttgttccttcaatattcaaactgtagccctggaaatacaaacacaaacttctaaacactcacaggcctgtggcaacaaaatgctacatgccagcttcacaactggggcatgcagaccataaatcctgtagtggcaggaggggaggtgtggaaatagactgtcatcattctgcagcaaggaaaactaggtacaaggaaaaggcaactggcaacacattcctggattctctcattcattgaagaaggaactcagggattgaattacccaattgacgctagttctacccatgccagagggcaaaagttccaagactgccacaggccatggttgcttggaatttaggcagaggtgcttggtccttagagtgtagcagagagaagttctggaaaaggagctcctcatcgagtctggtaatgagcacttctattctgacatggatttcagaggactcaggggacaacgtgcccagaatttaacccttttaatcagtcagcatgagagataaatctaatttagctatatgagactgatgagaaacagtctttgc

SEQ ID NO: 44198 - DNA, 1092 bp, Homo sapiens
ggataggttttgattagttgtttttaaaaacagatggtcatgaaaggtcttattaagaaagtgatatttgagcaaaggcctgaaaaaaaatggagttccttactggggaaagtatgggtcctacaacagagaatagtaagtctcagctctgcagggtgcatggcaaattttccttacaggagttcacctagttacacaagagagaaactcccatgacaccccactagaacttttttctgctagctctctgagggaactgggcatatttgttctgtttcactgggcaaacagaaataggagttaggggtggctgtaggttccacgaatcattattattttcaatgttcactctctggcgtaaaggctgtgaggtgaattgctgactaattttataaagcacctggagctcctcagggcaaaggcactatgtcaacaccaacattaaataaatagcaataattggccaagtcctctggtggtataaggcaaataaaatatgttccctcttggaagttcatgacgtctgccaggttaagcaagaatgaggcaaagcacttttagaaagctactttttctaccattgtatatggcctccaaacagccagccactgtgaaatgttaagtgttcaacagcaaattaaaactgagtgtgtttttcattcactatcacaacaaggtactaaataaccacttgagatatttgttgtacgttatcattttccaggcagttttactgttagctagaaataagagtagagtgacattcgtttgattagagcagaaccattttccaccaatttttagagcacatgcaaatctctttagcaaaaggactttttcaagggttgaatctcttatagtttctcaatgtgaatgttaattaaagaaacctaccaaaaccaagaatgatttcaaatggttatagggtttcaaatggtagatgaaacatgaaaatatatataacctattaacaagatatatttgtgtctctaagaattctataggggaatatacatttcagtgaaactctgtacccacccaacccactccacagcaaaacaggcatttgtgagaaagcgctatatatataca

SEQ ID NO: 44199 - DNA, 664 bp, Homo sapiens
ttctcacttcctcatatggtaattatatctcggtggaattgaatcctcaggacaacagggcatgttattgtgagatattttacacctggcttaaccattctgtaaaatcagagatagtgactagcccagaggctctgtctcacttccttccggtgttgcttagctattgataaatattaaggtgcatgtgatttggctgctaaaatgaagaaaggatgtcagaaggctatcagtttgctgaatcaaacagcattgccacagggctccaagctggcagggcccctctgggcattgccaggtcaccaaggaagtggctgggtgaggtggcaacaggtgtcagacatgctgctgagcagatgatctcagcaggcctgaggacagaagagaaggttaccacacaaagtgcttagctgtgaccgcagaggaatttcagcatcaaaggaatttgagtagaaaaaggtttcaaatttcagttaacccagggttgaagcagcaggactcattgatagaaagagagaagcaaataaaagcccacactagttaacataactctcaaataagaatgcaattatctgcagccacagtagcccatggaaagatatccctaaccagtcattcagttgagacatagggacatcacctgggtggaaaggacccttacagg

SEQ ID NO: 44200 - DNA, 806 bp, Homo sapiens
tagcttctatcttccactgtccttttagccatgtgaatccatcattaaaaggatgcaaaggtatttaaataaaatgccctcctaaattgtttagctatgaaattcaattgcattcaacatagccttgatgtttctggcatgaaattatagtatttttacaaataagattataaaaagttgttatatatcttttaagtcaggcaaaaagctgaacatgttagtcacactgtgttaggtcattcatgttagaccctggcatgtgattccaggtcataatgcttctaaaggtcctcttaactgctgctacatgaaatttaaattcctagaaagctgacttgcatttcccttctttcaaccatgccatacttgttcctgaatgccaggctatctctccattctaacaactagccagaaggaaaaataagaagagctatatagtacttatctatccagtgaggcaaacccttatctttgtttggcttggcagtaaaaagactgaaaagtgtaatggaaagaagccttcgcaataaaatcctccagctaatatttctaatgtagcttcaaagaagaaacacacattcttcataccactcttttagcacggaaggggtagtgttctattaaaccaagtaataggaccacttattaactttaactcataactgataaagagtgaatttgtaatactattgctcaataatcaacacaccagccctagggcaggtggatgagagtacaagtaggaactctgtgcacaggcttctatttcaattactacttctggtaaaatttgaagactaccctag

SEQ ID NO: 44201 - DNA, 920 bp, Homo sapiens
tgtagttcatttcacacaggaaagaaagtataaatgagcattgtaggccaggataaagctgtggctggggataggcattctgtcctgtttgcctggggtgctaattttatgaacattatatgctattatagactatattattgttctcaacaattcactcttttgccacttgaatgttcaggcgttctgggaggggggatatattgctgagacccattgtctggttagccacaaacttgcttgggctaatggaatgtgagtggagatgacagtctgtcattttagatcaaaggctttaagaagcattacgtgcttcccccagcctcttgctctttaccctgggccacagttccgttgtcagagttccaaccagctgtactctgggcaaggttgagccatttcctctactttcttctaatggatggaatggtctaacccattgaattgacaggaaaacaagaaaatactttggctggaaagaaactcttacaagagctcaggctaaaccctaaggaattcagacttctctttgaaaatcttatttgtcaatggtcacaattcaggagaaaggacaaggtatactgcaacacctgggcctcatttttgctgacaatggagcagatggagtgattatctgtaaccttatttgcactgaccctgaatatctgttgtttgtcaaaaccatttgaatccttttagtttcagtttcccacacgtataatcttattactcataaagtttactctaaagcaaggtttaaaatgaaatctcatgagaattaaacatcatttgtacacttagattgccattcttaaaaaagttacataaattcagcagaaagaaagcactattttaagaaaaccaccttatcctctccttttaattgcttctaagaaactgggcaaaccaccctcaatgaa

SEQ ID NO: 44202 - DNA, 1142 bp, Homo sapiens
taaaataatatttctatgctaaaccccttcaaaaaggttttctattattttagttcttctgaagatctactttggaaaaatggtacttaatttctgccagttaaaatttctccaaattaaaacactgaaaatgaaactatgaagggtttttttttgcaaatttctcaaaatcttgacatttcttttgtaagcttaggtcttgatatataatttaactgttatgaattctaaaagataaggattagtcatcagaatttaacaagctagttattcagtaatttcccaagaatcatagatacatttacacagatttttttcagaaatataacaggcataaataattttcaaagtataagctaaatattaaaatgcatgtatttgacaaattattgtgacagaataataagatacagaatcattcatatacaccaaagccaactataccaatctatgtgcatgtaaacccaaaacatacacacacacacacacacacacacacagagacacacactgagtcatggtgacaaagtccacacaaatggttaatcattgagttcaaagtttttttccactatggcaatcaaaaccaacatcaccaggacttctagtctggaagggtatggatccccctgggtgttcagcataaaagacacagcaacagaaggtatgtttctcaatcgatcaaaaaacaactatttattgaatgtatattatacaggtggcacttgtaccttcacagtggatacaatgattgatgaatgtggaggttcttacttttttttttttttttttgaaatggtatctcctctgttgtgcaatggtgcaatctcggctcaaagcaacctccgcctcctaggttccagcgattctcctgcctcagcctcccgagtagctcggattacaggcatgcaccaccatgcccagctaatttttatatttttagtagagacgaggtttcaccatgttgaacaggctggtctaaaactcctgacctcaagtgatccacgtgcctcagcctcccaaagtgctgggattacaggcatgaactaccgcacccggccggttcttactttttaggaacttacagtccagctacatacttgaaatacaaacatgaactagaagacagcataacatagaaa

SEQ ID NO: 44203 - DNA, 1023 bp, Homo sapiens
attttaccatcagtagcaacggcttcagctcgtacgaacaggcttcacatcttttctctttaagataaatgtcaatggtcatgggaagcacacgtgaataataagctgcaaggttatccaaggttttcttcacttttttctcaatgccaattgtcataatgtaatccctgtaattccttaaacatgacaagccaatcggcatgttctttaaaaggaaaatcttcctcaggtcttttgatttcgtggaaagccaactatgcctttcaaatggtacagacaccctcaacttgcagcgcctccacctcccatgatttccacagagggcaacagccagttatgccacagacatggctgaaggttagggctgactggtcttccccaaacattccagcagcacttcctggtgtgcttctcagatgatttcccccagaaacttgctccccaccttctggtattacactttgcctacagccctcctctgggttcctagttcccaggagactggcagcaatgctcttctccgggtattattaccataagagacagagaaaagataaccttaaagctaagcagggcagaagtaagagagatggaacgagggagaaagagacctcaaagagaaatcactaaataatggctttgaaaatctactcagttgtttgtgtgtgtatatgtgtatttttactctacaaactctaagtggctgtatttctcttttataggtgacaaatggtttctttccccttctatgacttgcaaatttatatttctcttaacaaccataaaaacaactacagttgctgaagaaataatgactcagaaagcaaatgtttacttttaaatatgagcaactttacatctaatgccaatgcctgataaagagaaatttatagtaaacaaaaaatatggccaaaatcacttatttagcttcctaaacacatttaagatttattaaaagtctcctaaaaggccttttgaaagtccacctaaagaaattattttgttgttaagattgttactaag

SEQ ID NO: 44204 - DNA, 709 bp, Homo sapiens
ctcattcaaccaatatggaaaacttgagatactctttccaactcccttgcctgatagttttagtccataggggaaactgcttccttctgagttactgaaaatcgataccatgatttttatttctggtttccattgctctctttatgcttttcttactgggctgtgacctgatacactaaaatgaaatattgatagaaattgtgctcatgaagtttttccaaacagcaccagaaaaggaagtgccagaaatgtcagaagaaagcctattttcatgggatttcctgccttccttacatcccgacatgtctaaatagttcagataacctccagctgaactctaggttgctccactcagactgaaatcaaacagctgagttgagggccactcattcagcaatgggtgcaatttaggaactgcagtgataaagcagcgcaaccaaaagggacactggacacggaaattctggtcctggctccgtaggaactcatgccagctctcctgctctggcacccgatgcctggccttgagccaaccttctccttcagtgcatctcccagtgtttattcatgcctttcttttattcactgtttgttgctcacaattttttccaaaaagaaaatcttcctcaaagagaagccatcatttcccaataactgctttaagacagaaaaagtcaatgtttgtctcactcctcttatggccattaca

SEQ ID NO: 44205 - DNA, 1614 bp, Homo sapiens
caactttctgcgtagaattcctaatccctttcttctttcctttggaaaggcatgtttaagattatgaatactgtatatcaaagtcaggagtgaggaagggctttatgaagacacaccaccattacacacacactgtatgtgtctctgtccaagtggggatcatgcagaaaacagagcaaactatgattttcctcccctcatttctggtcctttctttcctcagctgttggggaagctggcagggaaattggtttaaggaatcaaagaaacgccactacgtacgtatgggaataaaactgcattcttatttgacatctggcatccaattttcttgtaggaacttgcaataggaattgaactttgagaaccacccacctcaaccactcctagtaccagtctccaggattcttgccctgacttggacatttgtgggatttatggttaagggagatcacttggccataaatccccggtgaggaatgatgatggtcctccctccctacccccaaaattaaaggcgcgagagcaggactccctgaagggaaacggccaccatttctgcgaggtctgcgcaaaccttaccatgtatgtgccaccgtgaaacgccgctgtttggggatgttgctgctgagaagcattctgcgcagaagcctgggggaatttctcggagagatcactggagagagcttgggagaaaccgatttcctcgctgtcttggacttctcatgctgcaacaggttttctcgcaaggatttcacaaggtcttcgttcagccacgggtttggacaatgcggattatccacttcaggtactgttaaagtgtccgggcttgtctgctgagccattttcctggtcaactttgtacagctggcaagaatccagggcaacgtggttccctcgctcacggtcccggaaatgtccagggaagcaggtctgagcctgctgctgttagtgcattcagtcgcctgcctcagtctctctgtagagcctggggctgggtgcagaggaggcgagcgcactcctccgcggaagcgtattaaacgtcacccctcctctcccaagcccctgccaaagatcactgacaagctcgcatagcaaatgaacaaggagggaaagcaccgcgctcgcacggctttgtccgtgctacaaagcagcctgttaaactattggaactaatgcgccgcagctgcgcgagtgacttctgctgcttatgtacataaaaagtcctggggggagggcttaaccatcagatgcctgctgctgggttgtttggctagtctttccatttgcttattcctgaatccaaaggaaagaaaaactttgaacttgaccttcctctcccgcagggctatttatctccctacagtccacgttcataaaagaaaaatgccaatcctttgtttttttctctcttttttttttaataagggaagaataaacaagcactagctacacaaggagaaatacttccctgcttactaaactcaatctgatgaaccacataagacaaatcccatgagaatgaaattgactttttctccctctgtctctagttagaacccaaacaaacaaaaggtttcaaaatactacacatggaacgctttacaggttgca

SEQ ID NO: 44206 - DNA, 461 bp, Homo sapiens
gaatgtccgataggtaggaaatcagagcaagactagcaatctgactgcagactcaggagtccccgaggagcctgagtgagttccgtggaggtgcatgatttccatgggagcaacacactcagaggcagaatgactcaggaaccacgtcctgggagatgtccagcgtccagctgtgaataccacaaacttttgtctatagtgatgatgaaatattgactctggaattttggattttgtgccttaagggaagcttgcaaacggtggccaagcacctagagagagaactagtcatatgatttgtttatttcatgcctgctgaataattgtttagttaataaatgtccttatgtaaatcagaatttaatctaagatgcttttattctaattaggtggtgacattataaggaagtagttaactcctctcacctccaacttcactggcagttaccaatgtccaacca

SEQ ID NO: 44207 - DNA, 706 bp, Homo sapiens
tgggtggggacacagaggcaaatcatgtcatacctacatctattcttggtgaccagtatatcctaaaaacagaaatgttagcagtcttactttgtagatgaggtcacagagattcagagagtgtcagcattttgcttaagatcacatgaatggtagtaactgaaagctgagattagaccccaggcctgcctcattctaaacctgtgtttgttatagtccttccatactaagctcacattatacttaactgcagttcacctgatatggggaggactgagcgaccttaactggggaacagaggtagggtgattattgtttaactccttcacagtaagaaagggaactcactgactaacctttgaacttctttgtcaataaatactgggcattatgctgggtgttgaggacacagagataaaaggcaaattctttcacagccttatctcccacaactgcctgtgtaataatacctaacttgtttactgggttcccgcgcccttgatcaccctgaccaacctgtctcccttccttccctgacacacacctgttgatgcatcaagactcaagtgtcacctctacagcaaactattctctgactgattcaagcagagttaattcctcagccctcctataacaatgaattcacatacattgcagcatgtgaaacaataaattcgaatttatctgtttgtctttctaactaaac

SEQ ID NO: 44208 - DNA, 1755 bp, Homo sapiens
aacagaaacgccaggggccggaaatgcggccagcgcgatgcccctctgttctgggcaccgtttattcgaataccccgtcaggtatcatcaggtgtcactcaggaaggagacacgccctgcctggactgccgcgaacgctgagcgttacggggtacgtggtggcccctcaggttaccgaccgggtcggttagattccagaggacaaaaggcagggaacagcctggtcttggggtctttaaacagagaggcgccatctactgccgagaacccagtcaacatctcatggacaaagctgcactaacccccggccggctgagctctgggccccgttagcctttctttgaggctcgtccactaaaaggcagccccagtagtcccagctgaaatgctccacacccgagccccgctggcctgcggaagcgaagactgacaagcactctgtccgcgcgctgagtgggggctcgcggcaccgggtgctccgcccaggccccagcacactcactcaccagcctggtagctcggtacggcccgggccccacgatgcgatgctccatggcgcgtaggcagcagcggccgcagccgcgccagcgctgatccccgccagccggaggagcagcagtttgaatcccaagcccgcgggctgcgggcgctgattgggcggcgcggcagcacgtcaccggaaatgcgcggggaggcaggcgtcttctccgagacccgcggcgctgggagctccgcgtgcgaacttgcccggggcgaaatctgttgcccaccctggtcccaccgtgcgagcacacctaggcaggtgcgactaaggggccgggggcgtctccccagcgctggaaaacgctgtgcagcgcccttcccagatttctgcgtccgcgcaacacaaacacacgcaacgctatctctacaaaagggtcaataataggtgttatccagcgaccgaaacccagctttgggccgcgtggataaatacctgtcctccctaccaagtgcactgtgagcctggaggtgctgctaacgctgggagaagcggtagtgaaatgaagcgaggcgacagcttttaccagtgtagggacatttaaaaacgggatagagagcacaaggagcgtagacagtgtgttaagggcaataaagagcgggaagggagccccgattcctcttctgtttgttctcatgatagtcttttcccctttaatttgagttctatgttttgtattgggctgatacttttagtcctcggcaatagggttgtgagtccttttttgactgcttagaattttccccctgggaattgctagtccgatttgcaatctttcagagggacaaatgaagtaactccatatacttaggactctgtacacctactcaaatttggtcatctcggtaagtacccaggacaagacgttgaaggagtgaaggtgtgccattccaaaatatgcctaattggtatattgattatttcgagcggaaaacattggagaaatggtagtttcagaaagggcaagctgacctgcctcttcgatgcagcaggccacaaagatttctctgggatgggcatcctctccctaccacggtgagaaaatagcctttatcaccaaaggcttggaattgaaggctgcagtggacctgaataaacattcttaacgaagtaaccctatcttccactaggagatataggagattttttacatatatcttctagtgactccctagaaaatgttactgcctttgtgagctgtggaagttaactcg

SEQ ID NO: 44209 - DNA, 689 bp, Homo sapiens
gatagatttgcccattacctatacatgattattctgtggaatcaattactaaattatacaaatatgcaatcctacagcacattatatgtaaccagtactgatattccactcttgtgctttaggacaggcaggtcagtttttcagggctggcatctgatctgattcattggacatccatgccacactagttattaatattttggttctaactcctgcacatacctctatatttgggagtcattatactgcatttcatttgtggatatgttttacctcacctagaattttgtaagttcttgtagggtagggtggaagggcttcttaagcaaatttgtattgtgcacagtaccgacccaggggaggtgagtcaaggactaaatatccatggcattcgtcaatcagtaaagaaattctcatagctgtactgggcagtaagaaggcccaattttctcagtttcaattttaacttagaagagtaagtaaataaggtatatttatctgtaaataattcacatgaccaggtcaacctctcaactttctgttgtctaactgtattctatttgtgcttctgccctttactgagaggctgtatttatcttctcaaaagatcttctttactgagatttgattctcaaaaacttgaggaatgtgttttcattaaggtcagttgtactttttttaaaaaaaac

SEQ ID NO: 44210 - DNA, 2021 bp, Homo sapiens
ggcttccaacaactctctcccggacaagtgtaatcacaacagttacctaacttggctcccactcttgttctcagttgcaacccattctccaagcagaaaacaaaatgcaatagctgttaccttattctcatcttcacacctctactcaagtacacaaggctcttcctcatctagtttctgtctacttcatctcttgtcaatggtccctaccccaattctccgctctagtcattctgaactttgttcaattcctggcctgtgtcctctgcctttaataggctgcctggcacactgtaggaattcactaaatatgcagactgaatgaatgaacgagtccgtggagggcagttattctttggagtaacttaagagagaaggaatacagtacaacgaagtattcttatttaggtttatagtgtcttcacctgagcccgcgggggaaccccccccccacccccggggaaccccccccacccccgccgccccccgcctgcaagttgttaccagtaaataaaagggatcctattttagcaagccacacagcattagagggcaaataatagtttggtggcaggagagcgatgagacgggaaagtgtggggcaaagcttacagtcattggtccagattctaactggcctgttagccaaaaagtaaggttttctttacctccgtgttgactctgctctccgaaggcgaagagggtcctccaaacccgtttggcgtgcggacaaaaaccccagcatatcgtgtcctcacaccggctggagcactggacgtcgccatgacagagctcaggggcgggactggaacagcagagtctcccattggtcagtcggtgatatatccggccaatggtgagcgccgttactagaagggctccaggatggaggccgacctgacttctccgcctcggtgggctgggtcggcggctggagcattacccctactgcgggtcccgctgctggcagcgctggaaactgggtggacggcatgggttggtctcaggatttgttccgcgccttgtggagatcgctgtcaagggaagtgaaggagcacgtgggcacggaccaattcgggaacaaatactactacatcccgcagtacaagaactggagaggtgaggtggcggcgtgggcagcgattgcgtggtcagtgattgcgaggtcagtaaaggagggaaaagtgagagcccctagtcaactaacgcatcatgcgacacttagggtgtcaccggagagaatttcccgagttcgttctcccctgtcgaccccttcactctggcatcggagccctacccggcccggctctgggcgccttggcccggcctcgtgcgtccgcggtccctactacccagcgccttcccccggcgtgccccgggctgcttgcgctgttaaggcgcaccaccactttcctcccagccacgcctgtagaggagcctcagttttagccctggactggcgacggaggcagggaaaagtccacggaaatctttcaccaaaggggctagaagggccaggggaggggtttttcgtacgctgttccccgccttgtgacccagagctgagtggtgtaattgaagaggagtatcttcagcgcctcggctgtcttctttcttggtgtttacccttttcggtggcaccctggctccggcgctggccccatgcgccttccttactaccaagacttgtcagaagtaggtccatatccccacaaggctcgctgattcctttctcgggagttgacattccaagaccccgttgagctcaatttaagaaacgtggcaataatcatggtgttactgtgtaggattcgtgccaagtagttgagcgggttgtttggggagtaaggaggcgttgctgtccattgaaatcacactgtgtagccgccgtcgtaacctcttctgtgttgttccatcgccgcatgcagaaaatgtcaggttttgggcgaagaggcgtgggttagaatctcagctttgacacctgatagctcgggaatcacggaaaaagtacttgtcctctc

SEQ ID NO: 44211 - DNA, 2502 bp, Homo sapiens
ataataaaatttttttagttcattgacatacgggagacaagttggctcactgactgacttacacagcgtatccgttcctagattttcaatttttatactaaaaatgttgccactcatttatttactggattaggtacaccactacaaaatcaaacagctcatcttactctttataaaggtttttttgggtccatcatacaatttgtgtcctttacttaaaaaattagaagacataaccaaacaaattatagtaattcacccacagtcccattaccccaagaaaactgtgactagttttaattatatcttccccacgattttcaactgaacacacatgaaagtgcctaatacgttaaatatcttagctcctggacttcatacgacctcacccatacagttagaattaggtactactgagatcgatctgccttcaccttctccagcccagtagcgaataaacaatgtaagtttcagaaataagcaaaagaactttgcagtaaaagagccatggtccacaggccacacatctccctgcaactcaacttcggacccaaacgctcgcgcctccacactttcaggaataaatcctactcttccgcccaaaacggatcgaccaggctcgatctcccaaccagacccgcgtggcccctgcggctgcaacgggtagcacttgacggccgtccgcacttcctcctttgtctttcccttattccttacgtttctcccttgctcactcttccctccttaccctatcggggctgcagacccacggaggccacgttcactcctgcccgtcggccttggcaagcgcgggccccttgtcgcgcagagcggagggtcctgggagatcctgggttggcccagccacaccttgcgccgccgccgtttctgctggacaccaggagaaaaccacggcagctgcagccaccaacttcccctacatagccccacgggatcggatcccactccccactcaccgccagaccggaagcaggaaggcggaagtcgcggcctttgcgtcccgcccacaggcgacccgagccgccagccgggcgtgagtaagtctagggcccagtttccggctgcgccattgctgtgtgggtcttgggacctcgagttggaggacgcgggagggtgggggcgggggcagggcagcgctgagatttccggggagcggcaggtgaggccgcgcggggcgggtgacggcacccgggcgggctcctttccaggctggagcccgagactgccacgtcctgcggggaccaagtggtgggcgaggaggcgtggagcggcttcaggactcgaggagcggttccgaagcagctagggacttttgcctttgccccccgaggtcgatcggaagacaacccccatcccctgctgtagcgggacagttggagggtcatgggtgggtgaagtgtttggctgagggaaactcagaccaaagagcagcggcaagaaagcagttgggtccccacaaaacgcccgaagtcaaggtgagggtcacacaacgactcttgacgattccggcgagttcatcctggtgcacatcccactccatgcctctctcttctggttggacaatagttacatccttacgaaaaggaggcaagctactgggccttggtggatccactcaaccttgttaccaagggacatgccgccatgctatgtgaaaaggggggttttgttgtttgtttttaatttaagtatctaattcgtttcacgaaagaatgatcaataccggcccagagtaaacttgataagtaattaaactgtcagggcatagagttcccatagaggtgcttgttctttcaatacacaaataaagggatgcaaaagtcaacatgcagaaagggtgagttaatattgtcttctaatctacaggaactgaaagattagctaatctggtttggttggtgaccaaattttgtgattgcttgcactgtttgactacctctgacaaatgttgcaagacctcttcactgattctccaaagactatagaatgttctctttcaggagcaagctgcgacatgtttaactagtttaggtaaaacaacaataactgttatttaccagggaacaggcttttggcagataatctaacgatctacgatactgttcgttgggcatatgttaatgtttgtaatgttgtattaccagcagttgttttcttactcctttttatttgaaaacctggatgatagtttcaaagcctatgctgcttaggcctagcctgtaccttagtagccagaaaaagtagactcagtcactggattgtgtgcactgaatacttacttgagataactgatttttctaaaacttccccaagtcttgaatccaagatgtgggcagaatgtattattttaacatccttcgttccagaggccaatgcgtgttttattttaatcatgataggtggttttcccagttactgcctccggatacttgcagtgctgcatccctagttaaaagcccagaagtcttgggcaggaaggaa

SEQ ID NO: 44212 - DNA, 1902 bp, Homo sapiens
tttaattgatatcctttcagtctttttttctatatgtgtgtatcacctggaactatacatatatattcataaaatataatcatattgtccatgctattttaaaactttcttcacttaacaatatattgtttatatttttccacatcattaaagtttcttctacagtctacagcacgattttaatgatggcttgttttcccatcatctatgtggccaaccttttatgctgcacattttggctgttcccagtttcccctttgtagtattgacaggcttttggagaataatgaaacgctgaaatgtttggcttggtttccctcttgggtagagtctgctgctcagtcttttcttctgcctctttgtatcctttagcttttgggtggaggcccagagagctccacaaggggtgatgtgtgtttaagaaactcagctaaaggaaacaaactgattgcaaagaactctgaacctagggtgttgggggaaatgctgagcattgtaattggcctaatgctgctcctgtgagagatgccatctccctaggcctccaaagttctggcagggattttaactcttctcatccagctgatgacagacaaatattcatcacttcaacagttaggtgcaacccccaaaatgtttcctcaagtccttcctcactgcaaatgcctaccagctcatctctgaagatggaaaagcaagcgtggtgacatctgcaaatctggacagtgggctttaggattcatctgaaaagaaaggctcttggacagtgctggaccttgctccctgagccaggctgtgggtccagtggtgactcaggaaggaatgccactgacaagccacaggcatgccagagaattactcagcacaagccaacaagtaacctcatacgagaatcaaacgccagccaatctgcgaacgctttgcgtaacagcatatttggatttggggcttagctttcaggcttgagtttcacgtttgcctgagcatactcccagcctcccagggccccttctgtgtgccctgcctctgattgcaagtgcagagagcagttctcccaagagccagggctcagctcacccctgcaggtaacgcagacctctgctagggatcagctgtctatcatctggtggcgcccctctttccagccagcgctacatcttcatatgccttttcttaccaacaggtcagcaatgtgggtgacagatacttctttttgctgttggaacacttcatattcatctctggtattgtcatggcctttgacataccttaccaacaagagaggtttgttgactgatgacagcaggtataacaaaatctaactagtgacagttgtaagaattggcaaagtattactgcatcaacaggtatgtggactgtctaagagcctcagaaaggacaaagaaagaagcttacagattccgatgccccttactactgtatctggcctttctcctgccggtatagtgagagttgacagtttgatggatttaatttaggatctatgttaggatgagatgcactctgttttcctaaacaaatttgctgcagaatggcagccacagtctagggcctccttgagcttgaggctaaatgacctgatggcccacccacttcatctatactgcctttaatatgtcagcatttcctcaaggcctgggtttcgtgcactcagggtgatattgaacatgaagttttcaaacagcaataccttgggtaacagacaagggctagttaatgatctcattcataattcatcccgtgaaggaaccatttacactcaaactccaagcaggaagaaaatattcccattaggtagggctttttaaatgcctctgcctttgccacagtgctgagagagaactgtggtcttcagtagtaagggcatatggctgcaaacag

SEQ ID NO: 44213 - DNA, 509 bp, Homo sapiens
ctctcttatgtgggtatgtgacacaccagtaaatagggtgcatgtgaccctggcagggtgagctaagaaagttggattccttgaaggaaataactttctgtgatatcatgactggcgggggactgctggtgggggatgactggcagaggatgtgcaggtgcagctggatggaagcccttggcattggggctcctgtcatgcatccaaatccccagtgcccctattcctccacccaggtcattcctgctcatgatatcagtactctgactcacaagtagcctgcagcagctgaaaggaaatgatgtggcaactgtgtctgaagtctggttaaatgctggagacagaaaagaaaatccatttgaaaatatgttgctgtattttacaaaaaggctgtgcaagatttaaaaagtatgtttagcattccaagtattttcccttctgtgtcttcagagaccatctctgagagtgatgttttgtttatttaacatttaatcaaaagagatgtggac

SEQ ID NO: 44214 - DNA, 1328 bp, Homo sapiens
ctggctaggactccactgcccttctcaaataaattcctttgccattcatctgtccatcaacctatctatgcatctgactgcagtgggctgggtgctagatgtggtgctcaggtgggtgttgggtggggttttctcacttccttcagttcatcagtttagctactgggagtactatttatgaagtgggccagggagcctagctcctgaccacactagtgatgtggtgtgatgtgatatgagtcactgcatatgggaagcagtagactttctgtactttgatttcctaccattgcctaatggtaaacactggaggcggctctatccctgatttggtccctggggtagaagcctgctggaaaagggtaatcataagtaattcagtaatgatttctatgaacaccaggaaaaacactataattactcaaaaaaatgagagatggcagaagcactagccaaagatgacacaccatcactcacttctcccttggctcctgggtgtagctaacctctggggagacagaaaccttgcaggacaatgctgggcattcagggactacagaaatggacaaggcatatacccaactgtcagagaatttctaaccagggaagagaggaagaggaaaagagagagagagagagaaagagaaaggacaatggcttaggcaagtgtaaacataactctgatgctaggcagaatggtataaatgtcacaagaacgatccaaagtgttaaaggggcttgaggagagagagatcacacagccaggtgggttttcccagaggaagtggcatttgagcaaatccttgtaggaagggtaggaatttgacaagttgcaagggaagggagagacatttcaggcagcaggaacatcttgagcaaatgtgtggggtggagaagtcctgttgggacataacagaattcctgctggggaactgggaaacgttctgttgggttttagtgggaggcaaggctgaaaagttgggtttggtcaagatcagatctgagtttggatttctcccagtaggcagcagagagccatttacagggacttaagcaggagggtgacacaatccgaaatgtactttaggaagcacagcagctgggtggaggatgatttggaggaggaaaggctatacagacacaccagggaggaggctcctgcagagtgaagaggaggaataattgactgtgagcagccagaggggctgggatagacaatacaagtcaactgtgggagttacaggaaagaggcaaaggcagaggaaaaagcttggggccctgggaacaggtggcaacagtatcaaaaatataacgaaagaagagaacct

SEQ ID NO: 44215 - DNA, 2770 bp, Homo sapiens
ctacttccctgttcaatgtgaattaatctcttctactaacaacccctatgaccctgaatgagtcatttatcctgtctgggggcaccagttttgtcatcgctgactttccagttcagtgattctatgtgtttatgtgtgaaaatgcttgctaatctacacattatacaagcctaagtcgtatcatgaacttctgaagagaatagagcccaacttgtgttttacttttaaacttactgtcttctatacctatgttttacacaattataagattattcttatttttaaagagatctagaaatgaaacccctgaaagagacttctccctctacttgcccataaagatcctccagttttccgcacaggctttttcctagacatggaggaagtgcccagaaaaatactggacggatatacaaaaacataatgccacaaaaattttcctaacaagtaaggcagctgcggaaagtcggccagcgtcccgaccccagggacctgcagcctgggacttgtgaaggcccactgtgtagctcgaggtttccagggcctcggccccgaatgggcgattttctttaaaacgccgaagcgcgctatccctttaaatccaggctgcaaggcaggcgggtggggagcagccaataaccttaaaagatgcgaaagtgtcaaaggagatacagtttatctccaacaatgggagcggatcagcaccactgtttacagtaaaaacagaaggtggggctgggaggaagcctgtctccgacgcggtaattaagtctgcggcttggaagcagatttgaccgagctctgtggagcgcgaacaatgtccgcagggctccaggttcagagagggactcgcttctccgccttcgcccgcgtccaggcaccagcgagctgcactctgcactcgctctccctggtccacccctacactgcccggacccgaggggactggccctgcgggcgccgccaaggcgactgagagcgcggcgcgcgtcccgagcgcctggactccgcgcagccgggcgccgcgcacccgggtgccggggtgggagccgggccgcagacccaagtgcgcccgaagccgccgtccgccgcctggcacgccgtctgccgcctgctgggcgatgtgtgcgcgagcccgtggggcttgcgcgcgccctgcggcgtgtgtactcacaaaggtgtgtctgctaaccccacagcccgggctgcgttccaccccgagctggagaaaccccggcctggagcggggccttgtccgcgcggccgcgggggcgacaagggcggccggagctcctcgacttctagcgggcgggtcggtttcctggcccgaggggctgaggcagcgagggcgggacggtggcagccggcaccggacgcgggtcgcgcggctgctgggcacgttccgagcgctctgcgtgttttcgggcacagccctgcagccgagacagaacggacgcggggctcggggatgggcgcactgcagccacgcggggttagcagagcgggcgcgctccttccacaccaggtctgcaaaagtgaagtggaaagccgccgccgaacgcagccatcctcccccttccccgctgcagcttcggcgggtggtggggagagctcccctggaccggctggaggggaagctggcaggcgctcgggtttggccgcgcctcctccgccttcctctccacccgcgtcccccggggtccatgccgcatttctttgttttgaaagcgcctcctccgcccagaggcttttcccccgaagggcagggggacggggggggtggggcatcggcccgtgggccccgccctccatttagctcagaaccctccccttcgctcaccccctcttctcccctttcctcccccgctgcgacccacgaggcgcatcctcacttctcggacttcaaagagaagctgagaactggagggggaagtggggtaggcagggggcgcagagacccacccacctcaggcccggcccggcggcccgccccctcccacgggaaccccgcctgaccccgccctcccccgcgtcacagcagcctgacattctcacaacccaccgggcaccaaaacggcccgcccccgccacccccgtgtccgccaagcgctctatttatgtttcagcccagcgatttgcataggccccgcccccggccctaggttccccctatcagagccccgccccagcttctgcgtcacagcggaggccccacctcttgtgcccatacaaggagcggcgggccctagatggcatcgtggcgtcgcgacggcgtgtgcgtgtcgcgcttcctagtgccgtttatagggtcccggcacttccgctgtcgggttagaagcggcgcggtcatggcggagcgcggacagcagcctcctcccgcgaaacggctttgctgccggccgggcggcggcggcggcggcgggggcagcagcggcggcggcggcggcgcgggtggcggctacagctctgcctgtcggccaggcccgcgggcgggtggcgcggcggcggcggcggcgtgcgggggcggcgcggcgctggggttgctgccgccgggcaagacccagagccccgagtcgctgctggacatcgcggcgcgcagggtggcggagaagtggccgttccagcgcgtggaggagcgctttgagcgcatcccggagccggtgcagcgccgcatagtctattggtccttcccccgcagcgagcgggagatctgcatgtactcgtccttcaacaccggcggcggcgccgcgggcggccccggcgacgacag

SEQ ID NO: 44216 - DNA, 1834 bp, Homo sapiens
tcttccccggccgcaacctcggcggccgcaacctcggccgccgccgccgctgccgccgccgccgccgccgccgccgccgccgcgggggccggggccccgtcggtgggggctgccggggcggcggacggcggcgacgagacgcggctgcctttccgccggggcatcgcgctgttggaaagcggctgcgtagacaacgtcctgcaagtcggtgagtcacggggcagccgcgagccgtctgtccgtccgtcagtccctgggtggggggggggtgcccgcctttctcctgcggacagcccctagttccgcgcgcgcccgcacccctgcgggtgtcctcactggcccggacggtcctcctgagcggagcgcccatttcctccctcccttccctgccccccgtcgccccggacgggccagcgcgagtgggaaatgaatcagcaggacgcgcccctccgtgggctccgcgcccccggcccgcgctcccctacccgccctcctccggggagcacatcctggagggctgttcgccggtttcgggggtggatgtggacaaaggcgcgggcggacggccggcctccggcgagggtgtgtgtggcggggctgtgcggggcgggggagggggcgcgggccgcagacaatgccggccgcggcccggccgctcggcgctccccccctctcccactgcctgtcgctcgctcctttttctttctggcccccgccccacgcgatttgaggggaggggaatacacttaaagccgctcggccgccgctcctcccagggctccgacgggcgagcggccgcggcgctcccgggtcgctgtggcgtctggcccgggcgagctccactggccgcccggggtttaaatgtcgttttctttgcgcctcctcagtctccaagcggcgcagaggagaggtggcggcggaccggactccgtctccggagggacatctcgcccgtaggacgcttactaattaaagggcgcgagcctgaggaggagctgctagcgcttcccttttctctgaagctgcctccagacacccctgtgcgggccgcggcgcagcccttgtgccccgccgcccgagttttgtttgcgctgtgtggtcaggtcgtggtgccccgggcgagccgcggtcggcagttgcggatttgccgctcgcagccaaaggggcgagcgggctgcaggagcgcgaggcagagggctcggcggccgctcccgcgtccccgcggcgcggcagcccggcacgacccagcactttgttctcattttcaggtttttttgtgcccctttcagttttctgtcaccctccgaaaaggagaaaccaaacaaaagagtctctttcttttcagggcttgtaaagtagaatatatttgacaaaggcgagagaaggacttgtgatttagagctgcacagccttcctttctctgacagatcctgagagttttctcaaataccttagtttaaaagtgtctcctgttccccctcccctaaaatgttctttttcccctgtccagatctttttcagccatagcgatgggaatgtttgagccagactgaaaagaacaatgctgtagtgaaacttcccatttttttctcctgattgcaaatggcatattttctgaccccctcccatgttagtgtacttgaaattgtagcatggtgaacccggcaccgaatgaatggggatagatttggacgcatctctatctctttgattgttaacttaatcctttttctctttctgtagtcagttccttttatccttcttttctttggaagtggggtgggggtctggatagggtccccaagaaagaattaagatttgttttaatcctgtc

SEQ ID NO: 44217 - DNA, 568 bp, Homo sapiens
tttcattaaaattttttgtagtttatattttagatgtgttagacaacaattagtgatataatagctagtaactatgagtttattcaaaatttactgttatgtaattgggtatgaatttgtttcagtagctcatagctactccgtgtggcattttgctgagtgaattgtacccatccctaaattaccaagttacgcaaagaggagctgaccttgaacaacatctggcagtattacgtgttgtgcaagaacaggaaagacaaataccaagctctgtgcaacatttatggtggcatcaccattggctaggccatcatcttctgtcagactcattgaaatgccaagtggttgatcatggagatgatgcaggctggccaccaggtgtctttgttaagtggagagctgaccatggagcagtgagtttccatcatttggaagtttcaggatgagaagtttctcataccaacaaatgtttgcactggagggattgatgtgaagcaagtcaccattgttgtgaacttggatctccctgtaaaccaagcagaggagccagactatgagacctacctct

SEQ ID NO: 44218 - DNA, 1974 bp, Homo sapiens
gagattttgtcactgtgtacccttttgttttggaccatttgaagctattgtctcttgacaataatttcaagaagataaattatgaaggagggggtctaaaaaagctttaaaatacgttgttttaataaaatgttttaatttctttgcttgaaaattaacattgctttaagggggaaacagcagtttagggggagcaagtgcatttaattaaattgcctcttcagcagtattaaaaatcagtcagttgtaaattggtgaggaatatattaaaaccctatgggagaccaagttctgaagtttgcttcgaagttcgaccaggaaaagaaggggttaaaggtgtgatgcaggtaaaggaagggttaagggcattatgcaagctgttaaataaaaaggaagtgcattacaaaatgctgagctcaggagtctggctgccagccaaacctttgctttcctcactacagctgagggctttcgaagcttcccaccagtgggtttgtctgaactgtttaggaatgcggccgcggtcgccagctgacgtcagcgccgccggttcagccgcaggccagagtcagagactgacagcgcgaggggcggggttgggagtcaggatggggcgaggcctgcgtgtgactgatggcgcgggggcggggcggcgtgtgtgtgactgacccgaccgcgcagaggcggggtggcacaagatttgcgtttccttgatgacttctaaattatgattatagattttctttgtaatgaggggaaaggtttttttttttttttttttttttcccgtttttgaaatccaggcctctgtattgcttcactttaggtattaagtataagcacaaaattaaatgtaacacataccaaattgtccaacttcaaaggccattttgtttttgtttttgtttctgagaacgagggggccacagtaaaaactttggtgatttttaccagtggaggggctagggaggtgatttttgctgtttaaggaggttctcaaatttacttacctgcagtccattttcatttcagaattgctaccagaaagaaattgtaaaagttttcaagcatgattttgtaaagcaaaagatcaaaaaaggagagaaattatgtggaaaattggcaagattaattatatctctattaagaccacctttgcgcaagatagttttgggttattactgctgattttcagcctttaaagaaaaatgtgggttcttggtagcaacttacaaggatggtgtttagagctatagttcccccttctccaccataccctgttttcttgatggttaattttacttttaaaaacatttgtatttcttgactatttattaattagatcattttgcttagtcatacctaagagttttgttagtcttcggtttcttagttgtatgagtcagagtcaggaatgcaaatttattagctttttgtggagagggatatgtgggatggtgagagctgcgggtgggtaagcatggagtgcaataccagttcatagacaaggatctaaaaggagccattaagctccatggaaaacattgttacttgatcaggccagtaaaggaagactattttgagtagctactgaagttatctgatagttaatttaattgatttgagtaactctttcagggaccccagatttgtaaaagtggcactgttgtgacttttgataaagggagttttagcctttcatgagaggaagccttggacttatttgtccttcatgttgagaagcttccgtatgatcttcatggtttccttaggcacaatcactgtgatttcacctatgtatagcagcccaactaaggtgaagtcagcatatagaccaggaagatacaaaactacgaaaactcaggaccagccttggcaaaaggcaacatgtgtagccctaaattaccccggtactctagtgctcagccccacattgacaattgcacagaatttaagtgttctgagtttgtgaat

SEQ ID NO: 44219 - DNA, 616 bp, Homo sapiens
ggaagagctgccaagtggtatgggaggcagaggaatagttgtgccagcttctggaggtccagtgagagtttcacggtgcagatgcagtgtgtgtgggcaagactttggagtcctaaaaactgctcttgggatttcattaaaacttgggaggttggggaagctgaaatgccctatttctcaaaccccagctccacttcttggggctgctcagtgggcgggcctcatccccatgtctccattctgtttaccccacatgcattcctgttgtttggttagagctgctgcctggcagagaagcttgggaagctttgctctgtcttctaagaaacaggaagtcattatttgcccaaagcaaacaaactcacaaactgcagggttcatgttcagtccaaagctggagtcccaggaggtgagcgtgtgggccaaggatgtggggatctgagcaaagaatcctttcccttcccctcctcccctggccaaatcaacaactgccatcttttcatagtagtgatttgcaggaaacctgagctaagtaatccacacacaatgtatagatgctgagctgcactttcttccccagacagcatccattcccaagtgaggcttttcttcccat

SEQ ID NO: 44220 - DNA, 1076 bp, Homo sapiens
tgttttttccctcctctctgaagccctgtaattacagcaggcaggtggagcatctggggtgtgggggagtccactgtgtttttaccttcccaggaacgcgacttgcctaccgcatcaatatattttatttttaattaagcgcttattgcaaaatcggagtccctgcacgaaagcctgattcaaaacttttttttcctgtcgttctctgagatgtcgctgctattactgtctcaaatttccttttaaattttgctgtttgagtaaattagtgctggcctttcctgagctccgcagctccgaggtggcccgactgccgggcctccaccccttttccccggtcccgggtcggtttctccgggcgcaaccagcagcgccacaagccggttgggtcccctggctccctctccaaggccagcgcggtcatgcgggcgggcgggcggtgttccccagagaccgcccatcccgcggtgggggtggtggaaccgcagaggccaccggatacagcgacctcaggcctggcagcgcccatggcgggccctgtggcccgggtactgcgaatcgccggggcttggcggcctctggaacaggggcctccgcctcgaggaggcggcgggacctgaggggccgtggtcgctgcactttgtccgagacccctagattggccaataggagaccggaaaggtgcagggagggccagtggggccgatgggccggggccccggacaggctggcgcggggttcgggggttctctcctgtctctgacgcctgcccccgaggaggcagagctgggcagccctgggcctccgccgagcccagctttcctaagccgggaagtcgggggttcctgggccgggtgggaactgtcgtccctggaggaccccgcccctgagatccccgccccacatccgggtagcgtgggggcacctggggttcccgagatgagaaccggtgctctgggggcgacaggcttcggcgggatccctgcaagccggcggcccaggcgggtgaaccccccggattccagcaggaacaatcccagtcccccgctccgggaaccaggcactcgatgcaaatg

SEQ ID NO: 44221 - DNA, 664 bp, Homo sapiens
cttaaactgtggtgcagggcaggcgcacattagatgataaatagctttatgtaagatttcaaatttgttaaatctgcattgaagaactacatttgaaattggttggaaggttgggtgaattctctaggtaaaaatgacatttgttttacggatccctctgaaacaattccccaagagttttcatttgaataaatcacatctaagttcagcactccagaaacagctagcatgggagagttgcctttgcttttctgtttcctcttttctgggaaaagagtcaatttcctcatctgtaaagggagtgagactagataacctggaggtcaaagtacttacagcctttcacttattaattcattcacttaacgcttatttactgagcaggggtgggcatgttctggcactaacggaacagcaacatacaaaacgtagtccttgttctggtggagatgacatcctacaaggagaaagacaataaacagatgagataatttcttgaataatttactgctacgaacgcagtaaagagtattgtgttgagaagttgtgggtggatgggtggtgccagcaactttctctgagaaagagtcatttcagctgaaaagaagccaggagtgaacatctagaggaagagtattccagagagaggaacagccaggatgag

SEQ ID NO: 44222 - DNA, 483 bp, Homo sapiens
ttgtgttttaacaacattccaggtgatttttatgcacattaaagtatgagaaccactggcttgaagttaattaggcttcatgtgggcaaagctctgaaaaagtcttctttcaaatcctaataatattaccaactgagttctgtcagctgcccagtgataaccctggtttaatcttcaaaatcacacaagcatctccaaccaagttatttatgcaaagttccaactcagagagaaaaatagcaaattctcagtgatactcaaaagggaaaatatttggacaggtaattttaggaatgggctatggatcactatgtacaataatgaagttgagcaattaggtttggaaagccacagcacagaaaataattaacccacaaagtaatcatcttggaagtcccaaagctaatgattaaaataaacctgaaacaaatgattgtttaacttttaagctgtgcttgttttagccacagtgtacttcaggtg

SEQ ID NO: 44223 - DNA, 998 bp, Homo sapiens
tgtgaaagcagctgtgatataaggacaacctcaccaatactgcctgtgatggttagtttccaaagatggtcccctcaatggttcatgcttcaccttaatcatgctttatgtactcgctttttcttgattctgccaggttctgtgacttgtggttgaccagtgaaatggggcagaagtgacattgtatgacttctaaagcttgcacataagaagtccttgtaacactcacttttgggacactaccctaggaacccagccaccacatagtgaaaagcccagcccatgcagagatgacacacccaggtgctccagtcaacagccccaggtgacagccagcatcgattagcagccttgtgaatgagtcatcttggactttcagcccaactgaaccttcagatgactccaaccccagccaccatctgcccacaacagggtgagacagcctgagtgaacactgctcagctgagccatggaactgtcagaaaaattaatacagtaagtctctaagctttgacatagtttattagatcgccatagataaccaaaccaccactctcaacatttgagtagatgctgctctagaaagcatagtctagcctccttggaacagctgttgcagacaggaatctctaaacaaggtttccttggtgccttttggagaggtcttccgtgttgtttctcctagccccggacttccttactcacttgcttcagaaaaggcgaatctcctgtctatgggaaggcagcatagtggtggtcgggaggtagtgaaagtaaagtgggaaataagtggcaactttctcaggtaaatccctaatgggccccattttcagctaatgtgtacaaactcaaatgcccacaagggctagacaggcaaggcgacagaatgacgacagcacgaggcactcgggagtagtgaagactgtgttgaatcagtgagcacgagactgtctacaaggggcagctgctatggccccaggtggccattgtggccacta

SEQ ID NO: 44224 - DNA, 404 bp, Homo sapiens
ggaataaagcaggatggaatgtagagagctgatgtagttcagagaagttaagtgtgagctggcaagagctggcttacctggtggttatgaagaagccatctggagaaaggagggctggtagaggtgacaagtgacatccaggagagagtagtacaacatgtgagcaagactgaggaattcccagaaattacttggcaaggagaatccagtagatgaatgaaattccaatggcctgtggagtgagggctcagactttattagctacatattaaatgagctaatccatgagtaacagagactggaacattcagcaaatatttcatgaactcctcaacatttcctagcacctgtgcagactagggccatgtgactaatactactgcgtaggcagtgggaggaagtga

SEQ ID NO: 44225 - DNA, 728 bp, Homo sapiens
tttccatctaaaatcattcaaaatatactccaaggatagagaagaaccattttgtttagaaagtcaatctttttaattctgctttttttttttttttctgggtagactaaacaaataagtcaccagaggcactgtgcatttttttctattcctttctcttgggatgaaatatgaaataatctacaaagtaatttgatccagcaattaaaaacaaggacatgaattacactaacaactgtcacatagaaagaattaattccctcataacactgcttgatgttacagacccagggtgattacaaacagattataattggaaaagagccaaaccaattcaggtatctccaaaacacaggcgtaagcctcaactcgcaaatagagaacattttttactacccacaggagtatctttttgcaactggtgctcggatgtttacctagcgattactcaaggcacccagtgatgcagccgtccaaggtactgtatgtggcaatgccactgatccttgctggaaagcataacagcttctggaggctgtgtttctagaaatgatgtcctctgagtgcggactgctggctggttgtgtttagttgtacagtatgtcattctaaataatggacattagctggtggttgtgtcattggacaaaggaggtagaagatactgatgcctgatgattattggtagaaatttcattttcttaatggcatgcaggtttcatggcccc

SEQ ID NO: 44226 - DNA, 2135 bp, Homo sapiens
acaggccaaggcaagtaagtcttgaaccctcagcagaaacagggcaccagcatcggatgcctcataacctgaacagttaaggacgccccaccacagagcttctttctgagtgtgataaactataaggcaagactgtaaaggggtggatcttcatttcgatttagggtaggtgacacctcaagggtgtttcttcccttccagcgtaactggatgggaaacctacaccaagtgtgcttgggagggctgcttgggtcagctacctgtaagtggaaatagggggtgccaccttccgatgaaaacccggatcccgtactgtcaacggagggcccttgaattcacatccctcagcccgctagaaagcccctgaaaccacgtggcctttaacccattccggcaacagcgccaattcccggaagcgagagggcaagaaagctcggcgcgacgcttcccgcgtcttctaggccgcgcgctgaaatcaaacgcgacgccggctagctgtgggccgggccgagcgctcaacgctccagcggctgggtaagccgcggccgccgcccaccccgctgcagagctgggcggggccgcctggaggcagcggggagaggccagccgaaaaggaagaagagacgccggaggcgcgctctgcgcaggcgcgcggcgccccgcctccccagcgtcggctccccggcgggcggtgcgggccctcccactctaccccgcgccgtctcacggccccggccctagcttcaccccgactacccggcgtgcgcgtcctcctgccggcctgcaggcccggggcctccgcctgcttccccacagctgctccttgcggccccgcttgcgttcacgctgtcgcccgggccggcgcggccgcgggcaaccgctccccctcccacacctaccccgccccctccccgccttttccgccctccggtccccctccctcggcccgctgctgctgctccagatgaggtgatggcaacggccaacttcggcaagatccagatcgggatttacgtggagatcaagcgcagcgatggtgagccgcgctgccagccccgctggcccgctcggccccgtgttcgggtgtgcacggaggggacgcgggcgccggccgcctcattgattgcttcgccgggctgtgggggtgggaaggcggcggccgcggcgcttttgtgtgtggcgtgtgtgccagtgaggccggcttggggtccgcccgggcgctgctgcagttctccggatcgggccgcgggggagggaagccgggtggggaaagggcccgggtgtcgagggtcgcgtctccgggggtctctgggcgagggccgctcgctcctcctcccgcaatctccagcccccccccggggacaccagcccgggagggagcgggcttcgttagggatgaccctgcctcgcgcttccccttggtctttgcattttaccggcttggcctctgacggggatggggatgggggtgggggagcgggaagaccagcgatttcacatttagagaaccgactgctggtcggaggccgagatggggggaaagagccagttccgtcgccttaaactgccgtctggttgtcaggcctccccggtttcgtcgtcgaccatgctgctttcttttttgccacttcttgggagaaaaatgtggagaatatcgcgctgagccatgaataagggtgggggagcaatgggaagaaatattcgatgggcttctccaaggtgatgagactgtaaagggaatgataggggatgggcagagtcaatgcgaggcactgctgagagagtgggggtgggcgaccggatgttgatattttcacaccctcgggagaggtaactgagaaaagtgtaaggcgaggtgaagacacatgcttcatttttttttttaagagccttaggcttatgtatctttctctaggtttctcttggggaaaatggtttatgacactagcttggggtgtggagtgagatacgccagccagactggaaataattcatattgtaaaggaataaatgcacggagggagataagtaaaattattttctttcggtaccaatattgaaagaacgagagatgtgtgataatctcgagttgagcagtgttcctgactccatctctcataccgattccttttttt

SEQ ID NO: 44227 - DNA, 1555 bp, Homo sapiens
tgtttttctggggaacaaactttctaatgtgtagtttagacataaatagatggagtacataaaaactaagtgatcaaaaaggtgattagaaatagaagaataattatcttgaacaaatacaaaggtccagctataaagtagataatccacaaaaagacacagaattgggaaccaggagaaactcagacccacaaaatgaagcttatcatgcagaagacagcccaagaatcctagacaattatttgattcattcaacaaatatttacagagcatctaatttacggcaggcagactttctgcgcttatgtattcataggaataaaattaataaaccaacaactctctccctttcctcttccacacccaccttatcgataatgctgttaataatgagaggatttttcaaaatgtgctgcccaatccccgtgttgaacatgagtcctgtaagaaaatacgaaacagcattaattttcctactgagattagatattaggcagtaccagagaagaaagctgcatgggtatggggaagatttctgcgccaaccagggccacgaaacgtcacgccaggactgacaaactctttataagttcatcctccagctggaaaggaagtcagcggcgacgcgcagggcctgcggccgagtcggggacccacccctgccttccgcgctcacgggagcgcgtcctgaccggcctctgccgatcaggtcttggtccgcaccccaggctaggtcctgccggaagacctgacccgaccgaccccagcttcctcgcggggatccgcacctccagcgctcttcagctcccggcgctgctcctgccgcccgcggcggcggccgatggcccccgacttgaccttcggcatctcggcagaaagcgggcccacaggcccgggacgtcaaggaggaccaaagagggctagcgtgagaaagccaccacgtggggatcgccgccacgcgccgcccgcaccactctggcccaagcgccggaggggcaagggtccgccccctcccgtacgctctgagctcctcctccagaaaaagggcggaccttggagcccactgactgccgggaattggagtcacagagggaggaaggccgaaccgcgggagcctacagatcccagaagacaccgcgctaccgaggactgcagtctggagttggagcccttgtcccaaccagggctggataagaaggtgttggtgtggtgctctcggtgttgcgaaggctgtttaagttatatgatgaggttaagcctatggatgttttagtagcctaggttctgggatcgctgaggtccaaagaagtattcacgtgcctcgctcctgttttcctgaagcttgtgggggtgggaaacccgggatttggggatgagcttgctcttttgtgggaatgcattttttgctgcttgccctggggaaaagaactgcgagaatggaattaacgtctggtttcgctagggctactggttgcttctactaagaatagaagagccgggcgcggaggctcacgcctgtaatcccagcactctgggaggcagaggcgggcggatc

SEQ ID NO: 44228 - DNA, 944 bp, Homo sapiens
tgattgaagcttcaatcaacgcaggaaacaattgagctccctgggagtcggagaaaccagacctatggtttccatggtgacagatccggctagtccggactcctggctctttatactgcgcaagcgcactgcgcaagcgcacacaactgatttggataccccgcgccttttggttcaaagacaaagcccctccttccccttcccgccgttcgcctatcgccttctctctctgccggtcgcatgcgcgctggtctcctgtgacgtagttttcgcgcgtccgcgtcgtttggagctgcgacgccaaacatggcgtgttcctagaagccgctttcggcatcagtaggcggcggcgtggggtctggcagcgtggggagagggaccaaccgacgccacttcgtgttgggaagtgggagcgggagggccgggcaattcccgaccgaaccaaacggtgaggccccggcccgagagccaccgagcgcgcgggagtggaagggagtgggttgggcacccgagtcccgagaggcgggaggaaagtggggctaccaggagatgagggataacggtagcgaggcaagggcggcctgcagacttggctgtttgcgcaaccttaggaacccggggaactgggggctggccgaggcagcccgggagtgggcagcatggtagtggagcaatcagggtgcggggtgggagggaccgtatgctaggctgagcagaggcgagtgtacccatcgtgaccgcggttgcggacctgggtgatgcatttgcccttgggggataggtggtgcaaattttgagataaagtggttatctcgagtataagaccgttgtgcattgttactgcgcacgcgaccttgttgctaatagcaatagtgtgatagctttaaacattagacccttacatgcttttaatgaaaaagtgaaggtagttgtccgtttataga

SEQ ID NO: 44229 - DNA, 611 bp, Homo sapiens
acctgacccaacagatgccctgtggtcaactcagacttctcattcataccctcagctctttaaaccccgcatcctcaaactctaccagctttgcaagcttccaagcctgaattgcctgactcaatttctccatatgtatatctgcttagggtgtaaaatatagcaactaaaaatgatagaagtgtacagatcggggctgttacaaatctagggcattcaactgcagttggacctcactgccattgagcaatctttttgtctttggtcaaggccctctattacaaacattgaccacttggctccaactgcttactcacccacgtgcctaatacataacctcaccttctaattcacagagggaggaaaattcaaaatgcaggaacttctgcttcccactgtgtgcctccaagggagtgtgtacatctgtgtcctgctgcctcatgtacgaagatatccttgtgtttagccctgcctctgttatgatcccacttcatcccatctctgggatcctgctccttcagccacccctttggcacctgtactttcagctgttcagcctctactggtccatttccctcagccaaaaaacaccccttcaaccctgcactccc

SEQ ID NO: 44230 - DNA, 1025 bp, Homo sapiens
acatattttccctaagtgaggaagttgaaacagggggatagagactgagatttaagagttccatccatatccacccctggcttgcgaggtcaccttgcatagacaggctttattttctcaaagcctcttttcccttgacagctcagtactatggagatcataattgtttgcacagtgttttgaaatctttagaagcaagctgctgtatgtgtgaaatgttattcaaaagacaaaatatttgagacgggtgttggttttacttttcctaaggcaagtacctgttatttttctcagtgagcacaaccagacaatacagactgtcaaatatttatcatacaaatttcttgtgctgtgatttggatcctgagagaggatttttgattatttataattgcttacttttagcaggtgacctgatttttttctttttcttttataattgtctgataagtactgcttaaaaaggaaactttagagtcagagaaatgctatgttcattgaatttgaaattctacaatgatgatgaacagcttttgacctttgtcctgtgctttctcatcaagatctttgagccattcttgttgttacatattcaccagacataaaggtgcccggcccatgtcaaacagtgtagtttgaatctgccgagttgcatggctgtgtcttcccagggaactgatgtcatcttctctgcttaccaaaactgcacatcctctttttttcctccccatgctatcttggaagcagattggattaacctgacaggatttattcttaatgaagtctttttggttattatctagtatctttttttcttcaaagagctgaaaatgtgatttttcgatgagtgaaacccagatctcttgataaaagagaagattctcctaaccaaatcttgccttttactagtcctggatggtcctctctttgatgttgatgttgtatgtctcacagtagagggagtgtggtcactatgggaaccatgaagcacgtgtccttaagagttttcagttgtctaatttcta

SEQ ID NO: 44231 - DNA, 1928 bp, Homo sapiens
gcagaggccacccagtgttgtcacttagtgccttattaacacttctggaaatgactttaaacactcaaaagcttccttttaagtaaatgtgaaatggtaatataaagttgccatggaagtttcataattaaaattttgaaggctgtactgatgcttctgcagtgtgtcctgagatttattggtaggtttgctactgtttctaaactatgttctgagatttcatggtggtatttctctaattgcatagcaagttggggtaagcctttctgtcctggtagtgtcacagaaatgggcaaagaatcaagatccaagatccttttccaaatctcttgctttatcagtcatgaactttgttcagctgctagtaatagagacctgaatttagcagctggaaaggttgttttcatttcatgtaacaggaactctgaagtaggcagttactggttttggtttagtggctcaagaatgtcctggccaaagtctctacattcttttggtattccctcatgatcaagaggcgctggacctttagctatcatatttgctttccagttaacaggaaaaacgaagtgcagaggggcaaaaagagctttctcagaagctccagcaagagcttttgcttatttttcataggcttatctctgtcttcaaaggagattgggaaatggagtttttcagatggacttttaacccagggttctactgataaggaataagttgtcagatactttccaccacattgattgactcccaaagtggtttcagtccctaagagactatgtgagaatctctgtattctggcctaatctcttcttcagcacactacacctcagtcccatctacttgggcttccctgcctttgttcacatcacccactattttagtttggattgtcccagaagcaggccctaagacaaagtacggaatgcaagtggtttatttgggaagcacagtagggaagtagggaagggaaatagagaggggaaggcagccaatacagattgtgccctcaagccagctaccactatgggcaatcagagcttaattgcatggggatcacatcctggggttgtctcaccaaaagtgaaggaaatgaggcatttatataccagctattgtcagccattggttgtttcctgccactgttaattccttggccctttagatctgccatgcccaggcaaagtagccttcctggacttctgagaaagcctttaggcaaagacagtcagattctggccattggaagtcattgagtgataaggtccaagaggtgtgagtaggtacctacagcatctgctccacccaccctgattgtaaatgtcctttccttatttctgttggtctgaggaacacccacagattttcataaccctatgaaagaaggaggagttacttccttgatatgttattttgctactgctgtgtgacaaattacgatgaatttagtggcttaaaactatgcccatttattacctcacagttctgtaggttagaagtctgggtaggtttggctgagttttatgctcagggtatcaaaatgctgaaatcaaggtgtctaggctgttttagctggaggctctgggaaagaatctgttgccggctctttcagtttattggtagaattcagttctttgtggttatgggactgacgttctcatttgcttgctgattttcagcaggggctgccctcagctcctagaggctcccgcattccttcccatgtggctcccttcatcttcaaaccagcaatgacatgttgcattgctctcatgtttggcatttctctgacttcctcttctgccacaagccagagaaagctctctgctgattagatctggctcctttggataatcttcctatctcagggcagctgtgccatataacataatttaattatgggagctatagatgatcaaaattacagg

SEQ ID NO: 44232 - DNA, 1268 bp, Homo sapiens
ttgacatgttggaagaatagcaagtggaccaatgtggcaggagtttgagtgagagagagaatggtaggaaatagagttaaagaaacagttgtattatgaattgggagaaccacaaacaccttccttgcaccactgaacatattcagctgccatgctattcctgtgcaaacaaggcttctgacgtttatggaatttaatgattgggggcaatactttttcacccatatactgcatttccatagagtggaaacagctctacttcccacaagttagcagtattgaagtagtacttaagtatggcaggcggctgttccagctccccagaaggtaagctaggttggccctgctgtgtgtggcagctgcctcccagtgaggggaaaggacaaggaagctcgtatttggcctcagtgcgtcatagcattgtccaaaccagctttacagagctttgtactttgtataatgaaactgtactttatctggcttgctcaattctttacttagaccttccaagggaaccaggaagtggtgagaggctcaccagctgccctgcaaaggcactgtccagctggcacgttttctgtgtcagtccttttttccctaaatttttttttctgttttcaaattccagggtttctcaaccttggcagtgttgacattttgggttagacaattctttgttgtggagggttgctctgtgcattgggagatgttcagctttatccctaatctctacccactgcatgccaagagcaaccccagtccccagacatagccaaaattccaagatacttgccgaatatccctgggtgtccaaattgcccgtggtaaagaaccactgtcttaatgagtacaagaatcttggggaatgaaggattccaaaaagagatcaataatcatatgttttacacaagcagttactatctttcctgggacatgagaggcattttgtagcatactattgtttccttccgaaaactataggcaagctcttcattttatatttttaaagttccttttttggatatttctaaagtcaagtctcagaataatcaatatatttgaaaaacattttttctcctgagtgagaataacaagtcagaaaaatagcaagactttgctatttcccctctctgaacagctagtttttcctccagtcaagatggtaaatggctggtgcacaacgatgaattcaactgtagattgttgctacatctaggtcaaatggctgtctttggtatatattcatcttcccctggtaggcatttcaa

SEQ ID NO: 44233 - DNA, 702 bp, Homo sapiens
gagccctgtgctcctagaaaacaggaacaattaagaaatcctcccacccactcgtttgtgctctgggaaacatcttactgcaaacatgtaacttagataagactcctcataatccccttgtttatctgcaacaaggccatacatacaccctccaaatgctcattctttacttcataaatgattagctgacctgtttgttttcactgaccaatctggataagatgccagctaaagtgacttcaccaaactttaatctggcttcttctcttcctacagtccctgacctttgatccaccttcagctgcagccagccttggaatgtggaccaacccctcctgaataacctcttctgaaaacctgcggattgcaagattctgtcaactgtctgatcacaaagcctgcctatcccattctcctgtgctgagttctttctagctttgtttactcctccctacaaaagaaaattcccccttttctgcctaacctttgagacttttgcaaatctttagttggagctttctccctgttgcagtagttttcttcccccattgcaatagtccttttttaaacaaatttcatttttgagtgtggtaaaataaacataatatttaccatcttaataattttgaagtatgcagttcagtagtatttatatttacattgtcttgcaatccagaacttttttatcttgcaaaactgaag

SEQ ID NO: 44234 - DNA, 1508 bp, Homo sapiens
gaagcaatagtcattgtaaacttggcctcagcctacctttcatgattaacatgaccaagtaagttgaagaatgaggaatgtcattctgggtttcttgctagataaaattaaagcatataatttgtccattctaatagggcatagtctccttattacataattttatctagagatgggcagtaagatccttcatgattaaaaagttataccaaaataagtggggaagtagaattcttgatacctgcaaatacaaatgaaatgggcctactttccctgcttaccaatgggactctgtgtctccctcaaagtataacaacagtacctggaagcactttgaattttcttatctgctctacttacagtggtggcccagaaggcattccaagaaacattacactaatcagattcaaagagagttatttttgcctaaatgtataactagcatagatgactgacaagatagactcattttcaaggatcccagatgtattagttattattgctataaaatcatctttggccaagtagcataaaacaacactttattacgctcatgaattctgtgggacaggaattcagaaagggtgctttggtgatagtttgtctctatttcatgatatctggatccttagttgggaatattcaaagatgtggggtgactcaatagctgggggctgaaataatctgaaggctcatttattcatatgtctggcacctgggctggggagattcagaggctatgattgctgactgtataactccatgttgcctcaccaagtggcctggcttcctcacagcacagcagcttcagggtaatcagacttcttacatggcaagtatcccagcaaggaaggtggaagtgacatcaccttttattactgagtctctgaagtcacatgagtcacttctaccacactctgagtcacaggaatacacagattcaagactgaggttatagacccccacctcttgattagagactatattgtatggaaataggtgaaatgggatatgttgctgtgaacatctttgaaaaatgcaatttgcaatgctgggactaagcttatctaaactacctacccagatgagctcaggggttggcctatgcacaaaattaaattgattccccagttagcgcagggtttaagtacaaagtctcctggcaacaatctccaagggtagtatcttcaagaataggcaagaatttccagtctttcccgtgcacagcaataaatgaagcaccccacattctctcctccagtattcggggcagtcacctcccctttattgtgatatgctcatcaatcagccccatccttctttcctggatggaaatcctgaagaagatttagaggagagagatgaaaattggttttatgctctgcaaggagggcctatttccttccctcattgtagagttggggaatgaagtaattttccatctctgaagcagcagtgagcagggctgtaatagaatcatggtaaaaatggatgtatctgcaagaagg

SEQ ID NO: 44235 - DNA, 2069 bp, Homo sapiens
ggtgactccaaaggttataatgcctaatttgcctgagggactagggagactttccaaaggaagtgaggtttccagctcactcttgaattataggtagaagtttgttagggggtgtgtgctggttagagggagcaaaggagtgagacatttggggacattagtaaagatggggcctaggttttagtatagtttacttttaaataaataatcttcaatatattagaaatagttatgactacagcaataataataacaatatgataaggattgacttaaaacctgcaactttcaaaataatcattgtccttgtttttttgataattcagttttgataaaccattgaagagatcaaccttcaagacttgggtttgaaagctcatatttcacaaactgggtgtgttaatggcattcccaatgtcactttttgcctcttgagaattcctgcaggggaattccggcttctttggaagcagcttagagttaacaagcagccacccaagagaaatagattataagtcaaaggcagacactttggtaaagccaaaatgaatgagtagctgtaagctaaagactgtcatccctgtaattccacctcgattgttatatctggctttttgagctgctgtttacctaaaacagtcagctaagtgagactttataactcaaaagtaaattctttgaaaattgaagaacctgaggccaagaaatcttaccttagcaaacttctgggtgggggctgggttttgttagaatagcattttttataacatttttcaagggctcagtaatgtaattctacctagcatttaactttgattttctgcaaatactttaaggttgctgatttgttttaaaataagagtttaacataacagtcactctgatggctaatactgagtgtcaactcgattagattgaaggttgtgaagtattgatcctgggtgtgtctgtgagaatgttgccaaaggagattaacatttgagtcagtggactggggaaggcagaccggcccttaatctggtgggaacaatctaatcagctgccagcgaatataaagcaggcagaaaaacgtgaagaggtgagactggcctatcctcccagcctacatctttctcctgtgctagaggcttcctgccctcaaacatcggactcccaagttcttcagttttgaaactcggactggctctccttgctccaagcttgcagacagcctactgtgggaccttgtgatcatgtaagttaatatttaataaactcctctctctatatatattacatcagtcaagagacattttagggagctgtaacaaaggaacaaaattaaacaagatccgaattatcttttcttgtaccctaagtggtgtatttttgcctctctcctgtatgacagtatgtataattttgtcgggtgccaggaactagaaaatctcccctctgttgacagatatagtttacctggaaaagagaatgtcagtgattcaaagggcatgagctctcgctggctctcgtcttcattatgagttctcccttgggcaaaaggtataaaagagcacatcacttacatacctgaaccataatgaaattgcatgttttgaaaaggtcagaatgcatatatcagaaacctatattagtcagggttccctcaagtgacagaactatatatcctattagttttgtccctctagggaaccctgactaatatagtcacacattctgtcattctgacgtttcaaaacatgcaatgtcattatggttcaggtatgtaagtgatgtgctcttttataccttttgcccaagggagaactcataatgaagacgagagccagctagagctcatgccttttgaatcactgacattctcttttccaggtaaactatacctgtcagcagaggggagattttctagttcctggcacctgacaaaattacacataatgtcatacaggatagaggcaaaaacacaccacttagggtataagaaaagataattaggatcttgtttaattttgttcctttgctacagctccctaaaatctctcttgacagatgtaattgacactgctcatcaa

SEQ ID NO: 44236 - DNA, 1542 bp, Homo sapiens
aagactttcattttatatcatttaacagtgacatgtcctatgataggtaatattatcctcatttcacagatgggaaaactgaagctgaaagtctcagtattttgcactaggtcacacagataacaagtgacaagagtgcaacctcatgacactatgctttgcaaataagggcactgaggcgaagagagaccagaatcaatgttctggacacagtaagtgacaaatttgaaatcaggtctgtctgactagttaaagaacatgttctttctattatatattttccatgcaattttttttcctcacaccttctgaggtttaggaaaaggaaataaaatttgtgaattaatgtgttttgaattattatggaagattcccattataggaataggcataattctatctccaagtccccatttttagaagagacatctcagatatgtgctgctggcttggcagtggtctcaggcatgtgtggcctggtgatttctttgcagaactgtccacttaaaaatctctgttgcaaacatgggcatatgagataatgcaaaggtactcttacttcggacagaagcagctaatcacagcttgttccagaaatcaatgttattgacagattgagaaattgtgaaatgagttttactggaaagtgttgcaagatctttatttgaccaactcctaaactcacatttggctgagtcctggtggctcagggaaggaagacaaagagaaaagggcagacaacagaaagcggcttttctttcactgctttcagctggaaacgtgttagtgcccacgcctgtggtcttgcaggtttgcactctcttctttcaatgactttcctgtcaaagctgctttgttttcaacttaacataatggaacgccaacctaatactttgccaagctctcattgatccttagtgtggaataaatgtgaatactgcctcattaatcctctctctggtccttggggagaagtggcaagcaatatcccatccattttgcagtggaagaaagaaaggcaaagtaaattgctcactttacatctgttccccagccttctggacatttccatctggatatcttgcgggcttgtcaaacccaacttactccaaattgaatgcattctattccttcttacaaaatatattcctttctgagaattgtgtcttggctaatggcactgccatccacacaactatcctggtagaagcctctgagtcatctttgatttctctcactttccatattcattcagtcaggaagtttgtttccttttcctctgaaagagtactcaaatccatcctttgtctccacctctccacaccatctctctcggttcattgtctcatcagccctcatccagattagtggaaaaagattcttacttatatctccaattctggttctgtaatttgtcctgtatattgtcttcaaattaatcttcctataaaactgaggtgcattatttccttccctgctcaaaaagcattgatgtccccacaaggccaaaaaactagagtcctgattcttctcaaaacaatg

SEQ ID NO: 44237 - DNA, 651 bp, Homo sapiens
tttaattttattcaattagatctcaaattagaatgaaattagaaattagatcttaaattagatctaattagattagaaaaattagataatactgtcaataaagctttcaaatggcacgagtttgcttttattgtgtaacaaatcagcccaaaatgtagttgcttcaaaagtacaatcattcatgaaattgtgattacaaaatagcagtgtagagccaaactagcttcactccccctcacagaaaatcaaaaacaaatacacagtgctgagattttcgtcagcaacaacctggaactcaaatatgaggatgagaaaattcccggggccacagagaagtagaaaaactgagtagacagcaagagaattggacctccacgtccatgatgcccctccccctcattcaacctggcaccaagtatgtgaaaattttttccccaattcatggtttctacattggaaaaagtgaacttgaggtggtcaaccagcttccccatcttcgtcctttccctggcagacctgtcctcatcttttcccacaggaagcattgtgactgcctaaagaaggaaatacccataacgatagccatagacaaaagaggaaggcaggactcccattctcagccttggaaattttatgttattttattttatt

SEQ ID NO: 44238 - DNA, 2128 bp, Homo sapiens
tcacccagagcaacttccagtcatccaagctccattcttgtaagtgccctgtatgtataggtatatcattttttaaatcttttagactgtatttttactgtaccttatcttttttttttttttttttttttgagacggagttttgctcttgttgcccaagctgaagtgcaatggtgcaatcttggcctctgcactgcaacatccacctcccgggtttaagcgattctcctgcctcagcctcccaagtagttgggattacaggtgtgtgccaccatgccaggctaattttttgtatttttaatagaaatggggtttcaccatgttagccaggctggtctcgaactcctgacctcaggtgataaacccacctcggcctcccatagtgttgggattacaggtgtgagccaccacatctggcctactgtaccttatctatgcttagatatgtttagatacacaaatacttaccattgtgttataattgcctatactattgagtattacagtaacatgctgtaaatgtttatagcctagaaacaataggttataccattagcctagatgtgtcataggctatatcatctaggtttctgtatgcacactctataatgtttgcacaacaatgaggtctaatggtgcatttcttaggatgtattcctgtcaataagtaatgtatgactgtaccttcttttattaaaaagtcaggtttattaaaatataatttatatacaattaatcttattctttcaacatgctcagttcagtaagttttgacaaaggtatataatcatgtaattgccaccacaatcaagaaacattttcacaaattaagaatgctcttaagtccaccaaagtccaaagcgatttaatcaccttgcaaagttttttcctgctccattgcaacaaattccctatctctacctctggcccttggcaacctctgatctgttttctgtccccataattttgcattttctgtcactttaagtacaggggataatgttgtgtgtaatcttatgtgtctggcttctttcactcaatgctttggtgattcttgttacgacatgtattagtgattcatttcctttaattgctgagtaatacaataggtatttgaatgtccttgtctgctaatttcatcatctctgtgattcccaaatctctttttatttactgattttttttttcttcctggaaatgggtcacatattccttcttttgttgcctgagtggtaatttccaattggatctcagacatcgtaaatgttgtccatatgtataatgtgttgtatttacttagatagccactattggccttctgccctgaagggaattacagttctggcatagccgtttcatttaaagcctttttaaggacatgtatgttgtagtctttacactagggctaatttagctcccccactacattactgttgtttagggtctctactttaagctccatgtatttggcaaggtctctccattctggcttgtgaggccttggatgagtccaagccttgtgtgagcccttggaattgtttggcttatagctctccagaatattttcttttcctgaaaattgttcttcacctgcctattttaccctcggagtgaacaacttagtatttggccaaagactccaaaggtccacagatgtatggagatttttctctgtgtagttccttcctcttattactctgtgctgtaagttcccaccttattagcatctccatctcctctactcactgagagaccatcaggttctctttgcatcccacttccttgtctaaaaattgcttagaagtagaaatatggggtaatcaaaagaatgatttcatttttttctctttcttttagggattttagttaagtagtacttacagtttaatggctgcaaagagtgatttcatatgcatttgcccagttttctaattgtttatggtgtaagacacccctcctgacctgtgacagaagtcctttatgatgttttttgataagcagaatttcttatttttaatatagttaatatcactctttttcttcatgatttttgcttcctatgtcgtatataagatactctgttttcttctaaaggttttaaagttttgtctttcacatgtatgtgcct

SEQ ID NO: 44239 - DNA, 1388 bp, Homo sapiens
catctatgaggcacctgcaagtcaacatttactgcacgcggccccctcactccctaaataagcacttttgatttaccgccagtcatcaactcacctcccaactgcaatttgtcaagagtagtgtcaggtgcactttagtggttaatctccttgcacatcggtggaactttaggcacaagaaggtaagcaacgaagatagtgatatacgaagggaaaactaaacccaggtagcgttgccagcttaaaagtcctaggcatggggatgggtggatgggacgccggcctaagattttagcagggaacagacccagtagttggcttggatctcttaactccagaaaaggccgagtgaggacaagggagaccacagggataatttctgtggctctggtaaggggatgacaagggagaaaaactttcccacggttccgtctggcccgcggcgcttgtctgcctgcgcggggtcaaagcccggcgccgcccacgcgcggctcgggtgggaacccgcagacgtggggcgagcagggccgctggctgtggcgggcgagcgccggggcgccacgtccgaggccgcggggtcggggctgcaggcacagctcgagcgctttccgcggggtttggctcctgtcgcttcccgtctcgccgaaccggcatcgccgccgccggagccgcagcgagtcctcagagcctggctgctggcggccgggagcgccgggacggggcgcgaagccggaggctccgggacgtggatacaggtaaaggccggcgggtcggagtcgggcggggcgcggcggcggcgcctctcggagggacctggcctcggccgggccctacccagccgcggtggcccgggcccccacgttggcccaggcggggacgtgccaaggggctgggctagggttgccgctggcctggccgcctctcgcccggcgggcctcaggtgacgcggccgcggcttaactttcgcacctgaggctctcggagcggcctcggggcgcgcccacctggaggttggaattacacagggtcgaaaaagctgagtcctggaggcgaggcgctgtaggtgtggcggaggaggccggggaaggtggggtgggtgccaggggtccagtactgaaccctctccaggtctgaggtggggaactgcgtcttgtttaatttcggagcttgtggggaccacacagccccttccacggccgattccctctgcacggttccactttcctttgtctagcccatttcagtatcggcgtcgcagtcgcttttgttgcagccttgggtccggagtgtacgactttctgctaggcagaggtcataagctctgaaatccatcgggcggaggtggggagatggtcctttggtgggaaattactagtgctgttatgaac

SEQ ID NO: 44240 - DNA, 805 bp, Homo sapiens
cagacttgcactgaagtacacctcttcctgccctgtttattagatgaattggtaaacttattcagagggccaatttcaaatgcagttttgaagatacctttctcctggtataggggatggcactgttataggactaacagtttcatatgcccgtgtagtaacagatcaatacactgagatagcaggatttgcagcagagaaagaatgtcatgattgcaaggtgtccagtgaggagatgggaagagaccctcaaatccttcatcttcctgaggagttctgggctgggagttttaaggaaaccatggagagtgaggagctggaaaattggggtggctgattggttggggaatgagggatgaagtcatcaggatgtggaaactacattctttggtgagtcagcttctggtggtatccttctttcagagcagctggcatcaatggggtttttcagaccagctggtgttaatagtttcattggtatgcaggacctagaggaatatctcaaagggaaaactagaggaatatctcaaagggaaaactttgagtttcataatgttcaagttgttacctatagagcagttaagggaaactataatctaggatctatgggatttggggcaataggcagcaaacagccatgaggaagcaggtcagacagcaagcagacctggggattaatgctcaatgtgctgcaagcttggtttatttttgtttgtccccctcttcttccttggctaatttataaagtttataaggacagttttagcatctctcatgtaagagtcttatgacatactttatggga

SEQ ID NO: 44241 - DNA, 652 bp, Homo sapiens
aggtgcccaaaaggcttgctcaagtaatgaaatgagcagtgataacaggtcaactttgggtgcagctgtgtggtataaagatcactagagctgactcggcctatcaggatgcctaggcaatctactgtgtaggtttatctttcgctgctggcctcttagatgttgaccaggcttcagccacagaccttcccttcacattctacacaccatctaagcagagtgctccactcccatagccttacctcctattatgtgtgtgggtaacacccaaatcattgtctttgactctgacttctttcctaagctacaaattatatctcttactattaactatttgcattcctatgtctgactaacctcaacacaacaagccccagactggatgtcatcatcatccccttaacccctgccccttgtgaggtgttgtcatgtcagtaaacagccccacccaattgcttaacagtaaaacccaggtaaacctcatttcctcttttacctacccacactgaatcaatcaccaactcctagtgactctaccaccaaaaatgtatcttcaatttatccacttctctccttacctattgagaccacatctcagccacacatcattataactcaccagaattactcctaactggtaaactttgtctcc

SEQ ID NO: 44242 - DNA, 2107 bp, Homo sapiens
acctggtcaaataatactgggaagtgcaggtttaaacaaagttagggttctgaaccatagtaattctatagttcatagtaattctatagcaattcatagtattctattctaatagaatagaatcttttctattactaaagtgcgctgggaatttccaagttgggaggtggggtggagaagtgtgtatttctgaaaatgtctcctgcaatcagtgttctgcagtggcaaagctggtttgaggagatgctttccgctactagaacttccaagtaagctggtagttgaggacgagaaaatcttttaagtaattattctgcagagttcaccgtttttaggtcagtaacttctggacatagaatttgagagttagaagaaatcttatatataattcaacaaagctccttctttttataaggaaactgaggcccagaagcacaaagcgaccaatctatggccacggagcagctacatacaacaggaagagctaggagtagaacccgcacacccggtgggtcctagcgacttctaagacaaacgatgcctccggttacctgggtcggccaagtgttcccacttcaagttttagttttaagccataccacagttaaggtagtttttctcggccgcttgcccccttaggcctacagttacagtctctccctcctccctcccttccacaatacactttccctgtaatcccaagcagctggggcttggctcctggggggaagatagttattttctttccttcagagtttatgtttggagtgtaaactttttcatgtaaacaaaacaaacctgtgaattttaaggcctccgcctaaatccccatgggcgctgctccgtacacgccgcaccctaccctaccctcccttgcgctcccttcggagctcggacgcagaggccctgtaattgctccttacctgggactgccatgacggtggtaagaggggtaactcgagcctctggctttcgaaaaggcgcttgcttcccgccagctgtgagaacaaggcacagtcaaagcggcgttttccttcccccagcgcagcagcaccctcgctacggtcgggaagggcctgtacgcctctagcgacggcagaaccagtagatgcggatgcagtttccggacgagtcatattgcagaagacacatggtccgaaccattactgatagttttggagggggagttagtttgatctgcacacgagagtagtgtaaacaccgccaacacttatgaagtgtcccttctaatattgtaatacaaataacataaataacattaagctatggtaactttacggacttttctcgttccctggagtacattggaataacccttctcagggttagcggtgctcgggtccggtaacaacatggcggcgtccgtgaggggctcctttgggcaggggtagtgtttggtgtccctgtcttgcgtgatattgacaaactgaagctttcctgcaccactggacttaaggaagagtgtactcgtaggcggacagctttagtggccggccggccgctctcatcccccgtaaggagcagagtcctttgtactgaccaagatgagcaacatctacatccaggagcctcccacgaatgggaaggtgagagcctcatctagggaacttggggtcctgggatccccaaagtgagatttcccggatttggggtggggagtgggtttcaggatctcgtggtaggaagagaccacgagaagtgttgtctttactcctgcatgtggacaatgttgcatcgaaacactgatgttggtacttttcaggatgtacttgaagaagtcaagtggagatttctctacctaccagcattccggtcctatttaatgctttaacccaactcatgcagccgatttctggggtcttaggtttttaaacagacatttttgagtttgatatattctttgcttaactaaggtcattcattctccatttcttctacaatcattaattgaacgcctgcgaggcactgggcactgtactaggcgccggagatacaaagatggatgggtaaggtagttgttttcccggaaaagcttatagtttagtttgtgagacagacaggtaaacaaaagcctgtatgtctgata

SEQ ID NO: 44243 - DNA, 909 bp, Homo sapiens
aagtctgctgaagcagcacccacagccgctttttccctcaggtgctctgtcccagggagatgggagttttatctataatcccctgaatgggaccgctgcctttctttcagagatgccttgcccagagaggaggaatctggagaggcagtctggctacagcggctttgccaagctgcactgggctccgcccagtactaacttctggtcggctttgtttacactgtgaggggaaaaccgcctactcaagcctcagtaatggtacacgtcccttcccccaccaagctggggtgtcccaggtcaacttcagactactgtgctggcagcgagaatttcaagccggtaaatcgtagcttgctgggctctgtgggggtgggatccactgagctagaccacttatctccctgacttcagccccttttccaggcatgtgaacagttctgtctcactggcattccaggtgccactggggtatgaaaaaaaacctcctgcagctctgtgtctgcccaaacagctacccagtcttgtgcttgaaacccagggccctggtggtgtaggctccagagggaatcccctggtctttgggttgcgaagactgtgggaaaagcttagtatctgggctggagggcaccgttcctcacggcacagtccctcagggcttcccttggctgggggagggagttctctgactccttgcacttcccggtgaggcagcgccccaccctgtttcggctcaccctccgtgggctgcacccactgtctaaccagtcccaatgagatgaaccagttacctcagttggaaatgcagaaatcacccgccttctgcattgatcttgctgggagctgcagaccagagctgttcctattcagccatcttgccagctaccacctgcaccttagttttagtattca

SEQ ID NO: 44244 - DNA, 2366 bp, Homo sapiens
ccctgccaaggcaatctaacgtgctgtagcacttactgtactggtgaacttcatgaagcaaccctagtgagacgtttgttttctaagggaaaagaaaacagaaagattgtgacaagccttgatgtgattaaaacaaatgagcagagcaatatgtttgtaggtattgttgagaggtgccggtgctgcccacctggcccaaactccagctctatctccgtccatctctgtgttccaggtactttcttacaccctgcccactggaccatgggcctctgtggttcactggttaacacttgcctaatcaactagacaaacacaggacgggacagctgggcgctgagctgccagggcacatgtgggagctgcttcaagactgaccacgaggccaaattaatctaagaacctgttgcaagagcaaatgctgtgaaggcaagatggaggtgtccctgggggcccagtggcttctcagtgaatgggcttccattcttcttttctgcttgaccagcctaaaaacaagaggctggcctcacagaggattcttcttagaagatattgcagagccacttataagaccaacgtatttcacagcccaatatccttactgacatctcagaccacccctctccccaccttcttttaatcactttcttttctcctccagggcacaaacagcttttatgcaaattatctctcaggacaggtgtgagggctttccgcaaagaaagactgatcgcatccaaggtcctttatcccttagagggctccccagggacaagcaacctgttctgccccagggctgccggacgcccagttttcctgctgtctctcatcacaggggcggtggggcgcgcccgcctccagcctggctctggacccggggccccgccacctcccagcagcgggcgcagagagccttctggttacccccgaagctgaggattgcagtgttctagcaatggatgaaatcctttttaaccgactgtaataaaaataagattgtgaataacatgtgactatagacctccaaaaaactggcggctgtgaaacccatactttaagaagcatggcctctctctcgaagtggcttccagtgacggtcctggatctacttcaccctttttggctcgggtactggaacaggtctcggccaaactactgtctcaccgccatagtgataatcatctttaaaagcacagctagtcggtgcgcgaccactgcgcggtacaataagaacctgtcggggagggaccacggcaggcgactgggagcttgtggactgccagggtctggagcgggcccggccatcccgccgctgcgcatgcgccacccaggccgctggccggagaaacctagtggcggcgggaggcgggaggctgggagtacgcgggggaagctggaagcgggaagcggggagacgcgaggtgggggcggggcgcaccggcgtcccggctgggcgtgacgggcgagaccccagcccggtcgcggcgtctgaggttgcaatctcgtctggggcactctcgcgcctcgcccctacccgacttcttttcagggattagttctgacttcatgattaatcagcactttctggtttccttagggtgacgtcatctctgctcagagataaaacaggctcctttttgagggttgcgggcagcctgggggcccgggtccgggaggctgtcccggggactgcgccccgcccacaggcgacagccagatcgcgctgccggcccctcgaacgctgggttccctggccacagcgcgtcttgtttattgcttttgcggactggttaaatgcaaaagctcaaggttttctttcttttttccgtaattataaaagtaggacatgctcttttaaagggtggaaaattacgaagaaaaaagtaatcacccaaagccccaccctctagactcaacctctgttaacgttgatgcatttccttcctgtctccccccacaaccccctttctttgcagcagatcttcaggtttttaacgtcatttagtcatgttatatcattttgtagcctacctttttcacttatattgtggcagaaacttttttgtgcttttttcaaacattgctttaaagatcataaagatctactcctttagtagaggtatcatcaagtacttaaacactatttccgtttatgagcatctaagatgttctcagtttttactagtgtatgaggtagaccatcccttcacccttacttacatttgccagggtttgatggttggtggagcatacaagcccaaactaaaaatttgatcaaatatatgtcaaattgtgagcaaaacttgaaagcttctgctcttttctatattgctaatgatagagaacctgggcagaagctgattatt

SEQ ID NO: 44245 - DNA, 1536 bp, Homo sapiens
gttaataaaacaaacgcacacgaatttttgtgtgggtcatactcatgctcaaaatttgtcgttgtctatctgatattcatatggaactcagtgtgctgtatttcagctggcaaccctttactgaatggataacccagatttggacgaaacagtggctggaaggtggaggccctcaaagtctcaaagagagaggtcctcaagatttcttttctagggcatcctctagtactcagggtagaaacacagagtctgtggtggccttgggggcaaagacgaatgtgtcctctaaggctggcccaccatggggaggaatccgtgttgaatggagacaaagagaggtgttaggaagcagcactggcgtcctgcttcctctccctatgggttccctctgcctttctccctcgtctctcccggagggctctctcccctccacacgcctcctccccaagaaaccaacataagataattctcttcactttagttctcctgtgcctgggtgtagatgggaataaagcgatgaacctacggggcgagcggtgggcaaagctttctgtgtatttgcagctcagcagtcgagcgtccaccccaagctgcataaacttgggtgccctcgcctccggcaaccccggtgcttcagtgctcccgacctttctctgccgcccctcgcctcggcggccgccgggagcggctgtggggtgcgccggtcgccccgggcccgagcgggaggagagtcccgccccgccgcgccccgcctccgggcgccccgacgctgccggcgcggacgccattgctgcggccgctgtttgttattaaactgcccagagaaagggcttcgagtaaaaacaccaactttccagtcggggcggcgcaggtccccgggccctggaaagttctgggacggccgaggtctccccggacacccgcacccacgcccccgtcgtgccctttctggcttttggcttcctctcctcgatttcccttttgtgcggccccgggcagcttcctcaggccccgccgcccccacctggccgccctgggagctgttcctcccccagcagcaggagcatccagctcgggttttattacctcccgagacactcgaggaagcctcaggtgggtttccatgtcaaccttcactgaaatccaaacatttggcgttctcaaaggcagtttaacctctgccaccatttttttttcaaagcttaaaaaaaaacctagaactttcaaaagccgcaggcttctgggggtttctagtcagagggtgataacacatcttgagacaggatatgtataatttgtttggtttcacgtttatcctcacaaagctaaacagtaatgactgagagctatgaaaacacttaggtaaggagaggggctagagcagagataaaagggataattggaaacagaggcgaagcctccaagttgcaccttgttgaatactgtcacagccgggcaggccggggagctcatggcaggatgcggcatctcttaattctgggcactccgcagcctctcctcttccaaggtttactt

SEQ ID NO: 44246 - DNA, 572 bp, Homo sapiens
acattaaaagctctaagatgtccaattttcaacaaaaaaattgtgagtcaggaaaagaaacaagaaattatggcccatacacagggaaaaaattaatagaaactattcccaaggaagcccaagcactgaacttactagacagatacttgctccaggtagcagtggttaatacatttgcctttcggtattttcggcaaatggcccctgggtagccacctcagtccgggaagagttccagattaggttacataaaggaaagtcctttgaactggtccttcagagaaccctgagagaggtcaaaacaactacaaatctttgagaataagatctgttctgctcccttcagtattaggaacctataccagaaatgtgggctgttgtcttcaattttgccaacaagctgaggtatggtgtcaaggttaagataaaatgccataaagctctcttatcaagattcagggcggggtacggtggctcacgcctgtaatcccagcactttggaaggccgaggtgggcggatcacaaggtcaggagttcgtgaacagcctggtcaacatgtcgaaaccccgtct

SEQ ID NO: 44247 - DNA, 746 bp, Homo sapiens
gttttagtagagacggggtttcatcgtgttagccaggatggtctcgatctcctgacctcgtgatctgcccgcctcagcctcccaaagtgctgggattacaggcttgagtcactgcgcctggcctgcctgattgaatttcttacaggctacttattatagatatgatgctcaaatcagatcaacttacgaggttatagatcttgccagactaatgaagatctgcatcatttataacctaacaccacttatttctttccttttaaaagaggttttgcttgctcaaggcccaggcagagaggaactacttaacttgtactgaaaccaaaacaactgatcatccacagtaaacagtatgatgtcatccacggtaaacagtatgatgtggcagaaagaccactgcaatcaggagatctatcatttgttaattatatactccagatcactcatctggagtatacagacaataccaagattagggacaataatatgtcttaataattccatagaattatgctaatcaagtaataaaaaaccaaactactcataagctgaagcatagtattcacaaatgattttgcaagtgggcaaacttagaaaatacttctcaatattaactgaacaggctgggcacagtggctcacacctgtaatccaagcactttgggaggccaaggcaggcagatcacctgaggtcaggagtttgagatcagcttggccaacatggtgaaaccccatctctactaaaaa

SEQ ID NO: 44248 - DNA, 689 bp, Homo sapiens
ggaaaactgtgtagctgcaaaataaaaggaagaataaatcattccatacagtggccctagagaggtcaggtaaatagggagcaaaagctatatatgaagtgacagagttaatcattcatgtggcaaatttttttttccaaagatggtcacaatagcatctcccatccacatataatgtgactttgacattctcctcaagaggcaggatctatgtttctttcccttgattcttggcaggcttgtagtgtcagaggctaagtcttacatcacagtccagttcccttgtttctcttgcaacactggcctttggagcctccaagcaagcaggctggttgccctgaagccagcatgctggacaaaagcccaaactagtccacttggaaaaaccacattaggagagaaagatgcccggccatcccccagctgcttcagtcccctgctgtttcacctccagtaacagtctaactacaactgcattagagacctagccagaactgcccagctgagcacttcccaaactcctgacccagagaaaccacgagcaataataaaaatgattgctgttgtgttaagccaccaagttttggggcaacttatcacgaagcaataaaaagctggacatgtcagcattccagatagtgaataatgaataataacatggattgggttgaggaggattgctcaagtag

SEQ ID NO: 44249 - DNA, 1171 bp, Homo sapiens
ataaggagtattacagtattttcagtcttcaggctagaagtttttcttcttgggaatcacaaaaatattaagaccactacacagacttcatttgcagctgtggcaaatgaatgaatttgatttgtttgaaatcaacgtatttgcctctaaatgctattcttcaaaaattcaaaacactaacgatcacatttaagcacagaattaacataaaccagactgcagttaccactttgctgcaacacaagaaaacaattatctccaaaattaattttcttaatttctttcaactacaccaattttgtgttacgtttcttttcctgtcatgaattctgaaaactgtcatccccacatctaaacatttcagtctaatcaacagaaactaaaaagaaagaaaaaagaacagaaaattagtccacgacacttgaacataaaaagaacatgttgaaaatcacactcaagtgtctcttttaaagttccaagcaatggttcagtttccctttttctctctgctctgcacaccctcacctccccccgcccccaccattccacttcgcccagacagagggtaacagtctgagctgccctggttgagttgatcctaaagttaacattcagcagcccatttccagacagcagcgctaaatctatttggataaaacgcgtgtgacccagacagttggcatctggcccaaacgcgttgcaccggcagctcaaataaaaacaagagtaagaaactcactctcttgttccctctcagtgcgctttctcaatctctcgctcacttttcctctagtacagggaaagaaagcatcaaagacaggaattgtagcacatattatcagaaagaggcttcccaataccccattcctgcactctcactctccctcctcaatccctgaactttggtcccatacaccatatatacagacctaccccgataaacaaggctccggagggttatgagtctagcacgtcccaagtggccaaaagtaaatcaaaaacacacgtttccatctctttgattagcctattaagagcttaacatgtcctagagcatcggggctacagctagcacattaatgctaccctctgagcccaggcataaaatatgcacttgtctgaagacttaacgacactgacatgaaactacaaaatgcataagacttttctg

SEQ ID NO: 44250 - DNA, 2687 bp, Homo sapiens
ttagagaactgactttccgatttggcagaataagagatgccttcaatacatctaggctatcactctgagatgctgcctttgcaaaccccctttctctccctccccaccccccaaaaaaggaaaggaaaagaaagaaaagacgggaaaaaagacttattgggggtggaagtggtgccctctcttcctggaaagcttagtgcctttgctatgcaaataacatgtgcagagcatcaaaaggtatcaggagaaaagaagacaagaggagcaggaagggcagcaaagttttgttgaagtagccctagatctcactaccggcccccagccaacttgaattgcagcaggagaaaattttggcagcttttcctcggaggcagagcacactgacgtcagtctgcagatgtgcctgggctgcgtcgggtgcgcatgtgtcctgggtcgtcacgtggagggggaggggaggtagaggtacaatcggggtaaccaactaccagccattcagaagggcttagacaatgtcaacttttccacactgtgaatgagagaaattctggcctctctaacctctctgtcctatctcattccgcctcttttcctcctcctcctctaaactctcttagaaattctagcctggtttgctattagttgtttcttggaaaaatgaagggggagggagaaggatgaatgactttagatggactaatgtcactgttaagatctctggtgtcattctccgtgtaattttatttttaaaatccacacaatcaaaatgttaaaacttgcacgcaaacagtgcctctgaggaaacttaaagcttagattcgtgcagcaggcacaagactcagtagctacaagtgtacaaaatgcctgtgttttatacatacttcagcaagtaaggttagcaccaaaagggaaagtaaactaaagtaaactaataccagcacattttccatttgattatcgacttcaggttatgtggagctttaaaagaagaagaagaagaaaaaaaaaaagtaggggaggagggagcgggggaaggaagagagaagcttgcattatttccagatgagggtgagactggatggtgttttaaagtgcaaccgggaaaagccacaagtggagtgtatttttttaagtcagtccattgaatgaaacttcaatgactgcccaaatgaaaataaatccgaagtaggaccccaccaccaaaaaaaaaaaggaagggaaaaaaacaggaaccctgctgcgatctcaagataaacaaacaaaacctcaaaactggttcttcaaccttcccaatcccaccctccctcccccctacacacaagctgccagtccagactttaaggataaaataccgctacaatgtagcactttcactttcatttgctgagaatgaaagccgctggggagaaaatgcccagtgttttccatgtcctaagcaagcaaacaaagtctggcacatacatcggaaacaggaaaaaatgtgaaaatagctcaggacaaatgttgcctttcaacggtgtaatctgctgcatcatttatctgtctctaccattgagtgtagaatagggagctgtttaagagtttccgaggttgggggcaggggaaaattgacgccttgaaattccagcccttagttaatgccaagtcaatttccgatggtgagaaccagaaaggagaactggaccggagggaagggggtaggaaggatgatctttctgaataccagctcttaaatatcaagcttctgctaacattattgcccatttgatttttttttttcttcctacgccggaggtagtaggtgtaattcttctggtgaatctatgaatagttggctaaaaggaggcatgaatcagactgagaacgtccaagaatacagttatttcaattcttcttcaagggttgaaagtggaaagcatctgtccacagagtaaatagtcctcatcctgaccttaatcagtagtatctggctaaaagccatttaaaatgtagaaatctgttcaatagtgggcattgagttttaaataaagatgattcatatgtatgtatgtatgtgtgcgtatttgtatgtgtatatatatgtgtgtacatatatgtgaaatacatgaggtagcaaaatatagcaataattgtaaacaccaaaaataagaaaagtaggcatcaaatgactatttaaatagtgttgaaccttaaccttccttaatttttcaagtactggcagtaaatagggacagccagcacacacacaaaaaataaaggtatgagcagtaaacatctatataagctctgaaaagattttaccctcaactaagataaactgccctacaaagtagcagcttgtagaggagcttacttagtgggagtggactttggctaattacttattcaaagagtgccatcctgtgtctaaacagagtaatgaaatttttccaacagattctgtctccaagttgattgggtcaagaatactgtgaataattggtgaaaattgattagggtgggaaatggcgaactgtcaatttaactttatatatgtgtatatatatgtgtttgtgtaaatgttttaactgcattgcagaaaatttcaaacatatacaaaagtaaaaaaaaaaacagtataatgaacactcatgtagccatcatccagtttcaagtgtccaagtgtgaccaactttgtttcatctatc

SEQ ID NO: 44251 - DNA, 1483 bp, Homo sapiens
taccagagagaagaaagaagagtgacccgttctgccctaggtcttttggttatttgaagtagctgcttctccaccccacccccagaaacagtaacaagcactcaccaccttcttcagagagtgtgtgagagaataaaggtcaggagagaaaacatgtttagtgcatctgaaaggaaacccgcgagttaaccacttccttctgtccccacccttccatctttctctaaatattggtgaggttatggagcttgcgttggcgcgcgggaagccgagaagaacgggactcaaagcccggctgggaagtcaggtatctagttggccggcgataagggtttcaccttcaggactggagctccacaagattcaaccgttatatcaacctccccggcccaggtcttaccatcacagcgtcacaaactccaggtcgcctaggcgctgcgcaggaagcgcttgccagccccggacttctgcgcgcgctgcatgcccattggatgtgctcattcccaccccagccaatcccgaaactcgctcggacgctgacagaagactgcgccgctgctttgggattggtagctgagttttgtgtcgcgccttttctgacgatgcgaacaacatggcggcggaaagtggtagcgattttcagcagagacgtagaaggcgccgggacccggaggaaccggaaaaaacagaactcagcgaaagagagctggcagtagcagtggcggtgtcccaggagaacgatgaggagaacgaagagcgctgggttggacctttacctgtggaggcaacactggccaagaagaggaaaggtagctgcagacatagtaccgggacgaattggagtgctgcgtccgctgagtaggagggttcaagccagatccgaagagggatgatgtgtggagttttgtgccctcagaacagagggccgtcctctcacttctggctactccatacttgcatgtcttaacgaaatagtgatttaagcgtagtacaacgtctttttgataatatctaacacttttgatcattgatttgttatgacagatgctaaaactaacattttcctattcttatgtgtttggctcctctcatttactccccacagcagccacatgaagttggaatttcgaactcttatttaggtatgcaaaagggtaccagttctctttaaggctttagttcaggagtggtgttaatgtattaatgtgttggggcgcgagaggaaggcggtgcttatttcgaatcatggtaggtaaagataatttcaactctgacacttccactaataaattttcgcatctagggaaaatgacgtaagcttcctagatcacagatttgttttcatccaaaacccgaagtctgtggttttgaaatcacgctcttgatacgatgggctgagtctttttgtcactaacgaggaataatcacaaattattatcaaataaaaggggtgggaaaaggggtagattaagttttcttgtct

SEQ ID NO: 44252 - DNA, 1764 bp, Homo sapiens
tatttaaatccctattaatacaaaaaagcatcagccacaagtgacttttatgacacagaaaaatactaatttactttcactcctttataagaaaactgtactgcaaagaagtaatttaaaatttggaagtccgtttattgctaaacaaaaaaccaagagactatctctaaaatcatatcctaagtaagagctaacagacataaatattgtcaaaacaatctggtgcattatgaaaacatgcaagcaaacagaatgtttgtttcctgctcgaaagctatttttttgtgaagaatcatgatgcctctttgaagtttttttttttttataacattcagaaattaaatctctcatttattttcatgctaccaaacccaatcactcatcacttaactcttcttcaatccctactttcagaataaagaaccaggtcagtgaaaacgaatactgagctggtaaagtagctacagtgatccaactgattaataattaaattcataccttgtgaccctggtgttttccatattctttgcagacacagcacatgagtgggctagtttgacaaccttcttccaagcaaacaaactcaatggcatgcacctggtgctgagagcacatagttttctcatgaggtttatcagctagaggaactcgcctgtgctttgctaatgtctttgtagaatgagtaacttgagaacactcagagcacaaatgagttgcacacacagtgcaatatacagaggcaaggtgagcttcatcttcatcacaacgaatgatgctctgataaacaaaaaattaatgccttaaaattgaacccaatcagtataacatgacgaatttttaaatatagaatccataatcctttttgcttaactgaacaatatttacatatgaaaatatattggtcattaagaacaaaggtcattcaatactcatctgagaagcattcatttctaggggtaagaagctatttccaagattaactggccaatatatgttatgaatttgaagccaaaaatagaactattctcatagattcatattcggtgcaaagatctcttccaccaaatcccctcactttacacaaaagaaactaaaccatagagaagtcaaaagtctttctgtaaaactacaaaaatctgatattaaatacatccccatagctttaaatattagttgtcatgatgatgtataggaaggacagaagcacaaatgctatttagaaaatgtaggagtatgcatcagaattagctgtaagcttttaaaaacatagctgtctggaagagaaattcttatttcaacaggttgtggatgaaccctagacttgtatatatttttctaattatacgccatgttattttaatagctccacaggtgagtctattgcacaatcacggcagaaaaccactgatttaagcaaataaaaaaaaaaataggccaggctcagtggctaacatctgtaatcccagcactttaagaaggctgaggcaggtgatcacttgaggccaggagtaagagaccagcctggccaacatggggaaagtccatctctactaaacatccaaaaattagtcaggtgtggtggtacatgcctctaataccagctactcaggtagctgaggcacgagaatcacttgaagccaggaagtggaggctgcagggaactgagatcacgccactgcactccagcaagggtgacagagtgagactctgtcttaaaaaataacaataaacaaataaataaaacctatatgtaagcatgtaaat

SEQ ID NO: 44253 - DNA, 2669 bp, Homo sapiens
caaattgattctggagcatgtatacatggtagaatctcaaacttcaagcataagaaaattcataaactctatcgttaatgcccagctatgacgatgctgcagacttgtgcaaagagttaatagactgtactactaacaggggagggggcagctcacccaataacagatgtctgattacagacgcagtacaagagcgaaaagtacagactttaaagccggtcaacccggggctctgccacacactgtttacctaaacctgggtttcctccctgtaaaatgggaattcacatctacttcataagtagatattaacgagctaaaacacctaacttagtacgtagttacgatgatgatgactcaatttataatactaagctaattaatgtctgttgagtttaactaaaagcagaggacctggagaaaagaccggtctaggtcactgccactggcccgcaagctccttttcacaaatgtcccgatgatgacatgtcatgagcagaagaccaggcaatttcaggccataggagagaaaggatgcagaggacaggacgagacttgtaatgccaaaaggggcccagaggccgcgcatcccacctatcgaagcctgggccgcggcgatgccgccaggtctccaggatgaaccgaagggaggccgatggtggagaatagagcacgcaaggtccctcaccttcactacagctgtcccccggctgccctgccggccactgtctactcccgctccgagcttgtttacaaccagggtagccatcctcgcaggggaagcgccacagaaacagccttcagagtcctcaactgagaggcggggttgagccacctacccagaggcctctgcgcacgccaccggcgcacaggcgcagtaggacactgggcgccgcttagccgactcttactcctcctccccgcaatcgtcgggtggttagttgcacagcctcgcgcatgggcacttttgttatttttcattatgtagtctgcagctgctggaggaaagacaagaaaaaaaaagaagggacaaaacgattaaagttttggggtgaaaactccagatcctttaatgatttttcctctcgaatccaaaccagccagggcgtgaactgagggcggtgagggggtacgggcatctccctgcatgcaacgcggtttttgtataaactacaaatcccagcatgccactctctctctctctcttttttttttttttttttttttttaaaaaaaaaactccggcaacgttggcctttgggaggccgcgtattgttacctaggggtggtttcttttcctgcagtcgcgatgtgtgattgcagatggaaaacaaagtattttatgcctacgtttctaagatagaagaaatggacttgttgaaaagaagccagtttgtaaaggacacagtaggagaatttaaggtaccaccaccagagagaggttgagagtgcgtttgacttttggttttgccaaacgcgaggttttccgtttccttccggggcaagttgaacctgtccagcccccgtaggctgtgggtcaaaagtgccggtcaaaatggaagtgaatccccctaaacaggagcacctgctggcgctaaaaggtaaacttttgcgaacctgattcccccttttctgtttccttgcattccctacttatcgaagcctttgccatgtaggcctcatccttcttaaacactcagtgctcgccctcctgctctgtcctttgccgccaagcgggaggaagcgatttctcctggatgctttttaggtttatgggcccctttctagaacgaaatagatacctggtaaatcgttctttctgatctgtgctgcttcagtcacgagattttagccgcagaagctgacgtcccgctcctaccgtggagatctctgtgaattacagcgggcatccaaagtgctttttccttctgtctcttgtttcttcctgtggcactgacgaagttaatcaggcttcagcttcccctgtaaaattagtattgcatgacagtagtgcagagaatttagcaatacatagtaatacaacatataacttagatttattcaaaacaaactgcagtttacttcaaatcactgtgtatgtgggaaatatgtccgagatctaatgtcaactctcattttttgtacacagccattttgagtaagtttggtgatttaattagatcattatttaggaaaaaacagcagcacttttttttttaggacaatttttttaatgcctattttctggaaaccttttatttgaaatcttttcagctttattttatttgttttttactacaacaaatgcgctttttgtttcttggatgccttaatatatggttaacaatgacttcttgaatgagctgaggaaatgctcaataaacattcgggttcaattgaattgcgcttactttacttatggcatccattttgaggaacgccttatccttcccattatgatgtagtcatcagactttctagaagctcatcagtctcatataatgatgcctgtgttagcgagattgtctcttactgtggaactttgtaatgtttagtgatacagtgatgggacctgtaagcttaacctgagcaaatgatctagactaaaatggagattaaaatggattgttactcgtggagaagagggaaaagaagaaaagcaactaatt

SEQ ID NO: 44254 - DNA, 1561 bp, Homo sapiens
cggggctggagcccggctcgggatcgcagcactggtcgcggcggcgcaaacttccccggcccctaggccgtagaccccagaacccaccaggctgtgctctctctcaggcggcagggtctggccagcaccgcccctggggcggggccggacgcgagggctggggcggggccagacacgcgagctggggcggggcacggcgcggggcggggctggtaggcgccggcgtggagctgccgcacgtgggagggcgctggccaggcagccactgtggcctctgcggctaggccggctcgagactcccgggcgcccaggcgctgccgcccgcctcgccgccccacgccgaaggaccacgcgcccgccgccgccagcctctcagcgctcccatgatcgcccggtgccttttggctgtgcgaagcctccgcaggtacctccagcgcgcgggttaaccttggccgtgggcagggcggggtctttcgccgtgtggtgcctggagcccggacccaccccttcccgaccgcgcctctccgacgctcccgggacgcaccctccccgcggcttgcaaggtggacccctgggggacacctggcgcggccacctggggccacctttcccgcctccgctccctcgggaggacgtccattcctctttgtttgggactgcctcagccgcagtcagcgaggctggtcacagacgcggcccaaaatgaatgcaaatagtttggataagaaaatcatttcacgttcaatcccaatgcagaactacagacctgtcattaaaagtgccgcagctgtggactcagaacaattgtgtttgctcctcgcgcccattattagcattccaatcgtttaacatccacccgagatgaaacctctttggtggtgttgcttgtttccgtccatgctctctgacttccttttttattttcctcctccccataaaacaaacattctgcctcttgccggtgcaaattgacttggcccaaaatggagaaaatgatcgcttggacacggctttgggcagcctgagctgctgttttggattgcttcctagccctctaaccacaccccactgcaacagaccagtagcaagatggtgagggaattaaattctttgcacggatgcgctggttttcggaaacaatgccgccaccatccccgtttccaaatctgcccagaactgtaaatccaaatgaagattcaacagaataaagaaaatgtgtgcttcttgctagctatcaacaaaactactttgtaacatgtcagcatttaagctttctacagttcccttttgcacattgccactcgtctgtgtggatggagctttgtgttgctcagtccgtagagttagggagcaggcaggcgacagtggttaattacaaagagttaatgtggtgattggtgaccatatttcagcctgtcgttttttgctagtctccaggctgcaatcgatatagctgtcaaatgaagttataccaagaaatgaagacttcacataatgcaggggtgagaggagggaataaatcttcatataagagcaattctcggccgggcgctgtggctca

SEQ ID NO: 44255 - DNA, 3407 bp, Homo sapiens
taataaataattatctctagaatacagacggaagaactgaaccagggacttcagggacccagaggctaattatcatcactgtacacagttaagtgcagcagagaatgggggtgacgaatggttcgctccgcattacgctccttctctgggtaaaacaaggccgtcttttctgtgaacatatttaaagcaagaactgcaaaaactgtgcaatgttatggttgaggctttctatttgccatatgtgttgacagaatgcttaagagtctctctccgcaataaacgcgaaccctgccaggctgaattattagggccagcgcaattcaacgactgcaccaccaccgaaccgctggggttggaagcctgcgtcgcatcggagcgtacccatgtttcttctaacaaaggcacgatcttgaggccatttcgcgggcccttttcccactcccagcgccagctttgtctccccgccggtatgaggctgagacttggaggaggctgagctgcgccgctggggaacaagctcgaagggcgggcgtgggaagctgcaccgcgctgccgctgtggtttcctgcgacctgaccgtgccattagaggaagttggagtgctgcagctgcaagagatacctgctgccttcaaatcagggctggactccaacaacccctgtgcaccgattactgtcgtacaaagaaactccatcggccggcgcggcggaggcctgtgggctctctatctctctggctgggcgctgggccgcgagcagacagcagggtcggcgttgccagcgttccccaccctggggggctcgggagtccgggagtgcggggtcggggagcgggcagggagcagcgggcaggcctcgaggggcctgggccagagtgggcctcacggcgcgccttgcacgcgaacccacggccgccggctgcccctcccccggcccccggcccgctgcccccagccgccgacgtcggcccgcaccgcccccgcgcgctgactggcccgcgcaggcctcctgcccggctgttggcggttggggcgaagccggcgggaggccgccccgcccccgcccccgccgcagagtcgcggcgcgcagcctcttcacccgtcgcggccggggcggtggcgctgttgccgccgcggcctgtgaggcagtaactcccctccgcccctgccccattcctcctcctttctctccgctccctccgtcctccctcccctcgccgtctctcgctcgagtgaatgtggcgcggcggcgcgggacgcagtctcggcccctgccgcggccccgcaagctcgtgaggagacggagctgcctcctgctcccgccccctgcgcgtctcggggagccaccgccgctggcgaaggagaacaagcagggcagcggagggacggtggcgggaaaacgggagagggaggagaagagggttcgagggcgagtagggaaagcggggagggacggacggaaggacggacggcccgacggacggcccggggagggggccgctattgagcctgcccgactcctcggctccggctccgggtggcggcggcagcggcgtcgcggacgaagggcgcggcaagcgctatcgagacaataaccctgccgcccggctctgggggcaacggagaggaagcggtggcggcctagcgcggccgaggctcgccgagcgcccgggcagcgtcctcgcccccgccggccgggtgctgctgccgtccggtgtgccgggcgcgccggttgcccggaacccgaggctcccggcggccgtcccctcccctccccctctccggtgcgcgcggagctggttttccgggttcccctggacggagctggatcctgcttctcgccaaggcaggaagtgagtttcgcactgcaattccgggcggtgtcacgagtgaaaagttttgtttttttttttttcggcggagatcctcgttggggctgggaaactcctgcaaaactcgagaccaggaagccagcccgcaccccaacccccaccaaagccacctactcttcttctgtgggaggccagtccacatccgctctcacccgagagagatattcagctggatccaaagtgactgatgaagggaaggaaatcatgtcaagcgaagccttgaaaaagctgccctgagacggtgtcccgccgaaaggtaattttcacgaaaagtgtctctgagtcacaaagttcatgggactttgtgactcggaaaagagatgattctttagtgtttttcactcttctccaagttgccctaaaccctccttttctcatatcgaagcggttaataattgaggggctaaataatcgaactgcaccccaccgcgtcccttctcccccctgccccccccaccatctggactttgaattttttggaagaggttgtaagaatgcggtgggacgaaaagtttttagtaatccgaagaacgattgcctttgttcagcacaggggccagaagttttggctttctggaacgtatagagtgtatattaagttgctcagccaggcaccttctgtttgggaagaaagtttggtcgctgcagtgagtgatttgctgttattgagatggctgccgcgtttgtttatactcataccgattatattggcgcttgcgttaattgtatatagaggtatttatttttatttttttatttccaaccctgatcagtatatttagttagattttagaaaccaaaaaatcttgccattcttagttgtttttcagggtgagtaatatatttctttagttgtgtgtagtgtgtgtttttcagacgtttagcgccgtataacttgtttaattaattgaaagcaaggatcgactaggcttttcttgtaactgatccattacgaagaaaaaaggagtaaggactaagaatagggagagataattaaacaacattaacaacctgtaagacgtttaataggacttctgtacagttcagaacagacgatgggaggggaagtaaaacgcttaaaacgattttcaagggaatcacagtgattgtgataaaaagctgtgcttttcgagtagtatggtctttacatttttgtgttgtcccaaatgtttttggtcggttctgcataaatagtgataggttctgcctacatctgtgggggcaggattcatgaagcatggcagacattccaccagtcagagctatgaacacttctgaaccaatggggactagttttgatagcagtaaacccaaagtttttttcagtggtgttttagtctttttctgtttactttttttcccggtatttttgcggtacagggaggtgaaatacaatactgtacttttgaatatatattgaataaatttggtaatcctgttggtaggtatatcctaaatatatattgatgtttagattgcctatgctgtctcacgtaatgaccggaaacccgaggaga

SEQ ID NO: 44256 - DNA, 2755 bp, Homo sapiens
acttgggcatgtagcggcagtagtttccattttttcacacatattctttaaaagacgtgtaagcaaggatggatttgaaaaaaaaatacaatttttagttatttgtgaaggacatttttaaagtgaaactagcatactttaaaaccttaaatgttgtatgatgtgaagaatacaaaatgcaactaccagtacaagactggcgccactgccttgattgctgctaaggtgtcagcagtttaatcttttacgttaccagtgcaaatggcaacaaagtgaaaaaggtcaagaaactcttaatattattacgaaaatcgttttgaccttgccaacttactgaaaaggtctcggtacccttagggatctgcggagggcattttgggagcagctgccatggactcactactgttgtctctcattaggttgcaagttctatgtgaactgtctttaactgtctgttacgtgcccttgcctaatagtgcctgggacatagcactcaataaacatcaacacctgtggaacgagggaattaaaaacaggttataaacaacccctgcacagccttcatcttactgcctctttccttaattcaacctgaacctacgcattttgtaaaattttgtttttttcacaattaggacgcctgccaacttttaaaaatagttggagttggggtgctgcctgtatgtgataaggctgccctatagtttggtcaagtgttcttccgtgttgtccaagagtcattccttctttacagtcccgcaccagtaggccaggccgcttggtttcccaatccgagaccggaaggaaccgggtagacatgagcacaagactctcatcgacttttggggaaaacaaaaacaccgataaaaatccaggcggtgaaacgagcagcaacagccccagggacccgggagctggaggccgcagccgcgcgagaaccgccgggttgccggggcgacgcttccggctggcgcgcgcagccccgggagcaggggagttgtgaaatgggcggctagatctgcccggcgctgtgaattcgccagcgggagcgcgctcgcggccgcgcgttctccgctttcccggctccgtcgctgacgcgtcgtagacgttggggagcgggaaggcaacggcagcgggatcgggatgaacagcggcggcggcttcggtttgggcttaggcttcggcctcacccccacgtcggtgattcaggtgacgaatctgtcgtcggcggtgaccagcgagcagatgcggacgcttttttccttcctaggagaaatcgaggagctgcggctctaccccccggagtaagtgctggagctcggctgggggaggggcgcgggcgccatagagacctcgggagccgaggcgtggaggagagcgcggacgcgggcgcgcggtgcatgtcacgtgatcgcgccggcttaccttggtgcccatatttgattagggcacccgggttccgccgtcctgctctccttagtcggatttggggggttaactactgcacggagcccttaccaaggatttagaatggttgccctttctgtgcctccgggacttgtgttcgctgctgggtcttcgaattccgtgcccccaccctcttatttccccccgaacttaagatggccgcaggtgggcccggaacagccctcatggcaaacgtctcagagcgtttttccactctgaaaatcgcggagaccgcgcctgagccacagtccagtttttaaggccttggtgtcaggccgttttgctgacgagaaagcctgctgctggtgacaagatggaactggggctgtgtttgtttcccaggacggtcgcacaaacttagcattttggtttatctaaccgagcgcatccatgttcccaaagatcatgtctgttagcccttttgacagcagattaaattttcctcctgaaaggtcacactgtcccaaagctttcagaaaaagtgtaagtcggtgcagggttatccctcccgtatacatttaaagtccagatcttggctggcattcacagctcgcggccacttcccagatagtgtattttggaatggtaaaatttccctcgtacgatattatttagaaaactcgcaaggggtttgtaggttgttcacattcttgcacacaaactttttttcttttttaatggtagatcttacagtattaagatcctccgttttttgttcattatatcaaaatcctttgagggaaggggtaattgttacccaagatttatttctttaaaaaaattttgatttatttcctagtgatgcatttagacctatttttctttagttttctatctcaggttataacagtgctgttgcataactatataaaagttgtgtggatatttaaaatttactttttaagtttttcttctctgctttttgttttggaatatttcatgcatacagaaaagttgaaagagtaatacattgaacatccatgttccttttacgagcattttgtctgtttttggctacagttgattattaaaatttccccagttattttaataatgcttttttgtctgcttttgatctagtatgtaattagataacactgtctcccttgaatatgccaagtaatccatgtattaatagttatctcctttaatctaggacagtcccgtccccttttaaagattctaaagtcgtgacattgatattttgttttgtagttcattttgtcttgtaatatgactcataatctgagtttatatagatgagatatatagatgaggtatatagaga

SEQ ID NO: 44257 - DNA, 410 bp, Homo sapiens
tctttctttgattcagaaggcattttgagacctgcctatatagctctaggacactgttatatgcataaatacacttatcgttaaacactacactagatgtccacatatagaaagaaaggattgcatcacaaacttcagccatccacatcttcctatgacaccatttcacccacatcagtgccctgctcagaacctttagtgactcatcagtgtttacaaaataaattccaaattccttgcctggagattcaggactcaaggcttccacccatcctataaataaacctactgctcagccagcctattttctatgggttttaggctacttcactgtgataattagtgtcactattgggtgtgtgatatacaccatgcactgttctaggcaccaaatactgtgttctttctaa

SEQ ID NO: 44258 - DNA, 1068 bp, Homo sapiens
agtagtaatgtagccatttacagttgaggaaactgaggcccaaagagcttaaacggaaaagcagagattagaggtcactcccctttgggtccgctcactataccacgaagtttctgtccttttcctccaacacgctggtgagtccgtgtgcgtgggtgactgtgtgtgtgtggttccttttttccctatagagccctccttcttgtccgttttcttgattccactttttggagacaaagtccagttcttctccaaggtctcaccatccgctcgccgtctccctctgacgtcccaaggacggtcagccactcccccgctaagttcggagtctcagcccttggctccgattctgggctccgcccccaccctccggggacccccgcctggtccctgtcccctgcgcccaggcgctccagcgggaccacggcccgcgcccgggccccgcctcccctacctgaggccctcatggccggaggcgtcgcagcctccgcccaccagcgcgcctgccctgccattggctctgcgggctgcccgtctccttgctccgtcccggaggcaggttttgcaaggagaagccgcagtacccgcggctcgggtgcagcgcgggagcacagtggagcgcagatcgcggacccgagcgggcatgtccccgcgcgcgggagcctccgtttgcggccgggcccgggcggctgtgaacttagcagcgggctcctgcggccccgtcactgccatgtagtcgctggcggggctccctgcagcccgggagcggcagtgccagtgagcctgagcccaggagcccgcgtcttccccgggaggcgctgagtgcgcgccgcgcccccgccgctcgggaggcactttgggccagacagggaaatgggggagaaagtttcggaggcgccagagccggtgccccgcggctgcagtggccacggcagccggactccagcctctgcgctggtcgccgcgtcctctccgggtgcttcctcggccgagtcctcctcgggctcagaaactctgtcggaggaaggggagcccggcggcttctccagagagcatcagccgccgccg

SEQ ID NO: 44259 - DNA, 598 bp, Homo sapiens
tggcaaaataatcttttttgggctgttaaatctgggtctttcactttgtgttgtctttttctggtatttcacgcaggaaccaggacccttgtaaggccttgccttggggatatttgcctggcaggcaactgaagcagtttgaagttgaggctcctctcagttgctttgtaaaaagtttaaacctacagaagagagaatgctgtgtgtcctggtgtggagggtggtttgtttgttttgagggaagagagagaaagtgagtagatttccctgggccaggaagggagtcaagattagtgggtcctgggttacaggggttggagcccagtaaaccttttggtggcagcatgaggcaacagaggacactggctacttggtgggtctggggaggctggactttagacaccgggtttcctgcctggcagaggttcaggtgccatgcaagtacagatatgctgattttaccggcctgtgggtgaccatgaggattttggcagcaagcacaacaggctagaggccctttgcttctgtgacatccgaggaatagctctgagggatcagtttctaccacaggccttggaatcagaatgagtttgatctc

SEQ ID NO: 44260 - DNA, 2318 bp, Homo sapiens
ttaattggcacttagtattcttgtcttcaggctatctaacctgatgttgctttatcattctatctcctgaaacatcttgtgagctcttagaagagagaccagggtgaggtgcaatctctactgtcccctaatccgagtttcttcaaatccaggaagaggggaagatttgtctccttggagtactcacttaaactgagccctcatccacaatttagtgcttttgcctactcttgccattcctgtctgttgttgacttttatcatttttaggtgagcttttcccttcccaggtgtttctctttctcttactttccttcgtaaacctaccagtgctctgtcttccctgttaaacttcagcccagtgccttattgtttatttgacctaccttgatctgaaatatccatgtggctttgaaagtcatttggagttctatgcctgcccttgtccaatgtacgctggttaccttttagagtttgtctgtccccagagttgataaataacatctccagtgactatgtaactttagctcagcatttctgattaaaccatttactgtttaccccaacagtcattaaaacgtacagtgcctggtagtgtattgcacagtgctgaccatgtggaaagcataaggagtgcgagaaggtgatgccatctccaattatattttttgagtatcctactaagcctactgagtagtagtaaccataggtcttttaggcttttttcacatgaattggggacacctagacttggcctcctctattggaaagctgcaagtgtatcataggccatgctgtggaaactttgaacagctggaatcctttcagttgcattaatcaccataagtaatgattaatctgtgtgagacgatggaaaagctctggcttagggaaactccactcctgttccctcacttactgggcatgtgaccttggacaagtcattagctttttatatctcagttttgtcattcatcaaataagaaccaccatacttgccttgtttgccgcagagaattgttaatttgagggtcaaataatgactgcagaagcatttgaagaactttggaaacgcttgtcagggtaagatattctgcgttgttatttagtaagtattgtaggattctaaaatctgggaaggggattaatttatatgcttctcttattttagaaactccacaacccttaattgaggaattgttgaagtttgttttcattgtccgggattagaaagggcttgctgtatttttcttctagttattgcttcccagccacgagctaaaatttcaaatgccactggctagcagtttttggaagattttcaactcccttttcttcaaatacaagaatgttctgaatgaccctatgttcctttctcttcccttgattacggtcacttcatccaagcaattttagcctttcttcagatacttgtttgtagttctgagagaagaaaacaccgtcatttaaagaacttcttatctagcactgttgaaaaattgaggaggtgattggaaaaattgaggaggtgatttttaagagagccagagcaatggaggttttggtgaaggtgtcatctgtactttgataacctcattcctgttcttccggaacatgaaggtgttcactggtggttctgctgatcacgcctttacaggggtggctactctttctccagaaataggtgtcctgtggggcattttgaagtagaatgttgatagttgctttcaattttagactggtaaataagaattgggcatttgaatttcaatatactcactgtgtaactgttattgagtatgctttaagtgacctataatactgcttcatttaactttattgtcctaataactttcttagagtgacaataacttaggttagccacttgcctagggttctgaaaccaagtaaatggtggagctggaattgctgttcttgtcagtcattagactagatcggttttcttcttcctacaaattttatatactaaaaaattttgaaaaaagacatttttctttgggaaaaatagggaatgtcagatccctttggagatggtttattaagaattcagtatcttttcagtacctattggttatgatagcttaattttaaattactactttttcaagtgtcttaactcccctagggtttttgccaacgccaaagaaatatctcacattaatgccattttttgatgtgcaaagactaaattgagtaaaaaacttttcagagtagatggattacagtaaataaaacggctacataaaaaatgaatttggtgtcttagtccattcaggttcctataacagaatactatag

SEQ ID NO: 44261 - DNA, 1049 bp, Homo sapiens
aaaatatgttgctgaaacaaactttcatgaaacaatattttaccttatggtagcatactctgatattttctcttccattctatttcaatttctgcaaaatgctattctatttcagtttctgcaaaatgactctgcattgattccactaatgggtcaagacccacggtctgaaagtcacctgcacaggcttctccaggttatcctgcaatggacaggatgtttcttcctcattagatttctttgtggtccagtgtatccagacacctttcactcagtggaggggagagaggaggagggcagtaaaaagtatagtttccaagttcagtgcactatagaaacatttgaggcaaaattgtgctgagcacttcttgagccaactgatggccacatggtgagacagttaaagagctgcacacaaggatggttatttgtgttgcagatgtcatttatgtggcttttttggagggaggggagagggctatcgttttttttcctactccctttgctgccagaatgcctgttctcattagaatacagagttggtagagttttgggtgccggaagagcctcagaggtcaggagtccacaggtccctggtccaaaactagtgactacttggtgttgcctgtggtcatgggtcactgtcaactccttgtgactcacttggatcactctttataatgttgcagtggaaagccccctgcagctgtggtgtttgcttctgggactctgggttgggttcatgttgaaaaccattgttggttttctctgatcaaataactcaggtttttaagctctaaaatgggggataataccatatactgggtttgattgtttcatgaggattaaatgagacaacatgcagaaagtatagtgtctgaggcacaggaaacatttaaaataaatggctactgttattttcttcctgtaactaaaatattatggacattggcctactttgctcattttaatttgcactaggaaagatatggagcctttctcactttcatatatagaatgagctaaaattaaagttcttctgttggtgt

SEQ ID NO: 44262 - DNA, 595 bp, Homo sapiens
actaatatgatagactaaccctcattctttgtcgcatctcctgctttcttcttcttcacagaccttattaccacctgaagaaaggaactttgttctggtcactgctgtctgcacagtggccaaaccacacttggcacatagtagatgctcagtgaatttatataaatcaggcacccacaaacctgttctataaagggccagatagtaaatattttaggctttgtgggctatatggtctctgtggcagctgctcaactctgctatagtaggcagcatgtagacacaacataaagaacgagtgtggctgtggtccaataaaattttatttggcacacaggctgtgtttgccaatccctggaatgtcaataacagtgaaggtcaggaatgtacctttagtggatatagtggtttgagctttgtgggaacgggacctctcaacagtggactctaaaggtgactgtaacctttagagaaatatgtggaattggaggaaaaagaaccccatagccctggtgaggaggtggcctggcttctggcagctgtaatgatactcatggtcaggggatcggtgtgcttcaccagccaggccagtcag

SEQ ID NO: 44263 - DNA, 1444 bp, Homo sapiens
catatcagaaaactctgtcaaacatgtggagaggattgccttttatgctgcgttccccagcgttatgctcttcctgcatcatgagttaaagcgatggaattttgtccagggtcagagcctctgcaaaacaggaaacctgttggactcagtgaaataatgactctcaatatccccattatggatgattaggggtgtccttgctctaggtttccttgactcctttatgcatctttgtattgtgatgagggggtcataagccaaactggggttccatgtctagaggctgaccctgtggcattgttgcagagctgatggaaattttggggggttctgtctagttttgtccagtttgttctattctggttcataccccaattcgaagctgaggaagcaggcagaaactagagtctatcaagtcttcgctaaggaaacatctgtgccctcctcctgaggagtctctccgtttgttggctggttctccttccttctgcatccagttccctcctcctgtctattctcccctccacctcccctttcccctctctctttaccctactcctcttctgctttcctccccccttttctcttctcctgtcctttttcatttactccatctcctcctttcctggagttcacttgagcatttctttgcccagagaagtaagccagggtaaggcgttccttcttcagggcaaggcgttccttctgcagaccaccatcacctagccgagctctggtgagaatctgtggaactgcctcttgcctgtctctttccaccctgtgggtctgtaaacttcttaagatcaagaaaattgtcttgcccccgttacatccccaatacatggtcaataaatatttgttattttcaagggctggagttagcagttgattttaattctctttgtgtttttgagctgttccattaggaatctatgttatgtattatttttataatcagggcagaaagtttaaaaagaaatataatttgataaaagctgtgtgcacaatagaggagactctctcaaggtctgcttagatgttaatggggtccttggcaaaagcatattacctcacaggcatgaggcaattatttatagtggttacatcagccagaataaagatgatgaattctggattcttgtccctgcacatcctctgactcactgcagaattccaggtaaagaatttgcctgatttgccttttattgcctctgtaactcctccagagttcaagtttagagcttttctgttaaaaaataaaaaataaagcattcttttgcctcaacagctgaagcccgaggtgctttagaattagagaattgtagaattttaagtctaggagagaaaccttcgatttaatctagcttcattacttcatctttcggttaagaacactgaatttcagagaaataaaatgaactgaagttatcaaaatagtgaatgt

SEQ ID NO: 44264 - DNA, 735 bp, Homo sapiens
cgttattgcttagatctcctcattgtaagtgttaatgttgtaatactctgctactgtaggggtatcctggtctcagctgcctgacttgtccaaggactgtcctagtttgttagtccaggaaaataagctaggtcagctatcatatcccctcaaatgaaaaaagacggctagccgcctagactgcaattgcaaggaaaggtcaatcaatatattacctttctttccatgtgttccttggccgccggcagagttgtgccttctcactagtggtaatctcttctgctaaattttattttaaccttgcaaataggtgaaaggaagggcacagttaataacgtcttcccccatatacctctgggcatatcatttgggctgaatcttgcccctccttcccctagcagtaagccctgcacagtcctgcttcgacggagtgttatgcaagtagctggttttatttactgtgggaatttctcctagagctctgtcatgctcttgcacagacagaatgcaaacatttttgtgatttttgacagtagctgggatctatgtggaatagggggttttcaaaacgtttctcagtcaatatgtttactctacttcaccagccatgcagtgtgatatggtgcatcaccaatacttgaaatagactgcaacaggaggtcagaatggggcatagattttctcacacagcatgttagatgaaatgattttgtgtactttgaagtggaaaattca

SEQ ID NO: 44265 - DNA, 2216 bp, Homo sapiens
agtcattacttggtgatgaaaaataattaacatactctggacttgggcagatgtggattcaaagacaagctaagccttctaccagctctatgaccttgtgtgagttacttagcctgtgtgtgcctcagttctctcatctctaaaatgagaataatagtgaagtttaaataagataatgtatgtcactgtgcagtaaatgtgagatgccattattaaggtagtgaaggtagatgagcttagtaaagaaagacagttcccactatttgtgtaaaaaatttaaagtggaaaaggtggttgtcatgaatgatgtttaacttttcatctaagcaaaatctgggattttattttacagtttgtctcatattcctgctcatcagggactcgctggtgtaacttaaatcgtttgccatcttttcatccactttcagatttgcattttgcttaacttccgaaaggccctcagtgcttttagacagtcttttctcctcatctctgaatggtaccctgtcctgagctccaccacaactattctaaatcagcccaggagttaagcatttcctctcaactcctgtggatcctgtacacacatttctctcctgactctgcccctcctcctcctcctcactgcctcttccttgttcctggccctcagccatgcttcctggataattaaagaagtgtcctaacttctctcccatgttgccctcccagagccatgtgacaccctaatgccagagtaatcttttttaacatgttgattaggccatcttattcccctctttaaaatgttccatgagctcaccattccctataagataaaggcagccacttccaaaacccttctatgatgtggccctgtccctgcctccatactcctgtcctgctgatttttccttcctgatctctgttccagccatgttgtttcctgagtgtgttctgtttcactccaccctacctgactacgtctgttctctcttctggaattcccctttctcacctactcccaaggctgccaggctaattcccagacattgcaaaagaaagaccaggctcaagtattgtgtcacttaggaatttttgaattgcaaagactagaaaacacaagttaaactggtttaaacaataaagagactcgattggctcatgtaccagagaagtccaaatacacgcaagggtagatgtattgtttcagagatttcacccaagacccaggttctaccaggctttcttgtctgctacctgtgacacctattcttgtggctgccattagttttgtaggtttaatgctacttctttctcgttagctctctcggacaagggaggaagttctttcccagaagccctgagcaaacatcattttgcatcttatgcatcattatgcatcattttgcatttgctcaggttgagtcacatgtcatctttaaaccaattactttgatgaaagcagtgagttttgtcattagtttaattggagcttatccttgagattgaaggtagtatcagttccactgtattttgttagcatgaataacaagaaacattggggaagaaacagtcctgaccctcctcagagaaactgatcaccctcctcccttttgtattactgcatactttgaaaagacctctattccaggccttttcacactgtattttacagtgagtaaagtcctttctccccagtgtctggcacagcaccagccatatccacctttactaaaaagtatgtgattgaataaaggaaacccattttgttggctttaatccccacatgtgcccttgcctttgcccttggtagaagacttttgccttctgtattactgaaattacagaacttcaagtgaattgcttcagttttactttgcttatctttgaaaagtgcctgttttcacctgttcctttcttcctcgttaggggaaagagtgccctctttattatcagtaccagccctccctgctcgtgtatttattcaaacctctcctttcagttgctcacatcaccactgtctcccactctctgacattgccgtggtggagtataggggaaaaaattggaactggatgacataggttcatttgattccactatctcatggctttgcaactctggtcaattgctgatctcctctgggctttccatgggaagacttgtgtgtcctgtccaggcagccagctgattttgtgatgaagcttatagacgcagtttatgataaaatctta

SEQ ID NO: 44266 - DNA, 1246 bp, Homo sapiens
tacttgatatgcagagctgcaagcctcgttcctttaacaaaatcagtgcagtgtgcactgccgttaacctgaggaaagcagctgacatctcttgattacggctagaggtggaaggacccaaacttgcagcctccccctccccctcgagagagtgttagtccagtcctttagagaggttcggtttggctctctgtcatcaccgggacgctggcagggagtgtgtgtcatggttacaatagagtgtgctaacatataacaaccatgaaagcccagcgggaaaggctacagattccggggctgaccttggagtaagtattgtctgtctttaatattttaatgctttctgcatggcactcgctttctggcgaccaatagctatttagcatttgtttgtactgacagcctcagagcactgcagtgtgaggtggaggaacatgtcttaaatgcatggcatttggtttcagctaatgtggacacccagaccagcattttgcattgcagtcagaggaaaagcattgctgcatatttaaagttactaaaccccagttctggaaacatcttaacagctcattgtgaaagaatgtatcagtaggccatggtgtatctgtctttttctccttctctcttactgtttgtttatccctatgttgcctttttctaaagaaaggcctctgtctgcattgaataatagaagacattacaatggattagagtgcaagagaagggttatttgtgacgttcattagatgtgatccatgttttatctgtgcaacagaatattaatgaactgtggtacatttagaatcctctctgcagaatctccagccactgcatgcaatgtgtttacctagttgagctgtgtgtttgcttagctgtttttttttttaacccattaactcatctgactgccttgtgatgtgatgtagctacatgaacatgtccacatctaatttgtggcgcagaagttagacatctgtgatgcaggaagtgtcagcaaatttttattttaaatctgttagtcaaagatgcagaagctgtgagttagtctgtgctgtcacacttaaaataataaacagtaaaatataaatccggtagacaaacataaatatccctctttctaacttacagcacagatataaaattacatttcagtgaattctgtacagtcccaataatctcatactggactgtctgcagaaagagactgcagaatgagaactgtgcttggttctgaggatttattatt

SEQ ID NO: 44267 - DNA, 492 bp, Homo sapiens
ggactcacttacaaaaagttagagggctctcacaaccttcttgctagctgtgacattcttcatattagaggtacgaatagtatttacccattgccctaacatttctcccatctccacccccaccctaacattcaactctcaccatctgtgtggaatattttagtggcatgcactcattcttctacttaaccctcctctctctagctggaaatgcataactaagccatagctctgtgtttaaaacccaggggcattaacctcccgctttgcttttgcctctgttttttgttgtgctgtttcctggttgttttctttggacttagtagatatcatttcacattaggctttttctttctttcctcttcttcctttactttttttctttcttttctcaatcttgtctacattaagaggagacacttcaaagtaactttttaaaaatatgaactcagctgtgtcaaacattccattttatgattagaaggactgaat

SEQ ID NO: 44268 - DNA, 1041 bp, Homo sapiens
tgcataggaacactttttatcattgcccctgaggattagataaaatattgggtctttgttataaggaagacttgtttttccttgcaaaagtgcttaaaaacgcatcttcctatggggaaatgttagttgctttgctttgtaaaaactacgatatttcacctaaatttttatttgcattgtcttcttaatctagaataaaatatactcaatataaaatggcactggattttctttgatgcaaaaatcacatgtcaaagttatctgccaagttgctttgtgacaaagaaaaggctcaaataaaaatggcagctgtagtttttaaaatgtaaatttcagcaggaagcattttacttgttctgtattttagagctgaaaagggcaagtgattagatgattacctagtggtgtagataagcttgccatagtgattctggcctaaagggaacacagtcccttaactgagctatgctatttttactgcaatcaattctcccacttggaatgacgttattttaactttcagtctcactcccaggagcctgagtccaaccccatccagcccaggcagtccttgtagtcctctcttggcctttcacttttggaggtaagcatgctccagggcctgcccagggctgctttgtctttctgttgccccatttcccaccaccagcatttgattacttcagactctgcaatccacaatccacagggtgaggaaactggttgaattgtttacttggtgacttacttgatcacttactctatttagcatatttactcatatttcacttggtgtctcttgactcattgttcaatgtgtgtgtatatgtgacagtttttcattttgctttcttagggaatgatctgcactgaattctgtaagttttgatcaatataaagatataatttattggtttctagaaaacatttcctaattcctatgagagtattataatacctgttgcctcaaactattttatacactattatttacaggataatgtatttaaattgtctaaagtgttaatattttttaaatca

SEQ ID NO: 44269 - DNA, 997 bp, Homo sapiens
cagaccatcaggaaggccaggcacccagtgagctggaaagatgcagactgtattcctgtactgagcagaggattagactacgttattctcaaaagcccttccatcttgaaaatctcacactccttaaaaaaaaaaaaaaaaagaaaaacatcttccatcagggctggagaaataggcaaaatacacactttgtctacaaactaaatatatatatatatatatggccctaaatatcagtttattagttaccagtgtgacagagagcatcttcaagaccttaagtggaatttatgtacaactttgctttcctccttctgaggcaaccataaccactcagaatttctcatgacccccagtacttaataaattggctaccacttaggagctgtttgtataatggtgacatcagtgcctcctgagtaatatagatgtgactcgtgccagctcctaatctggactgtgattagatagcaagattccagaagaagctatctcatttcacattctcagtggctttcttggcaccgagcacgccttgccatcaatagggacccagtaagtagctgtaggctggaacaccattactcagtggccaagtttctattatgccgtagtgatgttcttttgtacttctgcttcatcccccaacatcttcctggatgataaccactcaagagcctgctggctgcatgtcttgtgttccttgtattttacttcttccatctttttctttgcatctccctttggtttctggagtctcagagtcataaacacacagtcagctatgccagagttggcagtagagaaggtatgctgtttcttctccttccatctcccaaatctctctctccctgtttcagctgtgactgaaaacacacatgccatgttgctggtaggatatagtactacttccagagaagaatattatcactgtgccatcaactccacaaggacaaccatttttgtctactttttcacacatatatccacaaaacct

SEQ ID NO: 44270 - DNA, 639 bp, Homo sapiens
tgtggattacactgactgtagttaggattacactgactatagttaggacatggaagtgtgaaatagttacaacgtggttgcgtttaattaaagttgctctttttgtgatgctgaggttaataattatgacgctgtgcaaatgtttaatactgctttattttaaaaaaaactcaatgttttgttgttttgtgcctagctctccactggcctaaagctgacttttcacttaagtttaccatcctctgaattatttccattacaacagattttaagaatgacagttggctgggggcattgtaattgtatacttcagccactagagggaagagactctagtatttattctggggaaagaaaacgtgcttcatctctctgattctgtcactgacctttaatctgaagggggttatccttagcattgggattacccttcttcctcttttagagaaaaaactttgggaaggaaaaggtagaattaaggatattggaccagggcttgatatatgggtgtatctgcctgaaatttggggttcaaccagttccttcaagacagcttccaatgggcaagcagctttgttgggggaagtgagtgattcttccagaactattttatctgttagtataaaataacagtaacat

SEQ ID NO: 44271 - DNA, 2622 bp, Homo sapiens
atttagtgtccctgaatgtttgggataaagtcccaaatgtaaaattgagaaaataatgccttctttgtctacctctgtgggttgcaaggatctgtggaggctctgtaagaatgtgaggagataacgcatacgaaagccttggacatgaaacatcatccaaaactcttggagtccttggtgtgaaaatattaatgtgggccacaagaattagataaagaagatcccacagcaggcttctttttgtttaccccgcctaccttgtcagcttacaccccctcttccttctctttatcctcccatttttgtaagcgagtttgttcctggtatttactgcatggactaagccatttttagatgtattttttgctgaatatatacttttttgatttagtatttcttgccatattacaccagacttaaggcagctaatttaaattatattttttctttatgtactttatacaaacattcatggatagggggagatatttaaataccatgcctttcttcaaaatgaataacaagaacattcagcccccttcattctgccctttcaaggtctaacgtacttgaaggggcaatacttgtagcatttgccacataaatgccaggtagtgtctttccacatcggggctcaccattacctagatctgtagttgccggccatgaagccaaacaggtgtgcaccgtggtcattgatggaacagatgtaaactcataaatttagtttactgaggttttcggtgagtgtggcttcccgtccgcgtgcttttcctatacaaccagcggcgtcctggcggaggagtcactgtggacttccccggagcgttgtcactgccatccctcccgcggtgaatcacaggtcggcctcaggtgcgcgcagcacacacccggagcagccgcgggtttatttatttatttccgggacggatccattccgggctccggggagggggagcggcggcccaggctgcggggctgtcccggcaccggctggggtcgcgccgcggccgcctgctccctttcccgtgagcccccgctcctcaggcgcggccggggctggtggggggtgggggatgcaggaaagctgggggcgcggccaccaagctgtccagggacaaggccctgccgcctcctcccagccggaccctggaagggtccacaaaggtgtcaggttcaagtcctccaataggcccattttttaaaagtgcttttaagtttccgcttttttcaggaggggagggcaagagcagctttttctattcaaattcttttccttgtatgtagataccaaaaggaaactcggcactgggcatgttcggatgtgaatggttttgctgataagcaacagcctccggaaccaaagcctcaaaatagtcgtctcccccgcccctcgcagaagcggcgagtggtatctgccaaacagatgacaaagtacctccgactgaatcccacagacagcgctttgagcagaacgcacggctcaactcatgtaattactgtttatagctggccgagcctgactaggagagggcagacccgagaggaaatcagtttcccggacctttgagaggaggctgtgtgttaattaaaggctaggacgggacgggtacttctcagacatgctccaagttgttcttgagatcacagttcccatcacattttctctggagggagtgagtagataattgggattttttttttatttttggccttgtctttcttccttttttttacctctccccattttagtcatatggccttgaacccacagtgaattgaagagagaaagaaatggatatgtctgaccccaatttttggactgtgctctcaaactttactttgcctcatttgaggagtgggaacaggcttcggcgaacacaaaggtaaaaacgcggggatctctgcctggagagggaatgctttcacttcccaggggcccacaggcggagctgcctgagcccctcaggagctggggttttgtgtattgggtgacactttgaaaagtttatgccccgctaggggagggggtactgtttcaggtatttcttcgtccttgtggtttcctgggtaaccctgataaatgtgcttctcataggttttctccttttgaaatgtggataataagacatttccttgtgagaggtgggggagaaaaagggaaagaggaggagatactttgtctaagtctgtccctttgacctgatcatgtttatccatttcattcacccagtcattgaggcttctggtacttttcgttgagcccttcagatgttcctctctattaaatatttgacctttataagatgcagatgtacgatgcaaggatagcccaggttagctatttcatactatctgtggagaggcagatctacataactttgtcattttgatttttcaatggtttgctggcatttattactaatacaggagtgtccttttcattttgtaacgtatatttgatagaaaagatggggaaagaaaaagaattttaatgtcaagatgaagctcatgccacaagtgacaggcagttccaagagtttgctgacacttgtgttgagagactatgactttgaaggaggcatttctcaccacatttgtgtccagcacagaaaagtaaga

SEQ ID NO: 44272 - DNA, 1925 bp, Homo sapiens
tgaccagtggagctaaacagatgtgggataatttgggtgctttaggtaatagttcttgttatggattctgcaaaataagcctctaagcgtatgaatcataatttcctatatgttttaggatttgatgtctggggttacgtatttgaaccgtggaataaaagttgccgtatttttactgtgtggcctgtaaaacttatttgtagcattctttctcaatagatgccttctctcctgtgaagttcaggcaggttagcctttgaaatcaaggatttttaaagtgaaaaatcaatagtgactttcttaacattggaatccaggcttaagatcagagacctgctctcttcagtccagttcttggatcttactgcttttaatgctattttaccagcatagccatggccaaaatgccattttagcaggtagacttcatttttctataacattgtgattatgtattatttgatggcttcttgtagaggaagctctttaatcaagagcaattgtggtttttcttaccttttgagatttaaccttacaattagtctaccttctcacatcagatctagggtgatttagaggtcaaagagaacagatactgaactggttagctattaatatgatacaacttctttatgccatttctcggatatagagacattccatggaatgggtcccaggttggaaatccatgagggaaaagggttctgactcttggcactgataaacatattcagaaatgttgtattccagccagagtaaatatatatgccctttatactttttttcagttagcagaagttacttctaaacacttattttggcattaaggaagctcgtcatgacctattgttccagaaagattatagtcctcgttttaagccagttctttagttcccatgtaagtggcatgcccagcctggagctgaagaaacaacccctgcttttcaaaccttccattcttataggtgtgtccagcaggcagtggcttgtagctgttccttcagccacttaacaggtttgatttcaaagctttttaatagagaaactaacatgtttggaggggattcatggcccaacatttatggattttgttgggaagtctcaggtgtgtatttatcttaagtatatgttaaggctattagacaaaagtaattgtttgtgctttgctctgttttgtttttgccgtctagtcctagactgaatttcttaagattatcttagggattggactgggagggagtagttccgagtcccgaaggctatatatctccactttcagttccttttctttggctgcctaaagaggagcactaaagaggagtcaagtgattataaattcggccaaaagacagagaaaccaagagctggacgattaacctctgaaacatgggaagttaattacatttacaaatacttggaggggctatttatgagtcatgcatctctctgtgacccttttactgctttgggagcttgtggatgaggctgaatcactctctgaaacctgataacctgataacctagtttggctaagtttggcttctgtgaacagggtctgaggatttatcacatcacgtcattttttcatttgtatgccaaatatttattgagtaccttttatgtgaccagggctatgattatcacctgggaaacaaagatatgtatagcatgatccttttcttcaagtagctcaatctagtgggctttagacagtaatacaaagaattagagtaacatgcggtaactggtagatctgccaacatcagccgaggaggagggagggggaggatatctgtggagacagtttgatatagtctcatttaatcctcacaacaattctgtgaagaatatgttattatatttattatacagatgaaaaaattgaggattagagaaattacttaactgtccctaaatctcaccac

SEQ ID NO: 44273 - DNA, 925 bp, Homo sapiens
attgattaaagtaattttaacagtaggactttgaacttggtttttctgctacttggaaaaagatatatcaaattgtgaatttaatatacttacattgagtacaaaaaacggaagttaaaaacaaaaaacaacttgtttatgtcacacacatcttccctacccccagcacacacttgtaaagtagaggtttagaaaaccattaatttgtgttttgtgtatcttttcttaattccccagtatgtctgttgacttctctttggtccctaataataactgacctatggacagccaaccacttggatgtctgtctcataggtatttgatctgacctttccccatgttataaaactggctccaccacctccacctttcccccaactttgctactttgataacccagctctaggtagggccagccaggtcatagccgctgtttatcctggcaggctagattaggccatgtgagttttgaatgactttatactatgttttaggtagcatcagcccttggagaagtttcccaagttacagcacatgccctttatctcttagagataattactggcctttccagtactctcttcccatcttcatctcaaatggtaacactctttaatgtgtgtctttgatctttgggctgttgtactaatctgaaatccaaaagccatctccgtcattgactctcccagcccttgaggtccttcctgtaaatacatgacctgcgccaatgacctagaatccctggggtaggcatgcagactaggtctctcctatgactcatgttgcagataaattgcactaaacaattaataggcaatgagatataggcccttctcacattaattacttttttacttctaacatttaaaaaacttggatttattctgctactataaatccttccttcctccccacctttttcttt

SEQ ID NO: 44274 - DNA, 581 bp, Homo sapiens
caatcagtcaagcagtgagtaatggtgctatagctatggaagggtcaataagacagggacaggaaaaaccaaagattcagggagcccagattataagaaagccttgattcattgtgtataattctgtctttacttgaaacttaagcatatgagtctacttctattgattggcctgcctgtgaacacttgacaacttacccagagaattccactgacggccaatcaaggtttttttcttggccacttagagtcgaaacagctgcccaggtttaattaatagtctacaattatatctggagaggagccagtttgagacaggtgtctaaatgaaagggagattcctagctctcttcatgagtcacctgtctgggtctggtgagatagactcaaagttctcagggggaacggaactgttattttagagttcactcaggttgaggttcctgcatcgtgttccagtgcccactttatctgttggtattcatcatacaaggagatcctaggtttgattctgtgaagtttggtttcagggtttttaagcagtgtccatttgccaggaatctccaacaaagcagtaagaa

SEQ ID NO: 44275 - DNA, 1583 bp, Homo sapiens
gaatgtatccctggtaaattttgtccactcttgtcacttggcaagttaacataataacaaacgtaataacacgaattacaaaatgtccatatatgacactgcaatcttattgacctaaaaatgcaatgttgctttttttaaagtgtgtttttccttttttttgccccttgacaaatttgcatagaacattcaaaatgttctgtggcttttaaggcacagtcttgcgtttaaagtaatagctctggaatgccagagatttcagaaaatttgctttctgttgtccccttccctttgcagcagtattgtttctactgctgcattcactcatctgagacccttgtaatgacccttatccacagccaaactccaactgagaaaccacccattctatcatcacttgaagataaaaccacccttttcatggctcctgccagctttgcctctaaggctgaggcaaacaactttactctttgcattaagttctatcactggtggagaaggtttcactctgcccccactgttgactggccagagctgggctgcatgctcaaagactctgcaggaggctttgctgtaacaagccaggtcatgtccgaaggcagtaactcttaagagattctaagcataaggtcagttacttacttaatgctaaagttatttgacacttcaggcctgagccagccatgagcctaatgatcccttcttccctaagcatgatgagtataactgttccttgaaaataataagcagaaagtgtttcggatgcaaagaaagtccccacaggcccttgtgccatgctggaagttagccccttccaaagatcatttgctctggttatcagcttccagatgagagtgttttcctcctgcctttctgttcttattcatttgaatctgctgagtctgaccattgtaattatccctggtattcattttgtcaaagtatattagtgagacatcaataatatggatcaacccattccctttctacttgtttggttgtattgattcagtttaaataaaagtcaacctactgtataatgtttgtttaccctgacccttgctgaacatttccacatcctcacagactatgtttgtgtcatttgtttgactaaaaatacttagtttccctggggttcccatgtgacagtacgccagtgttggcctaagctaaactcactttctcaataggactgatggacgccgctggtcgttggcttctctcccttcctctggctatgggacaaacacacccagctctacggtctctgtaagtgcctgactttttttttttttttctcttcctcacaacaacagagctattacacaggcagtgttttctctgggtgtttcctggtagggaggagaagataaattctgcatgtctgccactctgaataagtgacacatcaaatgatggcctgacaaaaataaaaaggacatactttcgctgcaagcttttaaactgtagtgcataaattgagtaagttccaggatcacaagtttggaggaaactggaagctttcattttaataacatttggtgtagttcggggggaaaaacacaatctagttttattgcttt

SEQ ID NO: 44276 - DNA, 1935 bp, Homo sapiens
agagagaagagagaggtcaagaatatcaccaaggtttttggctcatgtaactgaaagctagcctaaattcagagttttatctggaattctaccccaaacatcttaattccctaaagtcactggaatggctcaacagcgctgaactttccagacagctgcatggagttgtcatccatccttctctggagagtgtctgatcccttctctaaacttatgccctgctcctctcccctatctgtgcacagaggacttggtccgattctacctccggaacaatgctcagcccacagccctcattccctccgtgatgaacagtaactgtggacttttgaccttcctcttgagcttggtctgagtcttggcatttacaaccacggctctaggtaaggacatgctttggggtgtctttctggcccttgcctttgcgtttgcgcatagggctctagtggcccaattatgttgttgcagtaaagtttctccttgctctggtctggagcagttgaggtcattcatcccctggatctctgttggcacaggtggcttggccgagtgccactttaggtaactgtgacctgtttactcaacttcttcctggagttttgatattcttgttgtcagggcctttgagaaagtttatacgatgggctcagtgaagaagccgcagctgttctgaaattaggctcctttccccgtgaatgtgcagctatgcgggtgtgtggatcaggtgcacagggctttgaggaatgtggcggagactcagtggcaagaacagttgtctgtgattgctgggccttgttttgacccagtccctcaccccacataagcctctcagcgaggaacatggaagggtcaggcctctcacgtttcctcccctgtgagattggatcgccactgtgatggcatttctccccatcttcagttgctgggcagaccctgcgtgtgtgcgcacatgtccatgagcccacaacccttgcatatttgcaacaaaagtctctggggagaatgaatttaaatggactcttgactatttgttctggagcggcacgtgtttacttaagtcaccagcctccttcctaaatgcagtcacgagctctcccaaactccacagacacccaaacaaccaaatattcagagagcccgtgcccttgccctgcttcagccccacagccccgcctgggttgctggtctgacccggctgggcagggtggctgtgagctgccggtgtggccccaggcacctcaaagggtcctcggtgttcaacaacaggaagtgctggcaggcttccctcgctagggaactgaaagtggtgacaacagaggatgtgttcttcaggctatcagataaagccctctgcactgagaactgcttctgacgaggaacagagacttcactggtctcttccccatgccttgcccttgccctaactaacttctgaatttatatcacctgtgagttctgctctaattcagggacttgggcggagaggtttcggacagtggccaaaagcaagagactgtctgcatgaccctttagaaacacccgtgacctggtgcagagctgagccagctttggccacactgtttgggatgctgactcaacgcagctcattatatctgattgaatttatctttcattactatgcaatcaaattaaagggcaagaagggatttttctctgttttctgaaagtggttgcagcaaaacccactatgaagcatttatttcttgtattgtttagactgggcagaatcagagggaggtaggtgtgtgacttcatttaggagaaggtgagcactgatggcaatattttcttcaaatgccacacatgaagtgggagaggtgacagccaagcctgcagggactctgtctctgaaaatgtgagtggaacaaagcacctctgggctctggatcattttcttgtgtgctcctggggtct

SEQ ID NO: 44277 - DNA, 2135 bp, Homo sapiens
aacactgtgtgtgcttagttcaccttctgtacctttcagagcctactttcaaataattacgtaaaggagctgtgcaactagaaagcaaaaaaagtcctataaaaaatagattgtttaaagcactgaatgaaatcccatgccacccctgctcctttaatggacaagttctagatgccaatctgtagatgatgtcacctatttgcagaaaaacctattgatcacaaggtccctaatatgtgtgtgtaatataataattgtatatcaccattttgtctattgttatatatattttttgtcttcacctctggattataaactcctcatgggtggagaccccttttctagatctctcagatccttttgggaaacatatcagaagcaggcccaggaaattctcactaaatactggtagacgctagtctaaagtactttgaggccatgacaggagacatttagtaaacaggggggaaaaaagatgacttagacacctggtgggagagacaaatcgtgcaagaaggaaacaggctcggcagcctcgccgtctgcttgcaggacttcttatttaggcttcagcaacctcagagggagagattacagcgcttcatgctgttcccctcccctgcccggtggaagggacacttggtggggtcattaggcagctgtgatctgccataactccaggtcgggtggatgttcaggcagatatttgttttttgaacaaccagacaggctgtctcctgagatctgaccaaaactggaacttggaggagattcaactggctttggttcaaaccagaaaaactgaaacaatgctaatagcccgggaaggaatggcgggaaatgcttactcatcttcagcccatagtctataaactcttagcatgaggatttgagtagcctggggtcccctgtggataccgtcactatgcagaattatgaattcaagttcccttatggggaagaatgatagctaaaaatttataataataacattaagtgatattgtacctatgtggacatgtcatggccacaggtaaaaatgacagcagcgcattcacaatgtggaaggttcttaggctgtagacaatcagaccaaactccctcaagaaatcctaagaatgccatgtattgagtgttgaccatgaccgaaatgtcaggcacatctaactgtctggactccagtgggtgacaaataaaatgtctcttaagatggaaataaaatggaggggcgaattggcacgaatgttgtttatgtttgtcagtgctttggaagcaggtggcctgttcaagctagtggcagcctgctgtggccctgtggacctggtgcctaatcctcgtgcattatacagtcttccatttgtgtcagaagatttctagcttgcgttagtttgtgctggcttgaagcacagcaccaggcaaattctatggcttctatgtctctctgtctctgtctctctctgtttctttctctttctgtctctgtctctcacacactcacacacatacacacacacacacgtatgagggagagcaaggtggaacagagaatgtggtttaaatttcacagcctcaaatgagaacttctttgttagtgaaaagcaaacagagcaacctgcacacagggtcaacgtgctctggaatgcagaattgtttgtccccagtcaaacagccgcctgatgttgagtttacatgatatttcagcaaaccgaaacaatgaggacgtttaccattaactccaggccttagccgtaaagtcaggatgtagatcagggtcactaactctgatccttaaggatctcagcaaacggctctacccagctacttagaccaagtcatccaagtttattaaactcctagtcttttgccacagactccatggatgcaaagctggacagacccaagctttttcatagggcatgcctttaaggaccctgttgaggtccagctgaagacagaaaagcaaacagtggtgatgtgatttttgttaaagtgatattcattttaaacgcaatgtccagtttgactatagcagaaggaagttcagaaaagtttctaaggggaggtagcatttgagttgaaacttgaaggaagagtagaagtttgccaggatggcacactggaggtgatggggtagg

SEQ ID NO: 44278 - DNA, 3062 bp, Homo sapiens
aataaataaataaagcactgtttttattctttaattcagatgttactgaaaatctactatgttccaggaagggtgtaaggcagtatggacacaaggataaagcatggtctttgttctcaagaatcacctagtgcagcaggccccaccagcacacaattatgtagtagcatattggtagccactggtgttcactatgcttgcataagcttgaacttgaaggatgactagatgtgggggagccaggacgaaggtcattttgggctgagagagaaatatgtgcaaaggcccggatgagggagaaattatggaatgaccaggaatttgaaagaaattcattgtcacttgagggggagtgtgagtcgtataagataacgcagtggtatgtctgcaggtatgcttgttaaacatttaccagcatatccctgaagatgaggtttggaaggtggacaaaaaaccagatcatgaagatgttgcatgtcatgctcaggaggctgagttttatcctgaaagccatggagagctattggaccatttagggtagaggcacgctcagatttaggtttagaaagataactcagagaatggacaagattggcatcagggagacaaactgacaggcagctgcggtggtcaggccagagctattgagggtggtggcattggggtggaggcaaaacattcaagagatgctaagggtgtatcatcaacagggcccagtggccaagttggatatgcatggtgataaagggggagacctggtcttttctggcttgggcaactgtggggatagcagacacatgcctcaagttagaggatatggaaagataagcaggctatgggcatgaggattatgaggagctctgtctaaacttgttttatctcatatttggcatttactatattttttgttgtattttgttactcatccttttaggtggactctgatccttctgaggtcctggatcagattaaccaacgtgggtatgccccgcacctttcactcattaccacccctcaaaaggtcactttgccaaacatgagtacatggcccccacgctaagcctgtgagcagctgcaagccatatcatctgcacagttgagcacggcaggaactttgaaccaggacccaatttcaccctgaggatgtgcttctcctctgaggggagcaaagcccctggcttgacctggctcccttctgggagggaggaccacgtctcaatttgacagcaggaggctgtaggtcagtggggtgatgacctggccctgggagacctgctctttctctcagcagaaccccataaatccttcaaaaggaagtaagtaattccctcgggatcaagagagccctccgcattcttgaaataaatgaaggcaaaatgtacagggatttctgagaaaagtaaatgtggtgtgagcatgatccctgggtgttactatgcacagaaaaggctttttttttttttttttcccctctcctgaatggtgttctttgctctcaagtgaactcatgcactggatttggtccaagtacattttgtttcttgatttccagccaggcttctctcagttgtgatgcattctcttctttgcttccctccttccccagtcctgttctctctttttataatgctttcaacttttccatgtgactgaaccaacacagaggaaaacccaccagcttaggtagggcttccacaagagtggggccagagggacttctttgtgaacggccagcccctcacgcagccccggcctgcacggcgaggtttgtctgaggcagctgaagcagaaagcatttgaactctgccctctaccaaatgatttccagatgtgtaaaccccagcctcccgctgcactctgactgtagccctgccaacgtacatctgcagattcctagtgcacaggaaacttgaaagagtatctttacaacatctgctgtcttttcccagctctccctctctgccttctcggactttgccccgtattttatatcctctcttcaacaaatccattagagaactgctgcacagcccttcttggctcacagatgccagctgtctgtttcaccccagagcctgttcttggctctctcaagcaccactagaatcattgaccgaagcaccactagaatcattaaagaagcttattgggctcatggaggggaaaaaaaggaccaagttttctccattggattggtgccagtctacaagctgcaaagggagatttagccataaggaggtcagagcagagccctaaagatggaaacacgagtttgcatggagagtttgcctgctatacctgagagaaggtgaggtctgcttatagggggaacttttttccatggacattcagtttcttggaacaaacaaggcaggcttctgtaaaatgggaagtattgatgtacagaatgagttccttgccttccccttccctagggcatgctacccatcaagctaagaggccagaagaagatctttttataatgtaactcaaaggaggggagaaaagagccagagacccttttagcataatggagcagatgatttttactaaggcgtgcactctcaccagggaaatggcttgattgctgtgtaaatagatgcttgaccttcatcctgccattcatccatatggaccctaaacgctctccagctctatcctaggggacatggaatggaggcaagtgtcaaaatcttggcaaggaaaagagggtgcactatagaagggagcagagaattgaatgggcctatgagctcaggagccttggggaggaacagttataggtgagaggcccccacctacatgggacctatgccctaagcatgcaggcctacctgggaggcagtgagctagctgggttagggaaaactgttccttattgccacccatggtgggtctagtgtggcttaagaggtgattttctggtccctggtaagaccgtctcaccctcttatctgcaggacataatagtaagtgggtgacatttatattttcggcttcaatagtcccaaacactttagacagactgaggctctcagatgaagccctatgacttggctgac

SEQ ID NO: 44279 - DNA, 1433 bp, Homo sapiens
ccaatctagtctaaataagaaaatatttagagccattctgttatctctgtgatccctgacaatctgcatgtctcctctgagcctgctcccttatctgtgactttgggatgattacatctgatcaaacttacaaataaaaaaaaaaaactacctgtttaccaacctcttctacttcccccatcctcctccccagcctctggcaaccactattctatttttgcttctgtgagatttggtgatttattgtacagcaaggtgactatcattgacaataatgtattatatatcttaaaatagctagaagagaggattttgaatattcccaccacaaggaaatgacaggtgtttgaggtaatgaataggctaattatcttggcttgatcattacacaatgtatacatgtatcaaaatatcatggtctgcataaatatatacagctattatgtcttgaagacaaaacttaaaaataataataataaaaaaaagaaaatggagggaatttgaaaaccattacttgccactagacattggtcagtaacatcacctaaaacttgcagcctctttccatcaataaataaaggttttgatagaactgattttaaactggggggagggaattggggaagatgaacttttatttttgaggagatttattttagggctattgcttttcatcaaataatttgctttgaggacacattggatatttagcccaaaccaaactctgatactttggaccaagtcaagcaatggtttatctttgtttggtaaatgaggtcatccttcacagattgtgccaattatcaccatatgaaaattgcctgtgtgagtggaggaaggggagaagaatattgaacatacttgaaaacaaaatcctttggaacaccctcactttggaggtgtgaagatgatacagggtcctggatgttggggaattactgagacccagacacgtgtgaaatgataatgtctggaacagggaaaaggtggacattaactttctactgagaactgagagagttaagaggagactcaaagccctggcaaatagggtgagaatatctattggcacggaggaagcggagtgaggcaataaaatcattcacaaattgaaataatgaaaatgattgtatactcaatgccacactccagaaactgggctagctaaccactttattatctcatttaatcttcataaccacattgtaggtaggcaaaattgtcattcttttataggtgaaaaggctgagaaaggccacagagaactgaagaagcttgttaaggtcaaactagacaagagtacccaggaagtcccaggaagggaagagtaggagaaaagagacaactggctgacaccctgaaacctcaattttgatcatgaaatgtctggattttactgcgttgttttcatctgtcatcctgatgatacccta

SEQ ID NO: 44280 - DNA, 1330 bp, Homo sapiens
ctaatattgtaaattctatgattagtagttttgctcctaaatctccatgcatatctttgctgatttcccaggactagattcctagaggtggggatttctgggttgcagcgtctagaccttcttaaagtgcatgtctttaagttgttgtgttttggaaaacaaagagaaaattatgacttggtgcataatggtgaggaagaagaatattatggcttgatttttatagattttactgaaagatactttctctttcatttttgaaattcgtctcctaattgcaccattttttcttcatcatctaccatagaaatatgcaagggtagcatgcagagacagccttgtcagggtactgttttgtatgggaggctgcttaagtcattttgattactgtgcgtaatattcaggtcagttcaacccaagccacctctaacacttcctggaatggttcttcaatttgtatgaagacagaagtaggactcgttaatgataaaccgaaattctagacctgactgcaaatttaagcataactatgcagtataattatatgtacacatacactattatatattccctccctcctcactaaagaatcactgaaaaaccccaggctgctctgtctaaataaaaataggctctgtcacattcccagactgggtgctgtactttgcctatgttagatatgctgattgtcctatacgaaccccatggttttcaccggtgaggtccctaaagccatggaaaatctgcctgtgcctatacacttgctcaaagttcactttaaacaagtccaggcatcaacagcagctatagagattttgtcactttcaaagaactcttcgaaaagcccatctctaattacttgctagtgaggaaggacttcgtgtctttgctgtgggaccttgcacttttctggctctttaacctgagtacactgtgttctctggctgacctctctgttcaaggtatactattgagaagagaggaattaaattttgctctgcttaatcaagagcataactttctgatgggaaagtgagtgaaaatgggtttctcccattgaaaataaatttggatattatgtcatttccctcttctttgagctttggctgaaccctggacatgcccctgctgtcgtaatcactttagtatctgcctcatccaaaggctactgtgcttagggcactgttttcctcacattatacatccagcaccttgctcagcgggcacacattttgttaaatcatttgttgttaagctgttgtcaaacagttgaaatatcttcttagctattctgatcagcattttgctgtataatcgcttcatctccctt

SEQ ID NO: 44281 - DNA, 1453 bp, Homo sapiens
ctgggagtaattcatgcctcaaggagactaacacagaatgtctaatttactgacattgcctcagctcaagagagccattttatagtgaaggagataggacaaaggacacatgatcacatgataataatccattcatgataataaaggcattcattaatctaaaaattataatgacatttgcatatttgtttggtgaggttgtttttacttatcctctattagattataagttccttgaataaagacactgtcctgtgtgtttatctttgatgttcacacaaaggctacatactaataattggtcaattaatattagctaaagtgccaaattagggataacacttcatgaaactggaatgttatataaatactaaaggccattaaatggaactgtgtcttcaataggtagaatataaaagcctggagcagtgctgtccaataggattttctgcagtaatggaaatattcctctatactttccaatatggtaaccactaaccacatgtgtctatacaacacttgcaatgtggctaatgtgactgaggaacaaaaattttaatttaattcaaaattaaatatcatacatgactagtggcttccatattagagcataggtctagaggctttttttttttttcctagaggggcgatacttctaccatgagctgtagtattaatatcactaaacataaaagtacaaatactgactggtcacctccccaccatttgggtaatttggggttgctcattctggtgaatcacaggcaaaaaaaggaattaccatactgacatgggtaattgatcctgatcatcaagaggaggtgaattttactgttgcataatggttcagggactccagtttgggaccaaggagattcactgagtcatctcatttacctcccatgctcattttacttatgagtaggaagttgcatcagcaatagactgacacacatggtaaccaggggttccttagccagcacatctgtcagtctgagtgactggtcttataaagtgacctttgagaccagtcattcagactgacagatgttctggctgagaaagaagagaatctggactgtgtggtagagccaggagatgatgatctcagtacactattgggaccaactgaagtagtaagactgtttgtcccaccaactgttcctcttataagagtttttttccacagattctatgtctaaccactgttttgaagaagcttgtatggtataaaggaaacaatgtaattgccaatgaattactagtaatgtttagtaaataaaactaaatttagtaaataaaacattactagtaattcattggcaattatattgtcaattgaacagtggttacattggcatgttcactctacaaacgtttattgagctatgtactttagatatttgaattttacagcatgtatattatagttcaataaaaatatttttaaaat

SEQ ID NO: 44282 - DNA, 1355 bp, Homo sapiens
cttagcttacactgcaggcttcttgagacattcagcgtggttgaccacttgctctttcataaagctctccccttccttggctgctatgtgtgcattcaactactttaaagctgttctgctgtctctctttgataatcattaactgacaatacaatgataacatttagaaggttttttttttttaacgaagttttcttgccacatggtgttgataacacaactcctagcatctgatgtgtgaatagtgaattggcaatagagttcgggtatcactaaaaatctctttgaacatctttacaaatcacaaactgccatccatcctgcctttgagcttcaatttctacaacaaaatgctgaggtgaaagttgactgtggcagcctctctgtctttgacagctccactccttcctcccatgtggttggctcagactacactgcccctgagtttttgttgactagcgtagctccaatttttacttttgtatttttgcttaacctgtatctatatacccaaccatgtcttttctcttaggatcatagaacacatctatattctcctctgaacttaccggtttgataaagaagggagggattctcccttgaaattatctcatctgactaaacatttggcgtgaactttggattgtcactggcctttacagcaggggtggccagagaggtctgcccatttgatcgattcctgctgaggtatgactgccaggctttatggagtgctcttcaatccctccaggtgcttttcattttcaaagatcttcagaagcaccttcccttcctttctgatcctttgctatttgacagtttctctcagaacttctgcatctccttgcagactccgtagactacatcttgggctcctttgcacctcttgcaaggtgtggtggactgaaatattcttgcaccgtctttctttctgctgtcttctccagtgctgtcactgctgtactatgtttgtgttggtgtttgtgtggacaggctgaggtttctctgaagggtcacagtttactcttcactgggactagaaaggcagatcagtgtctttcaatgtcactcttctaatgtttctaaagcttcctttctgtctacctccctgttgtatgcccctctcttcaagtttccagcacagaatggagatggggaggttgaaatctaggcatcttacttcattcttgattttactctcttccccacccccaacatcgctcagattagaaaaagtgagcttcagggttttctttctttgtgtttgtgcctaacctggcatggagtaagtgcaataaccttcacagccaccctggaggttgggttgatccaggctattctagcccttggtgatt

SEQ ID NO: 44283 - DNA, 797 bp, Homo sapiens
tccagattacaggagaaggatttaaccttaccaagagttgaaatggatttagcatgaaatataaaagtagaagcagcagtgggaagagccttgtaggcactcccattctccagctcaagcccagggaagccatgcatgactatactcatgggggcccttggggaaggcaactggcaggatttgggaagggtcacagggtgaaagaagcttccaactgaacattgaaataattttgactggatgcagtttatcttgagcagaatccaggggtcaaactggaactgctgcagaaagaaatgcaggagctgcggccaagaatgtgggcagcgggggaggggtgaagcctgaaaactatgcttgctttctcagcagggaagcttataacctgggggcaaggtctgagtcccacctgcaggctgcctgcagggagagagtgagactggccttgtcaactgcatgggatccatgggagaactatggtgacagaagcagccataatcccctctggaacataatcctgttggcctgagaaccactccccatcccccacagttgccatggcaagccccacccaaggagaacctgagctcacagaatctatttcacttccctgccaccttcaccagggcaggtgctagcatccacagctggcagacctgaagacagatcacaacacaggactctttacagacaatcctggcactggcccatagcctggtagccctgctgggtggcaggatccaaaagagcaataacaatcactgcagtccagctccaaggaagcatccctaggggac

SEQ ID NO: 44284 - DNA, 1804 bp, Homo sapiens
caattatctcccacagagtccctcctacaacatgtgggaattatgggagctacgattcaagatgaggtttgggccgggacacagacaatccatatcaccaaggcaagtggatcacttgaggagtttgagaccagcctggccagcatggcgaaaccccgtctttactaaaaatacaaaaattgcctgggcatggtggtacacagctgtcatcccagctactcaggagcctgaggcagaagaatcacttgaacccgagaagtagaggttgcagtgagctgagacagtgagctgagattgcaccactgcactccagcctgggtgaagagcaagactctgtctcaaaaaaaaaaaaaaaaaagaaacaaagaaaagaaaaagaaagaattcttattagtaaagtaaatgtggttcaaggttaaagctcactgcccacccctgcctctggcccaaacacatacatagggacctgtgtggcttcagagcaaaaaacctctaacaaaggccagcagcagaagtgtttggacaatgttgtacgcagtgtcagagttcagcagttggaaagattgtttctttgccatcaaatattttaaatttctggcaggggtggagtgagaggtggagaagcaaggagtcattccctgcttctcctttctgcctggtaaactctggcagggtgagcctggaaagcactcagcctgtaccctgtacctgcactgaacatgagccaacgtgtggggtctagaatgggagtgaaggcagaggaggtgatgggtggggcaaatccaggctccttcctggctgcagcaacctccgggcttacccctctacctcctacatcttttgtgctcaaggttcacttccctttagtgactatttagcagatctcttatcttcagagtcttatgacacattccaggaaacactggcctttcatgccatccacctcttgcgacattttagactagttctcagagcatgatgtctgctgtcctatctccccttcctctaactcaccattttctactttttttttttatcttgagctcgcattgtgtttaacattaacatttagacaaagagaaacgtttcagctttttgactgcagttatcagggttttgaacacaagtcagttaaacttagtaatcatttatggaacacctgccctatgctaggagcctcagtaggtgctctggtgtcagatgtaccacataacactcaggtgggggaaaaacaaactagaaaatgctggcctttcttccacgtacaaactgggtgacataaatatttaaatggccagatattcctaaaagacaaattggtaacagagtatatataaatttttctttgttctcaaaagtcatgctggtgatctatttgcattctgatcctattacaccccaagtggacgtttgataaaaacaaagccaagaataaatggaaatcacaaaaaatcttgccagctctttgcttcagatctctggctactcatcttacagtgatgacttgggccaaggcttccttctgagacattttattaaatgtgttcagtaattcacttttgccccattagaagcatggatcctgagatttaatctatcttactcatagagaatatttgaccattaaatacctaaaagtgatctaggtagaagaaaacaggaaccattgaaaatacaacatgaacataatttcacattaaatctgagatggatttgggtgggtatttgggaggtcgggagtggctggtgccaaaggaagaaagggaaaaaagaagaaaaaggatggtttctaacctcctggtta

SEQ ID NO: 44285 - DNA, 4017 bp, Homo sapiens
atagaacgtttgtgaaaaatccaacattaagataggaaacatttgttctcagaaagttttcaggttagacactctaaattctaccattattagcacattgggatgagggtcgcaccacactacttgtgatgctgtgcaagactctaccaagtctcttttcagcttcagagttgatcagaagccattagttctgtctatctggggaaccagatatcatatttaaacatgcatcctgcagagcaattcagagaagagtacaatgtatcagttgagtactaaacattggctatttgtataatgaaaaagtacagagagttccatttatgtttgtccttttattgaaaattgctacaacctggtcaaaaaattctctctgtgtggcaggatatctgccagtgaatgagtctgttgaaatcaccacaccaaattcaacattaagggccaaccctgaccacagctgagccgtgtgaagaggctgacagcggcgtggccaccacccaggatggagagaaaggcactgtgaggtgttaatggaaaaatccaacttccttttcttccaaagatgatgactgaaaccaaagtggagctttccctgtgagttttaaaagataactttctttttttttcagaatagaaatatttaccaggctttagtatatttgtctttttatattcctctctgtataataagtgcctttttaaaacctcatgtttgcttagcaataattacttcttttttgttttgtttaatgtgaggggtttagcagtcaccatatactgcactgcaccctcctggtggtctgtgtctgtgtcttatgacctgggaggccaggcatatggatggaaacttagtactcagtaagttatagtagaatgtcttagaatgatggcacaacatcaccttcaacagagccctatgacctagggccaaaaaatacaacgaggagcaggatttgattacaactaaatttcccttttgaagccaaggccttgtatttgcacaactcttggttgattctaaagttcttcaattccaaagaagtcttcatttcctaacatgttacatagtagaaattcagcattgcctgtcattctaataattatcataaacttttctgcactaaatagctggagtaaggaaaagccctggtttttcaccactggaccatgatcctctttaaattatatttttttatttaaaaatattggcttcaaaaagctgctctgatacttaatgtagctttacaatgataacatttaaacacattgactggctttgtgaattcaattaagcactcctgagtgcattgctgcctttgttaaaaacaagcaaaaacacatctgacaagcctttttttttctctaagattctatttacctattattgagaccgcagaaaaccaagagctagatagactaccctggataccatgattaattagttactcagcgcagagttactctatgtaatttggttgatttttcatttggttttctttggaaatgactttactactctgaaacaattcctttcaagccatttttcttccttttaaaaacatgagttctgtgattcaccctgtgtaagataaaggttgcagatgcccttcatttatcatgaaatacaatatatttcttttatttggggggtgaagcacccttaaaggctttgcaagcttttttattttccttaagagtgagacacttcatgatgtgaagatacttgcaaacacagatctcaacaggaaagaatcactcattaatctgtgaaacagacaattggtactgagaaatgcggctgttattagaacggatgcctgtaaaagtagaagcagctttggaactgggtaatggtagaggctaaaagcatttggagaatcaggctagaaaaagtctgtattgcagtgaagcattaaggatgtttctggtgagggtttggatgaaaaggagaattataaggaaatttgaattttcttagagattacttaagtggttgtgaccagaatgttcgtaaaaatatgggcagttaaaggccatctgatgaagcctcagacagaaataagaaacgaggtattggaaactagagtaaaagccatccttgttattaagtagcaaaaaactcggtaaaattgtgtgtatgtttgaaggctttataaaatgtagaacttaagagcaatgacagaatatctgccagaaaaaatatctaagcagcaaaccattcaggccactgcatggctacttttaaacacatatagtgacatgtgagaggaaaagaatgacttaaagatagaatttataattaaaagagaagcagaatggaaagatttggaaaattcacagcctggccatgtaaagagtgaaaatacatctttaggagagcaaatcaagggtgtagccaagcaactatttggtaaagagattcccatggacagaggggagccagctgctattaaccaagtcaatgagagaaggactctgaaggcacttcagagctcttagaggctgccctcctatcacaggcgcagagctctaggaaggaagaatggtttcaggggacaggcccagggaactcttcgtgggctctctcctcagagcttactcaggtatctgcttctccctgtatttcagtgcagttctccttgactgccctagccagggctcaagcaggccaaggtatggtataggccactctggagcatgcaagcagtaatccatccttgatggcatccatgtggtgttcagtctgtaggtttgcagaatgcaagagctttgggggcatggctacctccacccagatttcaacagatgtcatgaataatctgggggccccaggcagaaacctgctgcaagagtggagtcaccacagagagtctccactagtgtgatgcctagtggagctataggattgggacggccactgagactcaagaactgtagagctgtcaatgtgcaatgttagcctaggagagctgcaagcatgagactccaacgcctgacagctgagtgggctaagcccagcaaaggcctgggggtggggctatgtgaggccctgggggctcaattcccaccccagtgtattcaggaagtgggacatggagtcaaaggagattattctccagctttaacatttaatattgttttccctgttgggctttgaacttacttgagactagttacgcctttcttcttgtctatttcttccttttggaatgggaatgtctatcctacgcctgtcctatcactgtattttgaaagtagataacttgttttgatttcacaggctcacagctggagggaatttgcatcaagatgaatcatggctctagaaccatgagccaaataaatttcttttctttataaattacccagtctgtggcattctgttatagcagcagaaaacagacagagacagtcattcataatccatttcacttccctaaatcttggggcggggggtggttattcaatgtcaaattcttatttacccatgatgacatcagtgtctttgaaaaattacactagatcagaggataagttaccaactcttccaaatgtttggttagagatcattgatcagtagttagggttgcatactggacatgtaccagcctgctcactttatcgctttttcatgccaccctcctcagctcaacccccttcaggctttcagccacactgaaaataagaatgtgttcgaggtgtttcaccaagaatcacttattcctgacatcctggtagatcacccactttagccaatccctttaagcttctctttttcttttttcttttcctctttggaatgagtgcctaactatgtaatggttattggatgtatgtagatttcctgaaagtgtttcatgttttgaatgacgaagaacattctgggggataatatgttttaaaaaccagggaaacccgaaagatctgggagaagccacttaaactgaatcccaatttgagaaaactgaaaataagaaaagaggattatttgcctatagcaagtggaggattgaattt

SEQ ID NO: 44286 - DNA, 588 bp, Homo sapiens
actagaaccagaactcttcagaaaagaatgtgctaaaggtttgtccttgagaagtttccaagccaagacactcctaggagcacttcccattgaggccgaaaggctcatccacttacagcgattcatgggaaaagaggacagcaccctcatctttggtccaagaacacaatcctgagtgacacaggattgccctgaaagtcaacagcatccgtcttacaaaaatcaacaacactcgcttttcaaacttccaaagaatttactggtctggtttggccttttggtgccacattccattccagaaccccagctaaaatgttctcaagggctgaccagagattcctcctcctttctctgggctggtacaacttgaccgctgcttgacatcaaggtcaactggagactgggaacagttatgtaactgtgttgtaaattgaattagagctgtacatgagcccagaccaagtaaccagtgcagctccaggcaagagcagcaacatgtcccccagagacagcattggaggaacagcttactggggaatggaaaaagggtatcacagggtaaaaaagaaaccgtctctttccagtcct

SEQ ID NO: 44287 - DNA, 3546 bp, Homo sapiens
ctactactttggctatgaaagggcatgagagcaatagggaagaaatgaattgagatgaggaagagaatatttttgatttttgcttgctttctttctatttttgcaatgtgagagactagattgtgtctaaaaatattattccaatattttgaaaggagattactgggtgtactttcagtacagtgctagggtgcactttttacaacaatttacaactctgtaacagccaacatggacatttttattactagaaacataaataaatttaatccagagtaaatagactaacagtgtgaaccaacggacctgctggacattaaccagtgttgtgcctaacccagaaattatatcctaacatttctttgttgaattgactatatatgtcacgtttccagtgctttttgggctggttttactgttttacctgccccctccattatttaatgaattaaataaaatcattgtcatgtgcttgttttgcatttgcctgagaatcatgatttttaccattgtaaaaactatactttcatacttgccaaaccaattttaagaaggaagtggagagatcagatcaagcaccagcttcatgaaaatgaaagaaacatattcagaaaaatgcaggctgcagaacaatataaagaagaaggaagtaggcaacagtagagctgagaaaatcctaggaaggacacgaactttcaaaacataaagccataactatttagggttttaagtttgaggcctacagaatttgcactatgagttcataaacaatttctggtcaatacttattttaagtgaataaactagaaaagatagagacttttactcagagagtgaaagctgagtattgtaaggggcttttggatgcatttgtgaatgggaatccaaatgcaatggattggtttaactggtaatatctttacatttccaaattcagatgtttacttctgggcagagttcaacaagcatcatcagagcatctcactagttttggtgccttaccacctcttcacggctgctcacccggcactaatgtagatgatgttccacacagcccaggaaagaagtggtcattatggaaataagcacatgtggttaaagacagcagcacactctgccccgagctcccaaaataaacttgcttacataatatacaaaaacctcccaatcactcccttgagttcccttggcagaacagcccatttccaccaagaggaactattccattatccacgataaggactctactcactaacatttttgtcactcttacaataaggctttttgaacttttatcagaaaggtctttgctggccccttttgctgcacagaaatggtagttaagggcatcaaactggctcagcaaaaataaaacattaatcaacagtaaccttctgttttatctgttttcctacccaaggcctgattatctcgtgaacagtccattctaagaagtcattgtgacactgcttatttgagcaatatgtttattcagagttgctcacctcttacggtgatcttcacagtgtaaatttgtttgaagcagggatctgactgttcccaaattttgcctagtgcagtgctttttcaaacagaaaacaaaattcatgtattttgatcacagggataatactgataatgatgacgagaaggcacaaaggcctgtggggaatgttctgaggcagcacagagcagcagaatgttcataactatggctagttccatggcacagttacagaagcagcatcagaaacgatcgattggttttggcaccgctcacctggaagacaggctctagctgactaaatttctatgcattacaaatgactggttagcaaagaaatgtggttacaatgtctgactcattaaaaggagagagaaagagaacactttctcactggcttttttttctatgtagaattcatatgtccttactatactttatcacttgctctccttatttgtgataaatataagaaggtcaaattgttacctgtcttgctacatagtattaagaggggaaaaagccctggtggacaccttttgctgcagccaacaacatgcccattaccccatcctacagagcagttagagggaggaagaaatgcttcagtgcagttgactgttcctccaaggatgtgcaagaccataggcaggaaataggatccaaaacatttttatttgctgcagaagaaatggctcatgatcagtccatcatgttttgccaggcaaagctccaatcacctcctacaactggggcaaagcaaggaggggagcaagcacagagaaggaaagtgtaaggagatggcctgagggctcatttccactcctgtcccagagcccccttggtaaaaaacagaacaatggccaccatttatgaacatttaacatgtgccagactctgagctaagtactttcagtataccagctaatttaatccttccaacacccattatgaggtaggtataattaactactctttactctttcagaaactgagcctttaagacattaaataacttgcctcaaagcatacaactgccaggtgttggagtcaaatcccaggcccatctgactctacaaccttaccctcaatcattatgttatgttaatgccatagaaaactagacgtcattaagcctcctctagtctaaccttttactgagtgcacaaattcccttgataacatcccaaacacatggccatctatggctctgtaacctccgctaaaggagcagtactgcatagcctggcatttctcgaactggtacctgaatcctcaaagcagatagattcttaacacccatttgtacccagaggacattcaaagccatagtctaaccatgccccctctcctagagggtcaattatacttaaagagatggaggagcaattatattttttattaaaacaaacaatacagctaagtcctcacttagtgaaatgccaaaaaacaaaaccaattttattgtaggctaattgatataaataacagtaatggcctatttccgttcacaaaaacatcaccaaacttctaaagaaaaaccaaaacacttctaatatttaacactgaaataaatgtgagctatatgtacatttaagaaagattaataaaaacaagaaaatcattatttacccactgcctcagagtccccactgcctcagagtccccacaaggaaaatgcctggtggaggccgcagaagcagggccacccaccctccagaccctagaatattagagccaccagcagtgcgcaacctcagcgtggagaagctgcaggcatttgactgcaactcacaagagcagccaagtgggccgagcctgcgaagccacagaggcagggcttcctcggccttgggaacccacctctcaccggtgtgcccaggatgtaggacatggagtcaaaggagttcatttctggagctctaagacttactgtcgcaagatggccgaataggaacagctcaggtctacagctcccagcgtgagcgacgcagaagacgagtgatttctgcatttccatctgaggtaccgggttcatctca

SEQ ID NO: 44288 - DNA, 1218 bp, Homo sapiens
ctttggttgtctgtgggtaaagaagctacagaatgagatagcttagtaatttaaaaaaaaagaaagaaagaaagaaagaaagaaagtagccccattctcctgagccaggccctgcagataggacccccagtcaagatggtgacatctctgggcaaggagccagcttaatgcccccaaacgtcaccagcactcactaaatgttgaagaacacaaatactgggatcgctttaaaaatatctagctgtttctcttcaattgggttgaatttcctttcgcaatatgaactatgttcctgccaattttaaagtttacagctccagctgttagggagttatgtaagagcaaaagtgatcaaagagcctcaagagtggaaaatgcattttttttcccttggttgcataactcctcgaatggaatgggcaatgcaaaatgcaatagaaatatcatctgcccactcctcctgcccctcattactacctttccaagaaaagaaaaaaagttcaccttggagggagtaaagaagaacatgagcaatgttgttggactcaaatttagcatgcccaagcatttttcaaaataaagttgcaagtaactgaaataggtttaagctgaaaccaaattcctcttaactctagggcactttccctaaaaataaaaaatgaacctagtacattaaagaatgtagttctttacggccagcacaatattctaatgtcattatcttctgaatgtctctcctcctattagtcttttagttaacaagcgttgaaatcagtttgtaaaaagggaacttctctttttgtctttgccttcccagttcctggcataaaataagatccaataaataatacacgaataaggattatagaaaatgtggctttagccatatgtttagactgactatctgcggaagcctagacatgatgcaatgacaacctttggaagtaagagtgacacttgatgaaagccaaacatgtactttcttacccatttttccctttttcctcatggctctgattgcaaaaagactgataataaaagctagacaaagtcagattggtatttgatctgtgccccacccacatctcatgtcaaattataatccccagtgttggaggtggggcctggtgggaggtgattggatcatgaggttggatccttcatgaatggtttagcaccatcctgttggttccagtctcatgacagtgagtgactgag

SEQ ID NO: 44289 - DNA, 1881 bp, Homo sapiens
attataataacactcttctgtatgtcatcacaattaagactagtgtttatgaaaacaagccatcaatgtcatgtctttccactcttttccccaattcattactacttcttggcatccaggtgccctccctctgggtgcaggccaatcattttggaacagaggttactcagaaccaggcttgtctctagtggcctcctgggtgtcttgtgtctagtgatccttggcaccctgcagccttagctcaccttctgtatcacaaagacaggggtatcaaagggcaaagggggaaagtctaaaaggaagctcttagaactttcgctgggtgcggtggctcacatctgtaatcgcaacactttgggaggcagaggtgggcagagcacttgaggtcaggagttcgagaccagccgcctggccaacagagtgaaaccctgtctctactaaaaatgcaaaaattagccaggcatggtggtgcatacctgtaatcccagctactcgggaggctgaggcaggagaatcgcttgaacccaggaggcagaggttgcagtgagccgagatcgtgccaccgtactccagcctgtgcaacagagtgagacgctgtctcaaaaaaaaaaaaaagaaaaagaaaaaaaagaaagcaaaagaaaaaaaaaaaagaactttccaggccagaaaagaatctcccttctaggcaggaacaaacccctgtcatcacccactgtgttccctgcttacgcacaccctgggacacaggaaaggcatgttaaagccagtggccctgcgtggattgttcctcttatttgtttacataacccatgacagatgccaagtcaagcagtggaggaagagcaggcagcacagagtgtcactcagatgagcccttccctgcccttgccttttccactttccatgaggaggccagcagacactttggggctgctgtaaaccttcagttaaatggcagctcagtgacaatgacagcaaagctgcattcccccatggcagacacgccatgtgggcacttcctcaggtctgctgggaaaatcggagcgtcatgtgcagaccctgctggaggcacagcaggaagtgaccaggcacaggctgggcagtccttcttccgcccctgagtcactgccacatgcatgagaagggaactcagtgcaggctagacagaaaaggtggaggctcaggcaagaggatcaggaagacatttagataaagaggatgacgaagttaacacaacacccacaaccccacgcacacagagatttacactcacacacgcacttggcatctgtcctcagtgaagagcaattaaagacacaccccctcagattcaaacaagcaagcattaaacggattgcaattattctggaacaaacataattccaatttgtgttcccagtatctatgcagcaaacccgaatttcctaaactagcaccaacttccttttactacacccacacctactttcctatttcaatacggtccccaagatacatggaatttggaaatatatcaatcccattcttttctccttgcattgactttttccattcctcccaatcttccagaaaatatttggcctctctctctaaatctattcctggattcatgcaataagtattttttgagtatagtgagtagctgttacatgccaggcactgtactaagtgataggaacacagcaatatgcagaagacaccagagccctgttcccacagagtctgttatcttaatgcaaattcctatttcttttcttttttttttttctttttgagatggagtttcactcttgttgcccaggttggagtgcagtagcatgatctcagctcactgaaacctatgcctcctgggttcaagccattcttctgcgtcagcct

SEQ ID NO: 44290 - DNA, 590 bp, Homo sapiens
gtgtttttagtagagacggggtttcaccatggtggccaggctggtctcgaactcctgacctcaggtgatccacctgcctcggcctcccaaagcagcatcacaactcttgcacttatggccatagtcaagtaaaatcagatttacctggatgcaagcactggataccatgacagtgaatctgatagctgagccggctactaagtgactaatgggcagggaatgtagaaagcatggagacgttgggcaaaggaatgattcacatccagcgcagaacggagggacatggtttgagatttcatcacactactcagaagggcatgcaatttaaaacacatgagttgttatgcaaccataaaagagaacaagatcatgttctctgcaggaacatggatgaagctggaggccattatcttagtaaacgaacacaggaacagaaaaccaaataccacatgttctcacttataagtgggagctaaatgataagaacacatggacacatgggaagaacaacagacgctagggcttaccagaggtgggaggctgggaagagggagagaatcgagaaaaataataaatgggtactaggctat

SEQ ID NO: 44291 - DNA, 737 bp, Homo sapiens
cgggttcaagtgattctcctgcctcagccttctgagtaggtgagactacaagcacctgccaccatgcctggctaatttttgtagtttttgtagagatggggtttcaacatcttggccaggctggaattgaactcttgacctcacaatccacccacctccgcctccctaaatgctgggattacggcgtgagccaccgcgccctgccgccttcttttttattattacgtaagatagataacttccagtcaccaatttggtgtaatctccctttgcagaattgtccctagaaaaatgttcttattttttcatgtttcctttccaagttaaacaccttagatttgcttagcccattttcatatttttgctggatgccattttccactatcttcatcaggctttgttttccctcctctcttgaatggtgaagctgttaactaaacactgtcctctctgaagggtctgaccattgctaaatatgtccaatgtcctcttggctgcttcatttaacatgccagccttgaactgttctttcgaaaaccacttttagtacatttctgattgatgtttaacttttgaaacctgattctttgaacacctgaaaaacccagtgttgcattggtgcagttcattttcctttttgctccattgtcaccctaacctaccccattcattcagcttcctccagtttggccaagtggttttgaggtctccctttccctgtggcttttccctgtctg

SEQ ID NO: 44292 - DNA, 2397 bp, Homo sapiens
tgtatagagtttgtttttcttataaagatctagacagatgtgtatagacctagatctacataatagattatagctatagatatagatgtatttacagatataattacatttataaatatagacgtagctatgtttatagatacagatatctgtatatttgcagggctaactcatgcagcagcagagggtgctgagagtaaaggcactttattcggtggatggggcatattttgactcataatctgcctttttcattcaaattaagacacactttgtttaatcctaaattctttctagattcttggttgttccccaccacccccagtccagctttgccctccccaactagagtccatccttagctgtggcctctccagtgaacccagctctgctgtgggtaacccagtccagggagtcctcagattttcctaccacagagaactggctgctcctgttatgtctgggatgaagggaacaaggcctgctaatttcaagccagtacattcaaccagcagctctggtttcctcttaccctctcatacactgcatgatccttgaatgtgttttccaatggcaaagattctttccaaaataaggctgagtggagtcttagatgtaaagacagaaatactaacaatacactaaacattgagtgttatctataaagctgagggctttataattaacccttaaagcaacttcttaaggcaaatattgctattatccccagtttacagataagaaaaccaaaacttaaagaacgatctgaagtttgattcaaacccaggattgcctgactccctaacatgaatcacactacactgcttctgtctgcgggagtgtctcgcaggagatttcgcaaatgcccacgacatggattctgtgttaaactcctctttcccaaggcttcagttctttctggctgagcacgagcaaggtctgcagctatgcagaagcatcttggtgaagggaggcaggacccctgctgagcaatcgtgtatccaccacaaaagtgctggtggcgccagcttagtaaacttagagttacatctttctccctgagatggttcagaagtttggcttagtgatcatcatttgaatgacagaaattctgtgtacctgatggcttgggtaatcatcttcagagtgctgaatgccaggcttggcactgagccgggtggggctttacctaggctagcttgactcagggtgctttttccccaaaggccattcctctacggaagacttagcaagtatatgaaaaaaccctgagtcaggccagtttgtatatataatctaatattgtcaaaataaattgatttggaatgaagagcttcctgtttctgcagatcattttcctttgttgaggatcatctgaagctccgtttttattaacttttatgagcaccttctctcctgttctcctgtcaacagattgttgatattggccctgattgttccatgtatgggtaaatgtgaaccttgttctcttaaatcctagtttgataagaactaacaggaaaccgaaaaaagaaattaaataaaaagtgtaagtcctgggtacgttagcaatgcagaatccaaaatagaatatggaataaggtagtcaagaaattagcacatttgtatctcatcatacaaatcttaccacttgcccccagatttttaaataatgagcccatgaaggagcgcctagatttaacagtgagatccaattataagggtagatattaggaaatagttacccaagcaatgaccttaaagggagaggatgcagaagcatggattccagctgacacgtggaaacctcccttttcctcatgaaaactgcttcagcaacccagaagaataaactttattcagggaaggaacaccttttctactgcagctgaaggtgtggaggtagggatagtgagaaggcagatatttcataagaaggaatccttgggtttcggggatatcatacatgacggctttaattttttctatgaaataaggtgcagaggagatggggagggtagcttgaagagagtagtgaaagtctggccccggtagagaaggagaggggatctgaaaaaggcaattttttaaaggacacagagcactctgaggaccagtctgggtttggagaccctgaatgtacaggggcagcaataagtagtggagtgacataccaaagtaagagacagcagagaatcaggatgatccacttgtggaaattggagagacaggtgcagcagaaagacagtggttcaagagacacagcccatatttagtttggataaggaaggaaacaagccacaggtgaggatattcaatgggaagggaaaggagcatttaaagggctggtgtattgaaatagaatgaggttgaataacaaacactggggtcatgaga

SEQ ID NO: 44293 - DNA, 2409 bp, Homo sapiens
gttgaactgaatcaggaggttgaagacaagatcaattcaatgaactgcccacgactacaaggctaagccatgctcactcagcctggaccaggtctccttgtattcttggtcatttattccttcatttagcagtttgcttgcttaagataccagtggttgggagcatatgctgcttatcaggcactctgataaacaagtttatttggattatctcacttaatcatcaccacaactcagtgaagcaagcaacattattattctaatttaacatgggaggacattgattcttagaaggattaggtaacttgaccaaggtcaaaattaaatagcagagtcagcagtaaacccaggtgcatcgaccctatccagagctctgaattcttgcagtatttcataaagagatggagggtaagctattatcacataaatttttttcctgaagaattgagatcttcaacaatattcaaacaatactgttaaaatattgttttaacaatattaaaacaatgtcagcagtctcccccgtagcccacagaaagtgggaaaaccgcagccagattcaggttctcacagccctccactctgagctcttccctcatgccttgggctacaggtccacattttttatatcaagatcttaaatgcctcacccaggcaaagtagcttccatggacagcctccgctttcacccctaagacaatctgaaatcatccccagctgataatgataagtccttccaaaaggtccaacctcaccacacaacaatgaaaaaaaaattgatcttttactgaagactctgaagaaaaccagagaatcatcctccacagagtagaactcatcacaatatcatgaaacattttgattctttcctgacggatttctcctgcttctagctgattcttctatttttttcccttgcatatgtctaccaaccttttctagtggagcagttcaactctggccttgcccaaaaccccttcaactcccccaccagcaacatgaaagcctagtggttagctaaacagtactaagcctgtctccagagattcagttcctgtcactacaaaagccttacctggtcaacccttaaatccactgttgttgcaccaacaaccactctacatgtctcaccccttttctaacctcctttctctcttcatgttctcctcaaggaagaggaaaaggggtcaaggaagtgattctgaacaagaaattcttacagcatctcttcccccaccatactctgcccctgcacacatgtacacacatacacacatgcaaacacacacacacactttcactccagagatatctagccttcagagaaatttaaagatgtttctcctgctaagcacttttttcagttgcctgatcacaaataaactagattttaatgttaaaaactagaaaatgaaacaaagcaagaaaaataataccctacattccagaaactgaaaaattcttgtaacaaagaataagtcaaatcagaaactgaaaaatgcagataataaaacacaacatagcagaatctatggaatataattaaagcaatgctgagaggaaattttatatttatgtagttaaaaggaaaagtttagacaaaacaaatttaacagagtttattttagcattaaatgattcatgaatcaggaacactcaaaaccggaagaggttgagacagctccactgaacctgcatgagctgcaggcctttataggctgaattgagaagcaaaataatcaaattacttgattggttatagctcggtatttgtcttatttgggtctgatccagtggaaagtccctacttagaggtcggttggcagtttctgactggttaagtgtaactagtgtaactttcattttactatgtacatgggattgggttttggtttgtctacataggaaccccaggcgctggcaccatctcagcctaatggcctcccaattaattgttttaacaatattaataaataagaaagaagtaagtacataattcaaaaatttagaaaatgaactatcaaagaaacccaaggaaagactaagtgaaaataaaagcatgagtcaattaattataaaaccaaaagtattataaaatcaataaataaagccaagaacaagaaaaacaataaaagagagcccattagctagtcttttttttttttttttttttttttttttttttttctgagacagccccattagctaatcttatcaaaagcaaaataggggctgggtaccatggcttacacctgtaatcccagcactttgggaggccaaggcaggaggatcacctgaggtcaggtgtttgagaccagcctggacaatatggtgaaactctgtctctactaaaaatacaaaaattaactgggcatgttggtgggtacctataatctcagctacttggga

SEQ ID NO: 44294 - DNA, 962 bp, Homo sapiens
catgttggccaggctggtctctaactcctgacctcaggtgatctgccagccttggcctcccaaagtgctaggattacaagcatgacccactgtgcctggccaggatctttttaaataccatacagatattggcaattatggtcccaaacccgtgtgattagaaattctcagaagaaacatttaacaatattttgtccatctttatctgttatttgtatttcactacatcaattgatagtctattttactgcaagccatcgtatgtcctttttgagaacagtttaaattgtaaccacaaaatgaaaggaataaattgaagaacaactaaaggctagttgattacaacattggattatttttaaataaaactttgctaggatctcagggaacataagtcaatgtgctttgcttttagagtaagtttcaggccattgcttgaagcaatgatagcagaatgaattgattttaaagagcgcttaggcaggctcaaagtctgagctgggaaaacatggaagttccaattcatcattaaatatttacatggcagttaaaatttaaagacttagaaattcagacctgggtttgcttgccagtattaatgggcaggttggagtagcatggactctgtgtaaaagagagtgatgaagttccaaaatatgctaagtgaaaaactgtaaatgcaaaacctttgtctagtgtgctgccttccatgtaaaaataggaggagcctaggcgtggtggctcacgcctgcaatcccagcagtttgggaggccgaggcaggtggattgcttgaggtcagcagttcaagaccagcctgaccaacatggtgaaaccctgtctctactaaaattacaaaaattagccaggcatggtggcgagtgccagtaatcccagctactagtgaggctgaggcaggtgaattgcttgaacctgggaggcagaggttgcagtgagctgagac

SEQ ID NO: 44295 - DNA, 3551 bp, Homo sapiens
gaagaatgggtgggggtatgaataaaacagaagtggtcatgtatcgatgattgccatgagagagtgacgggtacatggggctcaacacttgattttctctgcttttgtgtatatttgaactgttcccagataaaaagagtttttcttaagagactacagtaaagtgagaaaacacatcatacagtagcaggaatgcagtaataactttaaaaaaaatggctgctggtagccaggtgtagcagtagttgtagtatcgtgatagtttttattagcttcagttaaatggtcaggaagaaaggctgataggcaagggaatggattaacggatatgtgaggagaatcatcccttttcaagttcttctaacaaagatctcacttttcttatgtttaagggagcatcaacccccacaggtacagaggtctgcagaactctaacatataacattcacagaactcggccacaaaccagaccccaaaacatgctagaattctctctccattgttgaatgttagcagccattttgctttcatttagagcttcaattaaacagtatcaaatacgtcaggtattttcttttatttctgcaaatgtatctttacaatcaaatgcctcatttttagccattcacccttgaaaaactgaaagtgatttcaaatagtgatgtgtggccagctttaacttggacagtcattagtgttagaggagtggggatttggaaatactgccttaagaaaagtttcccccttaacttattttttacccttcccacctctgtctccatggaaatgaggtcagaggccacggagagctcccagggagccagcagctgggaatgagaattctcacttagagatttcagctgaaagctataaactcctttacaaagaccagctgagtcttttggccaccatagtctcctttttacactaataaataggtggctttttttttcttttgtctttctcttttggcacatacatggaggaagaagaggtgccactgagtaataaccatttttgcatttatacttgaacttctgtgcaataaatcaagatggagatattccttaagaatttattttcaacttaatatgtttaaatgatagtgtacatatggaattaagcaattatcacttgcttgatctctgtcctttcaagtttatgataacaccagatatttgaagacaaatatatgtggttattcattacatgctatcagttataaatgattctaatagaatgtcaccatgacataattcaaaatcacttaattaaaagaaagaaccaatctcaagatatgagcagttggtgccattaaacaaaatgttttatgaattaacgtatactttactattagtacctgtttttgttgaactgttaacacaagtccatatttttttgcactttattcagtttatttactcataaatcatttgaaaatatctgagaagggtgactactcaaatatgccaaacactttgttatttttataagttatatattattatttagtagccgaatatttattaaaacaatatgaaatgtaaatttagtttaaaaaaaaaaaaagccctaacaagttctttttaaatttggagctataggagtctgtgtttcaaacttttttttccttcatgccacactttgttttatggttcaaggtttgtagactcaataagattcagcattatttccaagaacttttacgaaatttcatcattactcttacataaaacactgagttattacttttaatcatcaatcacacaactgctctgaattttccagaacttagcttcagcaagcatcagaaccacagcacctctctcagacactttcacattctttctctctctcttttttcagcgttgtggtcagcagtctaatgatgctgggcttttattctttactgtttcctttgtctttgggccctttcgcaggtcgctgctgagctctctctctctctgtcctgggttgagcccttattccattttcccctgctctcagaagtgaaacagaacatcgtgttccgaagctgcccagcacacatgcttcacgatgctgccaagtttgcagctgaccaattggcctactttagaggactcgcatttacaaaatttacaagtctttatttccaccagcccatcacctcctccccaccccgccgaaaaagagtatgtcaaacacactgataaatcaagagttttttggtgttgcaacaaaatgggcagtcatttctttgccctttgctggctctcagccttgctcttccctcctgaatagatggaaaatatgggttggtgtacggtacaaagacattcaaaagtgattgcctctgtattaataactaatttcaaaagaaacatacaaacgaaatgatatgctcttctatttttttcggagatcggtatttctaaagtaattcctttccaaaaactgatccaggcaaacctgtcttcttccaaattaggaagacagagttaatgctttgctttttcaatgagattgggtcaggcaagtcatggatttagatattttgaacactccttattggcatttgaatcttctaagcttctataatagattcaagatcaaataggagagggtaaggatttaatggagcaaagaaaagttgtaggaattggtttcttgtgattttagtgattcctgccccactcttcaagaaaaggaactcggtcaagggtagatccaggttattgcaaagcttataaaatatggagccctctttatgaaaaagaatatgaaattaagcccaagagtaaatatctacttagaataagagaagaaaccataacaaatgacaaactttaaaaagcatccagaaaaatagcatcattaccattagtattaagaattattgttattatcataacttcactgtttgatccacctatgtaacatttcttttccctactttttttactttatcctctttgatcgttcctcaaataaccaaaactttataatactattttgtgtaaagagaatagaaagataattttgtttttttttttctggcatggcagatagaaatatgttttttgttattaatggcttagaaaataatctttcagcttgagaattattggtcatgccacagctgaaacaatctcttgctccagaggtgcttcgtgctctaagaaaattcctcagagactccagacctttgatcttgctgggcagggctccagctgaccctttggccattgtctcagcaactgatccagcatcccatttggtgtcctgggtggaaagggcagggctcgagatgctggtggtggggcctttgtctggagaaccctgagcagagagtggtggagcatctcattccaaaccttctccttggtgccagagttggatttcagatacctggggaggctccacatgttgcagggcatcactggaggtcagcaaaaattgagagtacgttcaacctaccagccttccacacagaccgagaatgtagagattgaccctctggctggcgtggctctccatgcatccagctataccttaaatccctgcgaagg

SEQ ID NO: 44296 - DNA, 3279 bp, Homo sapiens
ggaacctaaaggaaatactgggaaggtcacagcagtttcatctcagcttattggattggatcaaagtaattctactgcaaggcaaggtatatcattccatttacagacagagaatgcatgaagtccttcatttcacacagtaggtgtgaagaaggtaccttggtaaatttcctatttgctttcagataaagtgtattcttaaacatgatgtgggtagctgcctgtttttgtgtcgcctctgcaagagacatcttggaataatagaaacaccagtgtctgaatagcctaaagtggagcttacttttctgttaggtgagtcacctttaaaaatgatattttttaaggataagcgatgaattttaggacgttcttccctctacttccaacgtccacaagaataaaccaccaaattcaacgttttacagaggccaagtgcttaggttttgtgtgtttgtttttaagagttttcttgcaaggaaactgggagggaactataaaagggctttaggcaaacagggtgggcgggtgcagggctttaagctgcagaaaggagaatctggaaagagcttttaggaagcagattctcacatgttttaatatgaaagagtggcacacgtggtgctggcattccatcttaccatcagtggaaggtttgaaccaacatcaaatttttctggagcaacttaggtaattattacttgaagaatatgcatttcaaaactaacacctttaagagacaatgtaattcacctgcgcttccccgccccccccgcccgcgccaaccccaccccccgccaaccccgcccccgactccgcgaacgccgaggggcccgtggtctgcctgagtgacctccatttgctctgtcatctcaggactagaagccatcagccagcgtacgccctcagaaaactctcttcccttctcgcgggtccgcctggctcccggaggcggcggtgccaggctgccggagttagccagcggcaggctgcgggcgcccgtccctccggttcaccctttcacccctccttcacccccggagcgccaggcgggtgccgcgggttttccgcccactcggaaggcagtgctggcgagaccaggaattgcagggcctctccgctttggcgagctctggaatccgagtcctccccaccccagccactctgctggggcgctaggggctcgaaaaagcctggggttggctgaaagacactcggattagagacgcagccagcctccagggaggtctgaacttgtcttcgacctccccgaacccctccgcctctgcgctgggagacgcccagcagccgggcgggcccgggacgtgtagagccagagcactccgcagcggaggcagcgcgcggcacggccgcccggggcatccccgcggctggggggcggaaggcgagggcggtggcaggaagggtccgccaggcctgagctcgctcccccactgccagccgccggctcggaggcccgagccgtgcggacggaaaggggcggagccgcgggctctggttggtgtgggctcgggggcggggcgcgcggggccgggccggaggcggggctagcgccgggcgctggagctgcgggcgcacggagaggagtcgccagcagctggagcggagttggaggaagcagcggcagcggcgagggcggcaggctagctgtcggagacggcaagcacggatcgggcacggccggcgggtcgcagccgggctggaggccggtcggaaccgagcgggcaggaggccaccgctgcagcgcgggccccgcagaggaaggaagccggcgggcggggtaggtaggcagcagcagccccgggtgtgtgtgctcgggcgggggaggcggtgcatgtgtgcacggctgccgcgactctcttcctgtcactggcagcggcttctccttctgcagagccccgccggggggaagcgggctggccaccggccctccccgcctccggcatctcctggccgccgggcagcactacccccgcgcgcggccggcgtcctgtgagatccccgccatcctgactcccgtttcccccgtcctcctgcgagctggtcctgcacgccgccggtcgcatttgcccccggagttgccgacgagctcgggcttcctcccaccctccgtcaccgcacacttcggagggtccccgctgtcgccttgctgcagttttccggggcccctcaccggaggagagcgccctggccgctgccttcgtgttgcgggaaggagcgctcccttcccccgtggccctccagctgcagccagggtcgctgcccgggcccttcccggggcgggcgaggcggcggtggtccccggagctcgtcccctaacccccgccttccgaagtttgccgccctcctcttccggggtgggggaagtgcgcctcggggcggttggtcgctggggccctaactcagcgtttattgccagccaagcttgggcaggttgttggaggcatatttagtggggtcttggaaccgcccggaaatccagcttttggaacgtggggcgaggcgggagggacctgcccagcaatatggagccggctggggagagccagggagcctgcaacccggagctaaaatatcgtgggcaattctctggaaaccacagctctaacctaagctcagaaactgcccctcagatcacaagacaaagagaacagaaaacctctggccaggcactcctgtacagaaatacactttgataaccagaattggagcctgaaatgcaaggatatatgcagaatggctgttacgtgttgaatgcagaatgtgtgtcaactgggtttgggggaattcttctgtttcccggggcgctattaatatcggaaaggtctcacttccaccgttaatcccttgagctgcagcgctgttggtgtccgagtgtgagtctgctctttatttgggggcttcatgattttaggttttttttcttttttctcttcttttcctctttgtcagccagtgcgaagtaccaatggataaagcagttccgggttttgaatgcaacataagattgtcattttggtgtgatgaggctcaagttttagtaatcaggagggatattcacagagcttattggtcaaggcttgatgtggagttatattttaatgcttcattagttctgttacgttttggcaaccttaaagatggttagatattagctaggaagggttggagtgggcagacaggttcatttcttaagcaggttattagaatattagattgtcacagtttgaattactaggaatttggtgacttctgcacaga

SEQ ID NO: 44297 - DNA, 694 bp, Homo sapiens
actgtagaaacatctttggagattttattctgctagcattgttttccttaaagtaaatcaaatacatatccacaggcacctgtagtcaaaatagttgtcaggttaatgatcatccaagagagtattgaagtcacaggagtctggccacagtgtgaggaggctccaccagtgagtgtagtgagttaataaagccaaggcatctggaccagccattccttgcctgttgtcttcctccccggatgtcccagtgtcccagcctggggttctgccccaggatcaagggctgtaccatgaggacacagctactcatctctaaatcctggggatgcacacacacatgtacacatcccttggcctctcccaggcctcctttgtcctgacctctgtagagccgtcctctacctcaggtaaggagagaactacatgggcaaagtccacactcagcctttatctatttactccaaaaggggtttaagacagcgggagttttattttagctagattcaggattcacttagaactgtttgcagagttaagaggcaatgcagaagaaaatccctcataaatgtttgttcctctgttaaatctgaattgtataaatggcagtaggtgacattcaatactaatagaaataatagtaatataatagttgcaatttactagctatgtaactttaggcaaaatatttaacttt

SEQ ID NO: 44298 - DNA, 1464 bp, Homo sapiens
tgttgttgctgtcctcactgctggactggaatctgcgtgatgattccatcatgggcgaagccccaaattatttagccttgactcagtctctcctgtctggatgcctttgcaggatttagtcttagggatcacattttcctacttgaactcttcttccttgtttttgggatgttgtctctaaaccttgactttccttcctcagttacatacattgaacttcactatttggcccttggatcatttttttttttttttaacttttgatttgtccttgtgagctcttccattccattgaattcagccttgcctaattgtggccgattgccaaatccctagcatgtttcctcttctgaatcacagaccagggtttcatcagccactagcacacttgcacaggggtgcccagaatcaccgtcagcccatcaggtcacctggcttctctttgcctgatagtgctccaaactctcattaatgcaggatcaggcaccctttgctcctctcgttctcgccgcacatttaagcatttgccacatcccacatgttctttctctgcagtgtttatttcactcctcccctttccacacctgctgctgccaccctggtttgtgtcctcactacctcttggccagacctctgcaacacacctttctcgcacactgtggttagattgatattcctggagtgcagctctgatcccgttgctcacttttcaccaagccctttccgtgttccacactgtgggctgaattactcacaaactcagcatgggcatgcgtgatgtcctacagcccctacctaaatctctaaccccaatcccactgctccctctttggctccagacggattggactgcctgttctagctcttctcagaatatgacattttcttggtcacttctgtaactagcgtccgaccacacatgccattctgtcttcagattcctgcagttagtgtgctttctccctcgtttgaaccctgcagtgtttagtttctgcctctcttatgacatgtactagtgttgtggctctgtgtactctgagccacattatcagcgataatgtcacattatcgctaagacattgcctcatgccgacactcctcccctctgcccccgcccggtgttcttagaaggcagggactgccttactaatctctgttgtgtcaagcaatagcacactggcctgtgtctgtctgccaaatcgattaagtacttgttgaatggaagtagaaattccaattaacacagatggcaaagtgtgctgttcattcttaagtctcgtttttttcattcctaggtgaagctcgtgtgtggagtgccacggtacaatcagacgacagatggacagtgtgacaaaagtgtcagaaaggattgggcctcgctgtgagagtcagcctggattcaaagtgttgacaagttgctgaaaaggaagccagtgagaggactgtggcacgcagaggaagtgg

SEQ ID NO: 44299 - DNA, 1128 bp, Homo sapiens
agtaattatcaaaataataaaactataaagtatgtatcttctaaacacctagaaatatatattccaaaagataggcaacaaagaaagaataaaaataatacagggaaaatgtttactatatatgactactttaaagaaatacagacattaacatatgtatgtacgtatatacacatacatatatacatataaaattgaccatatacatatatttgtgtgttcaacacacgcattatttttcaggtactgcactaaccttttattccattgacttgttacttttcctaagaactctgtgacactggccttattatacctgttttaaagataaacaagtttagttagagatggcccaaggtcacacagctagtggaggagctgggatttgaccccaaacagtctgactgttgacccaatgctcttaagcaactgtgcaatacagcgaaaggggcgccgggggttaatgttcacactgcttgatgctgctgacttccgaccagccacaaggcaccccggagccaaaggcagatgactccctggcttgccagtgacgtgtgatgcggtctgatatgacaaagtgagttaaacaagcagatttttcctctcaggaaacagacacaagaacaactgaaaagaataaagcagatgtgtgagttactattccttacagcaaaagaacctcatcagaaccgcaggctggaaagaggtgattacttttaaagggcagttcattcctcctgcatgttggaaactgtggctcttaactggctaaaattttaactttcagtgtagccctcacttggcttgtgcttcttaatgttgtagataacattatagatttatataatattcaacttttatatatatattacttatatataaatgtttatgtataaatatatatttgtatataatatgtattcgtatatgatatgtagtaaatgttatatttaaaccatcatatagaaaagccattattgggtacactgtacaaatctgcctttataattgagtgtactgttctactaaaagcagctttagagaaaggattgaaagccagctctttctacttcactagccttcattgtttggattggcattatgtgtacagttatattgtaactgtca

SEQ ID NO: 44300 - DNA, 2737 bp, Homo sapiens
tctaaaattataattctaaaaccataaccagaagaagcccattaatttctttagtagagaggtgagtagcctcttgtttatttcactactgatcatagtctattgtgagatatgaagatgtattagcccaccagaattaatcacctttgtctgaagtagtgaaagtatattgcttcattttgttaaactctgattccttacacaattgttaaggattgtgtttacttttatctcaaaattgttaccttttaatatatatagtcttatatcagtgatcttttcaaacttttaaaatgaagtctgaataaatattattttcttatgcatttcttctgcaccagctgatagggaattttctgtacaatgttttcaggcctcttgcctttcttgcctttatttttctctgcaattccacacacaggtcattgctttcccttcctctccctttttgatcatggatgcttcaactcccttcatatatttgttaagcatattttactaagatttcattttgtgatgcttgcaaatatacattacaaaatatatatttttaaaaagtgatttgaagggccctctgtccatctgatgattaactagaagagtcttttgtaccttgctaaaagtgataagttagccagctatatttagctggataaaacccattacatccttggggaagaatgtgctttgtttagctttatgagaaaatatttaataaatgctgtcttgaaaatatttagcctggctgagtgagctggcaaggcttcaatactgataaagcagaggtgatggtgaaaagctggcctgccagtccaagctcaagttaaaaaaatgcacctcttgtcactaagggttgcaactgtcgccaagtgcttgtccatcagtgtcacgtaaagattttttaacctcacatatggcatcatgcagtttgtctgcctaaaaaggcaacctagattcacagagtggttacaattggctttgaagtcccatctgttctgtaaaatcctagctttatttcttactgctggtatgactttaggtaacttgtttaatttttcttaatctcagttttctcatctgtaaaatggggacagtgataatttcttagagcgttgtacagattaaatgagattaaacgctgagcagagtttcttacactaagtgttcactacatgggaattaatcagcagtagtagtgatttgtaatcagcctaacattttctgtccctccctaactcctcccaccccacaggagatacaaagagcaaagtcctcttgaatgtggcgaggtaggaaaggctctggcatgggcatcaggaggcctgggtcctcggcttgaacttcctgtgggaccttgggcaagttgtggctcacataatccctccccactcatcagtacacagtgcacagggcagcagagctcctggctgctagtctctcttttgatacctaattcgttgtggtatcagaccaaatttgatatgatagctagacccgccggtccgtcagtatcatttggggtctggtgtaagatcagcctgtgaaactcaggcatgtaggcaacaagttatcagtaagaaggtcaatcattgggattctgtctcccacaatggtctggattttctctctgtggctggtgggctcagccccaatccttgctactcaaagtgtgattgtggtccgaggaccggcagcatgggcatcacctgggagcctgttggaaatgcagaatcccagactgcaccccgacctcctgaatcaggctgttaatatgtacattaaagttggggaaccactgcctcaaactactgcccttgggaatattctgacacgcagagggtatttatttactaaatacttacagaatttgtgtttgacattgacattttctagacaaggttccattcctctctttgggtgtagtgtactgatgtgttaggtcagggttaccataacaaaacaccacagactggtgtttatgtctgtaccaccatagacatttagaaatctatttctcacagggtgccagtgtggttgggttctggtgagggccttctccctagcctccaggctgccaccttgtcactgtgatctcacatgggaagggtggggagaaaggtctctggtgctgcttcttataaaggcactaatcccatcgtgagagcacttgccctcatgacttcctgtaaactcagctgcctcccaaaggcccatctccaaatattatcacattgagggtcagggcgtcaacatgaatctggggggaagggacacaattcagtctgtagcaactgacttccacatctgactttaaaatgcatctttaaaaaaaatgtgctggcagataaatatgtaaataaagcaaatatgaaaatgttaatcgtagaatctaggtgaaagataatgtgggcgttcactaaacaattctttcaacttttcaggatatttaaaaatgtcagagaaaaaaccccctactctctatagttatttaaaaggaatctggtgctgcttttttctccttatttccatccaggctttcttaagagtgcttgttcggtctggctggacaaacttgcctttttggcagtttctctctctctacccactcactttctccttggtcagccagtggcctgcttctgcactgtcagtgaggtcccagcctggatccaaagcttctttctggtctctagtctgccagtagcatctttctgtccagttcctctccatccccctg

SEQ ID NO: 44301 - DNA, 5001 bp, Homo sapiens
aatatagtattcagtttgtaacttttgaacagtttaaggatcaagagacattttcctaactatatctgctgagaagtgaaacaatgggctgtatttgcctctgaaatgagttttacgaaactttgaggaaagggagaatgatacatattgttttaaagaatccagaaggtaaagttagttttccagtgtgtctaggcctttgaggtcccagagaaatgctgacattaaaataaaagttttcctacaacactagcagcttcgtgaaaactgtacttttgatttactaattagtgagtcatatagatcaagtgacagtaatacaattatgtacattagttggtgtcaaatttggacatacgaaatatacagaaagttgatggttttctcccaaagcaggaattactgattcagttctaccagcagagggctcccttttttaagctaataaagaacatgtgtcttgcagatcactttttaaacactaaaattcaacgggaaaaagattcagctcacactttcctaatataataggacctctttggtagatgattgtacatattgtgagaaatttgtttaaggcaaagtttttccaatctatttcaagactttctatacgttgagagagtactgctttccagtggcttattttcttctgaaacagaaaatatactggtggacttaacagagcattttaatcttagaaggttttgacatgaaacatcatgtgaatccagacaggtatgcttaggagactgatgtttccaatgtttctagctttagaaaggctatttttaaaagtagggcaagattatgcagctcaggatgcaagggtattctctgaactaaccatatgtccctatgatcagatggcagattcacttatagactgttatttccattgggaaagtttttcaatattatatcagttgcactaaaggaaagtttgtaaaatcactttcattgtgggtttaacagcactttccagatatttcaagtaaccctgaagctagttgctgctgttggcctgtgtggactttatgtgaccactggatcactttcccatgcagagtatgagggtattattgaaagaacctatgtcttcaaagggaatgaaatgttttgttttaatttaagcaagctaaaaatagaaaacagaaaaaaccagagttttgttaggggtgtgaaattttttgcatgtggcttaaaagattaacttcagttttgtccatttttttttacgttctctagcaaagggaagtgaggagcagggacaatgggtagagaagggcatttgaaaccatcagaagattgggttctagtcttagggctataatcttctgtaaaccacttcacctccctgggtcagatttcgttttcccctctatggcatgcaggaattgattgaagtgaactctaaattactttctggtgtaaagtttggtgatttccctggataaccttaaagctatctatgctcatgcaactgaaaattttcttagatcaaattttaattaaatagtagtcagtaatcccaagtctggtccattgccactttctcaaataaagggcaaacatccgcttagaaaggtatgcccttctctgcccttctatcctttaccccattagctggcacataaacctaatgcagagacaccttttaattagcaggtcatatggccatttaaatgcgagttgcaatcgacctcataaaaatagccgcagtgttgttttattctgaatcgtcacatgatcatggagtatagtatgcatatggtgtggggtttaatattcgtccgaggatgccctcctactacttactattgaacatttttgtaatctcctccctgcccgagttgctcacaagggctttcctgttacacctgcagggctgtctgtgctggtgtgtgggaggaggtgcaagaggtggacacgagcgaggcgctgtgttctgggttgttccaagaggttcaggcctttacaagtgaggctttgattctattttttgctgaactagctcagccacttcctgtgtttggctgtgcatagtgcctcgcttcactgtcggctacttgagccccgcgagccagccagcgcgctcagcagccagtgagactattttaggtcccctcacaatggccttctcatttcccaggcgaaaatgagcaagttggtcttgcattggccacttgtcagccgatgacaactttgacttgggctcccctccccctcccgaaatccctagctcagcaaatatttgaacctgcccaagttaatcatgaagctgcgatctttatctaagggagacgtgcgagcgcctgggctcctttcctccccgatacagtagcgaaatccagttggcttctcaatgaggagccggcagtgagcggcggtggcccggacgcactgccgggcggggcgtggggcggagggacgagccgagccgagccaagcggagctgggccactgtgcacgcccggagggtcctggcggcgcccccgctcctgcgcgcactctcggcgccggacacgagcactgcctgccgggaacaggctggggggaggtgcgggggcttggcccacttggtggaagaacagctttggggattttttttttttcattgtcggatacaggcatttcaaagggaaaccgttgaaatgcataacctgcaaagtaagttgccttgaatttgtgcacttctctgttccttatctgagcggtgcctttctgtagtttgtcttggagtacgtgtgtgtgcgtgcgcccctgtaagcgctgcctggggaggacagatgggagattaggggagacactccccctgtcctcgagggggacagtggctgggaaagatagggtttaggttggaatttcagtaagaaggtactaattacaacgtgcttggttggaagttggtgccaggccagggcttggagagaccatgggaaaatcacctgtctccctgccttctccctgagttagtttgccacagaagatccaacagccagactggtttgcaccgacggttcccaaatgcatggactggcactctgggctgttacacccgccacagctgctcggagaacttgtctccttgcttcgggggagggtcgacattttaattaaactaaaaaagaatgtttttctgaatcttagggcatacagccacttttaccatttttatttgaatttgagttcaggtaaacttaggcaaatagaaaagtgggagagggtgggaagagacaaggtgagcctgcttttcccaatactgggaaaatgaattaaactagacgggggacgtcagagaacagaatgccttgcctttggtctgctttttaatatattttatgatcccaaattttacagaaagtctcaagggtttctgtgttttttaaatggtcaaatatgtgacatacatgtgtacatagatcacagagccccactgtagttttttaaatgagccacatttaccttggggaagagcccctccccccccgccatcataatattgtgaatgtaaagagagattggttcacaatgagaatgtacagtaggctcctataagggtgacaggattatatgcagaatgactttgaagagccaaaattgatttatttatgttaagtagtgctaagaaggaatatttgtcccggagtgaggcatttgagatagagggggaaaagcaaaaaaaaaaaaaaaaaaaaaaaaaaagtgattacatcatcttcccgttcaagcagtattagtagcgaagatgggttcatcagtgaaatattttgcaaagataaatatacctccactctgcattctgatctatagcctctttctttttggaagaagcattttctttgcccagtttttttaggcagtcacattaaaattctcattaataatgttgacagacaattacgtttattatttctgctaataggcatctgcattcctattcagaattttcattgttagtctataaagtctagttttaactttggaatgtttggtagaggaggacatctatacattttcttttaactgtcctttctaatgtggtacatttgtgacagtgtttgaattctgggttttcagtgaattatggaggactaaaataccaggagtagtccgtactgcttctcttatacatgagagatatctaaggactataaaacataacttaagtatacccttttaatgcctttgtaagatttttaaaccaaggaatgactgggctatctataaacccagatgcactaagtggggagaaaagctcggagctgcagcatatcagcttttgtcaacctgccaacagcagagcgtaccatgctgcaaggagtaataaacaaggaattagaaaactcgctgctggagaacagtcaaattaaacacctttttgaaaggatgagcatgtatatattgcagttctattaaatgtagcttcttagtgaggttggcattatgttaaggctggtatggaagagaactgatgaagcaggagtggtctggtgacatttttctgacttgattggctggggcgtgtgatgtaataggtttcagtgcagccccttataggttttaaaatgaattccaagacaccattacaaagaaagccggactcttttcttataactgagctcagccaaggaaactcttgcacaaatgtacaatactgtttggaatatggaagacctggatttagaatatgccaagacagatataaattgtggcacagacttgatgttttatatagaaatggacccaccaggtaatactgcagtattattgtagagagttagttaatttcgtggctttttaatttttcgaaagctactgtaaaagatcctttttggatttctgtttttattaatttgtttcattgataaaaattagtttgctcatggcttaaaaattaaacagattgtttgactgtctgtggaagcaagcagctcaggctgtgtgtggtaaatgcttattcttacttgaatggatatgaattgaactccagtttttcac

SEQ ID NO: 44302 - DNA, 2838 bp, Homo sapiens
tccttaatgagttaaactaaatctgtgatatgtttattttatatttatatgcaggtcgtggctttagcactaaaacaaagcccttaacaaagagcatgaagttcattgggtagttgtagcaggctgcataatgatcccccaaaaaagatgtccacggtcataatccctagaacctctgaatatggtactttttttggtaagagctttttggatgtgattaaattaaggatctttaaatggaaagaatattctggatatttggtggtagaggggaatgtaatcacaagagaccatgtaagaaataggaggacaatagtcaggagatatgaggacaaaagcagagggtagagtgatgagcagtggggccacaagccaaggggtacaggaggccttgaggagcttgaaaaaacaaggacacattctccctgagagcctcccagaggaatgctgctcttctaacaccttgtgtttagctcataagaaccatcttggacttctgcctctcagatgttaaggtgataaacttgtatggttctaattggttgcagcagaaatagaaaactataagagtaatcagaaagctgctttccatgccccctgaaggtggtgagtttgcatgggcatgtttgccattgtctttgacacggaacgatgcctcaagcgtgctcctgcctctggctttcaatggctgacagaagctttgacttatctgctctctgactttccctctggcttggtgttccaggttctagactgaaccaataaatgccagcccacctctgatgaccttaaagttaatcacctctttcccctctcagtcacgtttaccaaagtgacactatagtactgaggtttaaactcccagttcttggaggctctctgaaacattcctcagtcttctctcacccctgtaaaactattattcttgtcattttaaaataaggaaatcaaaagaccacagtagaagtgactcaccaaaggtcagcaagtgaacctcgctcatcctcccaaggagttcagcagccttggactccttatttaatgagtgactctccacacaaacttcaatctttgaaggaatgcgctgcaaaatgctgcttagtccctgaacttgaccttctcattctcatgtccaaatccagatatttctcttacttttccaaacactactggggctttagaatccttcacttcttcctcacttgtgaaagcagctgcagaaacacctacatgtttgttttagtttcttagggctactataacaaaacacctagatcaggtaacttataaacaggatacatttattactcacaattctggaaactgggaagtccaagaatgaggcaacagcagagtcagtgtccggtgatctatccctctttctacgtgtcctcacttgacagaaggggaaaacaggtttcctcaagcctcttttataaggtcactaatcccattcacaagtgtggaccctatgacctaatcacctcctaaaagttgcacctcttaatactaccacagtggggattaggtttcaacgtgaattttggaaatacataaacattcaaaacatagtattgctgtatcaaacactgcaacaagagaactgcaaagaaatgcaacccttaacccttgggcgttcacaatttaaaacatggacaagataggtcactgagcctaaaataaacattcaatggtgaatagacaggaaagaatttacccatttaggtcatggataagtgcacaaagggcagggagccaggctaagtgaatagctggggtggagaaggagggaggaggacctcaaagtcccaagtccagataagaagaagtaaggaactaatctccagtggtcagtgctgggtacagttttgtggagggagtggcatttcagggacatcaatgaacaccttctgagggggcagtaagtaagagaagctctattccagacacctcaaattcagtgggtccccaggaggacagcctagagtagagaggtgctggcctgaaaagcttcagagcagagcaagtcagcagatgctatgtgctgctaataggagccctacagacagccctctccaggagaaacacaatcaagttccagctgtatcagctattatggctgtttttcagccaattgcacctagagtgagctggaaaacgtaccaattagctattttgatttgacaacactcaggaaaacaacctgagtgagctccgtgtatctccaatcccaacttgtcgttttcctcatctagataagtagagagatgacagggctgcaggaagcctcatcatcctcaggcctgtaaatccacacattcttaccacgaagacgctaagaggaccatgccaagacctgaacaattcatcagaagaaatccacaggctgtcctcttgcccaccttcaaagaaacagggctagaagggggactatttctgcatatctgaacacaggaaagctaatgaaaatattattgaaacaaatccttttttaatagcagcattaatctggaagcttcattctctctctctctctctctctctctctctctctcacacacacacacacacacacacacacacacacccttgttccctccctcttacttcacaggaaccacaactcatctagtgtctttttctaggcatggtgaactggaatgcagcttcggggttggtgtagttagcctcccgaaagctcccttgtcagagatctctctttgccctatctgcttgcttgctctccctccctccctcccttccttcttgccttccttctttccttccttcctccctgtctctttccttattttctttcctcccctcccttcccttcct

SEQ ID NO: 44303 - DNA, 1976 bp, Homo sapiens
gacttaccaagtgattcaggaaaccccagtaaatggtaactcatttcctcatctcaaccagctgagctgctgtgacctgaagctgttggccatttctgtccaaaggatgaaatttacaggaggacagatttcacctcaccataaggaaaagttctgaaacaatggcttctatattaatgtagatactattattatccccattttagagatgaaaaaaaccaaggcacagagaggtttaagaaactttcccagggccacagagctagtgtcaggaagtatatgtccaaagtccacatgcttactgaccacagtggaatagattgtattttagtttgggttccctcaaagttagaggctgaggtaagggcttgaatgcaacctacttatttgggaggtgaccccaagtaatgaaaaagaggggacagggggaataagacaggaaaaaaagagaagccaggtaagcatgcattatccagagacctctgagaatcttgcaggaagcctcctggaatcaacccccttaggggaggtagactgccacactgcctcaaagcccacagatggacggtttacttgagggctacacttgcatagtaagcagtttgggagaaggtcttaggctgatgtagacatagttggggcacccagcagctgatgtgagacattatcagctcaaagtgagtctggtctcggctgtgactgaaatccaaggtgcgctgaggtgatgtgctggggcactagcaatacctgctacagatggcctctggaagagcagcattcaagggtgaaagacagtagtggagaatgttgccaagaaaactggagcatgtaggctagagaatttcttcacataaaattctataattctctaagtaaaagtacatagggaccatcgcatcttgtcaactaataaatatattgttaatatcataattatcaggaataatgagaaatataatttaaggaaatactgtcaatagcatcctactcttttcatccaagttagacatgagcccaagttagcagtacttaaaaggaagaactgaattcttttgaaatgagtgttaaggtattccagctttgatcagttgcatgggcaaagctgaagactcttcaccagaggttagcatgactaagaaagtgagattggaaatcttctaattacaatttccaggtcaacaatacatattcacacaggaatatgtatatatgttcccttgctaaacaaaagcaatcaggtaataatgggttttttggaaacctgaacctaatattctgtgccatccatcttagagatcttgctgaattcctgagttagtatttgagggatacttggcaaagactcagttttatccactgactcacagttgtggtcaaagttgaagaagggcatgagtctgccgcctacaggctactggccatttctaagtttggaggttctgtttgttcaattcagggcactctgaggaaacatgtgttaggatgtgtggggagtggaggtcagccccccactgaccagggagctggtcagaatttggcacagttggttaaaataaggagctgaggtcaactttggtggtttgacccctccgtggaccttttatcttgtaattctcccaccacagactctaacctctttccaagaagtggtctcctatatgcctccttttgggttcagacagggaacaagagagacactgtggatgagtcaatgaacattcatcatcccttcttggggaaacctcaaaacctttgatctttttcccaaaggcccaaactaatggttggaaaatgcctaaaggcaaatcaatgcctagagagagttttatagtggaataagggcagcgccagtttctctgtattgttttcttttctttttttagagatggggtcttgccctgtcacccactctggagggcagtggtgtgatcatgactcactgtagcctccatctccccggctcaagcaatcccctg

SEQ ID NO: 44304 - DNA, 2484 bp, Homo sapiens
attccacatctgataataaaggtttgaggtgtcattttcattattgctcacagcttctaacacaatgtcataaccctagttggatcctcagaatatgttaccagccaatactgataatcctctcatatgctattcttttcaacactccaaagaaacattctgctctgttaatagttctaggccaggagcttggtgtttgagaatactttccagagaagaaaatatttcagaagacctgacatcattaaaaaccttctccaatcgcctactcttagtctcttcagtcagaaggagccctaccttggaagaggtagctctgaattggaatggtcagaggagaacaaaaatgtgtggtctgggggatgcactgtcagccaagaaaccttttaaggcatctgcttccaatggagaacccaatctgggattctgatgccaatctgggaccagccctgtgatgcctagagtgtgcaaatcttggcactgtaggccctcatccacttagctaaacaatgaagtatcccagagaaatgggtttttacctggtttcagagactcatcgcccccgccccccaactcccacccactgcccaccacttctccattcatggggcttgggccagaaggggtagggatctatgacaatctgatctggttctcaacccccgcagaaaagtccatccgaggtggtgcagcatagttcattgtgccacctgaccctgaataatgagctcaagccagctccttttcagatcagaatgttctcgagaaaaggctttccctttgccagggagtgactggctgcctgactagagctagagataactcctggcaactgtgaaggctgatgagtcaccagagaggtttccaacctattcttataccctgagaacagcagtgatcactgatttgcatcagcacacctctattttgggtaggtctttcttggagtcggggtttcctgtagtgtgccatgagttctcggtctctcttgacatcccctcctctcagatttggcaacctgggcctgttgagttgccttagcaacactagttactgatgtcagaaagggcagggactcacaaaccaagttttaagtaatcactttcttattcaagttgctcagattctcatcaatgggataatagaattaaatgatgttgacaactaggcattatgcctggggtgtagtaaaggctctatcaatggtagttccttttcccttccctattatggaggtcaaacgtttgaaaaaaatccagtggcacttgcacttctgttcttctatctgctaatggtggcaggttgtcataaaacgatgtgctcagctgggattaggctcttgctattcaaagtatagtccatggaacagcagcgtctgttggaaatgcagaataggcagccctatcccagacccactgaatccaaatctgcattttaataagatcttgggtgatgtatatgaatgttaatgtttaggaagcaccaagctaagccacttgggtgagtctaaccagagctccaaaaggagcaacccatggttacaggagttggcgcgaaactaagtaaagtaccaaacactgtgctactagtgttccacagggcaaagaaagaagggcctcttaaggtaaccttccctcattcattaggagcctcagacaagtaatatgatgccatgccacttgactgaccatcgttggcataactgattgaatagaacaatgaatgcccaaccagagccctgacaggcaccatggatatctggcaggctctgtgcagcaagaggaggttgatccattgcactaacgcagcagatagagtttgaactcgctgagtcatcacagatgcctagaagccatgtccttgttttaatgacacacctacagaaaccacaaaactgtttgaagcagtatcaactcagtgagaaaatgaacacgggcccaagaaaagataaaggagaagcatggactgggaagaaataaaggaaaagggtcaaaatgttgtgggcaagattgcctatctttcttaaaaactgaagatttaatttccttttacattacaactgcttttaatttgcaggatgtcactcccattttctcaatggttttcctaattatcattcagctcataagatgctttctcacccatgcacagaaactcagcctcattgtgtgggggaaggcacagatctggctgctgatgtcatcaagcaacactcttcagacaacactgtgaagaaagacttactattgttcagatgtgctaagatttcccattttcttctgactgcctatctcacaggaagaccaagaatagagattgtatattgtgaagtactctcagcccagaaaagagaaagcaaaataataagtgtgataatgacattgtcataagagctggtttgtgtattattcttcctggtaacctacctattgccaccagcggctatctgagattgggtagactgtggctcaacagtaagtgagc

SEQ ID NO: 44305 - DNA, 437 bp, Homo sapiens
tatatagatttgcctccctgccatgaaaatcggaatgcagtggccctttgcttccaaaacaaatatgagtttagtttcccagcatttcccgtcttttccaggagctcggttttgaacaagattaaacatgcacacagctgaaatcaagctgggtactatggaaatgttgaaagagtggacttaaatcctagctcctcaggacggtctagattcattccacagcaaatattcctcacagctgctgctcttctggtaaacagaagagagaagaagaaataagttattatctgcctgtttaaactgtcccaaactgagagactaacacgtagtacgggtgacatgcagcatgagtttctttttctacaggattttgtttgttttgttttagttttacctgactggaacttgccttctggggaccttaagttctaaatgaa

SEQ ID NO: 44306 - DNA, 1739 bp, Homo sapiens
aggtacttatgaggattgattgggattatccccataaagagcccagccctggccttggccctgggctggacaagtctgagaacactcattgaatgtcagcttgcatgatcctcatattatcccactagagtttcatcatgtggcaaagaggtgaggggatttcccccatcggtgttaaggaaggcagcttgcttgtattctcctgaaggatacatgaagaatcagacaatgtgttattttgttatctgattgtcttcttgggcaatctgtagagaatatacaacaatcagttctagctctcaaagagctagaaagtcacccctagcagccactgaagcagctacttccttgggggtgggagaggtgctgctctgggctgtttactcaccacctaccctccacccctcaaacctcgtgatgcttggctagacctgaaccctgagaagggccctgaaggctcaaagtcacaggagaagccagcccagctccagggggaggagacagacagtggaagaatgaggaagggggaggggaaaggaggtcctctgcacccaagttttaaggtctccttgaattcagaccatctgcacagatggccagaagcagccctgaggtttttcccacctaatggaatgtgtaggtttaaatgggaggacttgggcatgtaaaccattaacaggactcccagccaggtgacaatgatacaatatgcccttgtttgggagccctgtctgaattatgcctttgtgtaatataatctgtgcaaactgcttctgggccagaagccactgtaagcaggctgtgtctcacctcaggtttttatctaaaaagccttacctaagaaacacaatagcccaagttgacctggcgtgatttcttttaaaggtgagtgtgcacatgtgcattgagggggaagggaagtaggtaaatgaaccaaacaactcacttgcatattaaactctcacttgtaaaactcgcaaagaataaagaaatgggcataaaacgtagcattgaaatcatacatagagggagatttcatcaaacgctgccttcatgaggcagtgttctgcacacacgtacagattgtgtggtgtttgggcagggcatttgtcatactggcaagcactcggttaaaaagtaatcaggttccaggccctctgttcttcccagagagaagaggctgctcctggatgtgggcgtacctggctatctgcacactaaggatccccaagcaatctgtaaatattacctcactggttaggcaagctcatgccccctgcagtgtttaagaatgatggcaaagagccaaccagggatctaccctatttcctggtcagagagtgaccttgggttcccttataagcctgaatagaatcctgctgaaatactcccagacacagcacctccttcactaagagatcatctccagtttaataacagcacggggcatacccgagagcctccctgaggttcctttgtgtaattccacccatgtgctggtctaaatgagccctcatttttcttaaagtttacacctttatgaaattatgtaagccatttcaaatattttgacaaccaaatgaaaacccataagtagaacaaacttatcatccatcaatatgatacctgtacaatatattcttaccaagaacaactacgcagttgcttaaaagaataaggctacatgtattgatacagaattatctccacagtgggttgaatgaaggcttccaaaaaga

SEQ ID NO: 44307 - DNA, 406 bp, Homo sapiens
aaaacatttttatagcaatgtgttagtcaaggctttccagaaaaaatagaaccaaatgatatgtatttatatattcttagagaaaaagagagagagtataatgaattggcttgtgtgggtatagaagctgacaagtgtcaagatctgctgggtgagtcagcaagttaaagtctcaggagagcgaatgatatcattccaatccaaaggccagaaggcttatgacccaggaagggctgatgcttcagttcaagactgaaggcaggaaaaaggtgatgtcccaatttgaaggcagtcaggaagaagaattctctcttactcaggggaaggtcagactttttgttctatttagacctccaactgattggatatagcctactcatattaaggaaggcaatctgctttagtt

SEQ ID NO: 44308 - DNA, 795 bp, Homo sapiens
atgcacgaacaataaagaatttatagcacatgcatattaaagctaggtagatcatttagatagagaacagagaaagaaactatgttccaaatctgcataagatagggtgagggaaggtcaaatgttaagagctgtttgaacagcttggtggactaaaatgagataatccagacccatagtctcttgggaataagcttagaggttgaaaggaaagagcagacggagggggctttgagaaagtatgtggatcaggctgacagcagcccagctcactttccacggagctgactcagcctgccctgctccaccctaacctctgacctcctgtgcagtcacacatggaggaaagccctgggcaactgtacttcttgttcctttaatgcccctactgcaaaaataacctccagctgctccagtagtgctagaggccgtggggaagaacccgaccccactctcagagcccttagagggaaaggcagcccactcaagcaagcatctgatgcctgaagattcctcttccttctctgagtgtggcagctgcagcaagaaaggaggagaccaacatgagacttggtaaacacataagaatggcagcagaggaggtagccattcctgggggcccaggctcccctcgggaggttgtgaaattgatatgggcatcgagctaaaaaagtccctggaaagcccccacctatggggagcttgggatgaagctggagcaggcttctatctctcccagagtcaacaccaggaagggacagctggtgtgacctgggcatgataaggagaaacaaa

SEQ ID NO: 44309 - DNA, 890 bp, Homo sapiens
aatggaagcctccatcagcaccacatctcccttgagaagcatctggaatgatcttagttattgtctttagctatatccaagctgtggccttacctgactcctcaacttctatccttctgagcccagcctggtggccatacccacctcaacaatcagtgccaacccaagttcccccttctgacccatcccatctttcctttcctagggccgctctcagccttcgcttctgatttcatatacccagccaagcctttgtctagcccaccatagctgattattcaggctgaacatatatccactggctcaatccaggcctatgcccatcaggaaggcctaaccccatccgaggcccttgtgctggcgcagagcctccagtgtctgttgcacaatttgggcaccacagggaacacatgactggcatccacaaagacaaagatggaaaatatgagccatccatttggcaacaatgttggcatcttcctaaattcgtgctgccaagctctgaccagaaagatcttggcctgtttactgcctgatgcagtcagtccagactcagggtggctcaggtcatggtgatagagccagctataatgagatttagacatgcaagaaaaagacagagaaagggatccagactccatatcagacacaagctaaagggaacactagaaaaccttcatgaaatcaaagagggaaggtttttaaaatttagtaattggccaaaaataaacgttacgttctgcttttcttttttatttggttttcataggagaaactgttttctgtccacataaagtgtgtacgatcttttttccagaataagggaagcaggaaaataggtgaagaatatcaagtaactggaggatggtgtgtgttataatgggggaaca

SEQ ID NO: 44310 - DNA, 1046 bp, Homo sapiens
caaaattattgggagaaaacttttcctcatccaatttagttccagtggttgaaggcccatgagttaactgacaatagacagattaacaggagaaaagataggcgatttacacatacacaggagttctcagagataataactcactcaatagcctgagattaaagggttcatatacaaaatttaacaaagggtagaggggttagggcttcaataagaaggtatggaaggttctgttgaggtttttgatgctaatagcaatggacactctgtctccctggcagcgaaattccaggaaaccccctcagatgggggttaatggcagcagtattttcgggaggccctgctttagtcaggtaagtgcagtcgagataacacttttttctgtatcttctttagctcaaatgttctcacttcaaaaatctttatgccagctccagggatttgaatgaatccccacaagactcaagacatatatcatctcaagaactttcaaaaaggaaaacttcctggttcctttctagggcaaattttgagatggacaatatttctatgacatgcttgagagcttcaggaaggctcagtgaagttcctggtgacagagacatcactgcctaatacaaatgcactgtggggttacggataaggtctctgcccaggatgacatcatcctgggcctcattccagtactgtaagctgtgacttctgtgcccagagtgaggactgctgtttaacttcgttaggttctcaagatacaaagcctgctacttaccttcagaaaatcattgcacaatatttcaagagtgaagtcatatcaggtttcttttttctgtttacttttgcctttcactcatcacaaacaggataaaaggtagaccgtttatatttttgggtcacaaattgatcttataactccaaacactgacttccagggaaattttgttaccagtggaaatatctagacgaaaaggtgaaattcaaagtgctaatttcaagaggcagtatcttttataagtaatatgaattcgtgctatttgtctataaggaaa

SEQ ID NO: 44311 - DNA, 1336 bp, Homo sapiens
agtccaattaaattggtcacaggccttttgaactacatttgagtcccattgtggcctccagtagttccttccccagaaggtaaatggacatgtcaatggtggtgaatgaaataattgataccctttatcagttttaagacaaggtcagaaattggagctgcgaaagttttagaaagttctaggaataggcccagggtatttagcccaggaatcttctactataggaatactcttagtttgccttcttggggtttgcaactctggatgtctcttaattgcaaattcttttctctctctctctctctctcccccccaccctacacacccccttctcccctcccttttttttttttttttttttctattctatccacatggctaaataagacacctggtctttccctcacccatccaattctatggccggacaaagtacatggcctagaaaattgacatgaagtcaaccaagatggtaaactataaggtagtcaaagtaaagaactttaattggtcaacacagaaactgaaataagtagtccttgtgaagctaggttaacaaatggcaattcagctaaaagctcttttgttgagcttgagaattcttgactaaggggtaggagtcataaagtgctttatgagtcatgagaaggtcaaagatcacctttcaacttttcaaactagccctggctacttatggtagcttttcttttttccctccacacaccctcccccacccaccagtttcatcgtctatgtccacttcacagtgtatctgtaatgaatttggatccatttcaaagaatacatagaaaatcttcagctcccaaagcaggctgctctgtaggagggaaagagtaaggaaaacaccctagggcagttctttatttccaaaagattaaaaataattaaacattaagatattcaacatggattattgcagacagtgatgaatggctcttctccccgtaatgatgccctcctctaagctaatcttacccaacctcatttcaaagaaaatgttggttaatgctttatttgtttcattccatgtactcttaagtaaatcagggttataattgccctgaattcataacaactaactgcctccctctttgccttcttggaataactgagtgtgaaagaaagaagatattttcagaggcattagtacttatctgagaattatctatctacccaagtcagtaaagcaaaggccagccactatgccactgttggaagccagaggtcaaagcatgagtatctcccaggcagtgtgtctagcactgtctccaccacaaaataggtactcaagaaatattggctgcctgtagaagca

SEQ ID NO: 44312 - DNA, 1538 bp, Homo sapiens
cggttagtgagatggttccagcctagagagatgttcccaggggcaccacaatgattcgctcccaccatttccctgtaccttacatttatgggttatgcacaagctaatggggctaattgttactgctccagaggaagtcccttttgcatttcccccacctcctgcctaaatgtcatgtccattgtctttttgtgctttggcttgtacacattttgcagtccacatatttttttaactgctgtttaaaaaaaaaaaaaagttaccacaagtggagtttggcagccttgactgttgctctctgctcaagcgggattttgtttttcgagtcatagaataaaatgatttaagaaaaagaatcctcagtgttcaggctttgccttctagcttcaaagccttttacaagctgcaattcattaaacacaataatcattagaggccagtggaccgacctctgcagggagagaggccaagcccccccaccccaccctctttctctttgtgttcccagccacagaaagcaggagagggggcggaataatgttgttcccaccaggcgggccacccatggcctccagcccaggctgcgtttctctctcctccttgccagggctccacgctccatttagccatcgggtacaggctcttctctcctctgggctgcgtttgtctgcctttcacaaatagacaggctgcccacatttttatttgctttagataaatgcagagaatttcctaaccacagggccagccaagcctgatatatgccccatgggacagattcctctctgcccagcttctccaggctgagccaggaggtatcgcaccactttgtcaccaagagataaagccagggcacccccacagcatgcagagcccagggagggggtgcacatggctgtgggtccgtggtattggggtcactggaatgagaggtatgtgggccactgagctcccctgggtcattccaccatttagagtccctgtttcttttgctttctgttcttccacacggaccatacccagaccttttcttagagacagggagaaaataataaagcactcccaaggcccaaccatggcccatgacgtttcatatggcaatgccgaattaatttttagagttcttctttctttccctttccctttgctctcctcttgtctgcctactagtttaagaaaacaacaagcataacatccccttaaaacactaacgagtaactatactgtaaggcagcagatttggcatttaatagctaatcatttcctaatggtaccgacagctttcgggagtttcatccacagaacaaccttaaaagcagaaacttgtgccaggatcttcatgggctggagttcctgtgggtgaaagatgtggaaccaccccctaccccaccacgccttccccagccccaggctttttttctctactgtctctacctctcactccaaccctctgccttttcttgaagtcttcccccgaggcgcctgtttcctctcccagctactccttgatggcttttctaccagctccagatcaaatg

SEQ ID NO: 44313 - DNA, 928 bp, Homo sapiens
gaagaaagacaaaaatgcaaacaaaattaagaaatttcagacagaactctgtccatagcagataagttcagaataccttagcaaatttagcttttcttttaagcaaagcaagcagcaaccagagggaggaagcacctaatattcatagataaagaatttaatagctcaaatttcttgcattctatgcataacttcataggtgagttaaactttctgattctttctttctcaatctgtaaaatgaagtgggaattaaggaactggaccacaataactaaaacaggacattctcttataaaatattgatgttacaaataaaaagcagcattactgagatacattaagaactctcttccaagcagtatgctaattatagaaatgaaagaatcatttgtcactactatttatctaggcagattcacaaattcttatcgcagtttaaaatgtatcctttttatttctgatcaaaaaacacttgataattatgggagtgattgcaaatagcccaaagcatgccagcagctttcctcacctttgccctgctcagttcccatagaaaagcactgacactggcgcaatctactttacatttcagggcttgctctgctaggcctcttaacctctctgtctttaatactgctgagtcttcctgaaactctcccctttcattggcttctatgccactactcgttgcctattcttcctcagtcttctcactttctgttcctaggtcctctcctgtcctaacggtggcctcttctctgctcactctgcaccctctcccttccaaggctccagtgtttcccaatggcaacataattggttggcattttgagtggcacacatcattgtttaggactgcccttttatttcagaacatttagcatcctggtcccctctcacacatgtcagcaatgctacaccccat

SEQ ID NO: 44314 - DNA, 521 bp, Homo sapiens
tgcacaccctcctccaaaacccataaacaactagaaaactaaatgaaatatataaaatgtctgttttccagcattagacaagaggcagtgtaggtctatgatccctgaaagcatgacttgcagcctggaaacaatttcctaacctcagggcaggaaagggggcccatgcagagcttggcagtttctctgaattgaggagagataggagctcagaaaggctgaggcagctggaaattacagggcagcattccagagaaggaggagctacacaaaggaagaatgccagaaacctgcataagagtcccattgagtggctgaatccaaaactgcacatgtgtaagtgaactccacaaatccaggcaaagaacaactgccggggttttctatcggaacaattctctgagctcattcagggctgaatgacattcaacgttttattccttggagtggaaagactccatttgaatatctaggtattcaataaagactacagaaaagccaagccttagtagtaggaataa

SEQ ID NO: 44315 - DNA, 1336 bp, Homo sapiens
tattaaggtaatattttaagtgcagtctttactgaaggcacagagtagcggtcttttaaagtctcctttatgtcctgagattcttctctcctgatctgagaaaaataaagcattgagaagcctccttgaaagttgacatcaaaatgagaattacatcttagataagaggcagaactaatctttgatttaatcctactaagccatgtgcccagtttcttcgggttggtttgagtccaagtagacagaggttaaacaaattagaatacacgttgacagtgggagcagggttttcagagctatttgaggattatgtctaccttgccagcccaggcttgcagcaagtaagtaaacttagatcaaccctagattaatccatagacaaaagaaccttcggccaagggactaagatagggctgagggagagggggaagaaaaatatgctatgtcctaatcaccaggatagaacaggctgttcaagccaattctgttctgatatataatgagatcaattgcatctggagctctatgggcactggcagcaggcacagggacagcagggcagcacggaggaaggattacctcattgaagagagcagccaaggctgccacctccctttctgaccctccttttctgagtctgccctccctcgcctcagccaccactgaatttccagttgcccagtgaagcatagctagactgcaaagtaaatatagctatatattgtaccaacagtctctcttcccattagccaactaagtgtcttcctgttcaaattcacctaaaattttaaatgtatagaaattatacagctgctttcagatggttcctcctcttttttcccaaaatatctctatagatgatatttaggggaaagttttaaccatctctcttattctccttcagcatggaatgaaaccatataaatgtgggaagatggttcgtcattcaaccattccatggccatagaaacttaagttattacagcttaagtctaggtcactaggctcccaacaaaggaaaagctagagcaggggtccctaaccaccatgccacagacaggtacctgtctgtgcctgttaggaaccaggccacagagcaggaggagagtggcagatgagcgagcattactgcctgagctccacctcccatcagatgagcagtggcattagattctcatagcagcaggaaccctattgtgactgcacctgtgagggaactgggttgccactctttatgagaatctaatgcctgatgatctgaggtggaacaatttcatctggaaaccatcccccccacccccatctgtggaaaaattatcttccatgaaaccagtcc

SEQ ID NO: 44316 - DNA, 1462 bp, Homo sapiens
ggataatattgatttcaaggggttcagacaatgtatttctatgtggtcaagaagggattccttttgggaaaacagaagttcaaaaggagaacaagaactctcaattctgaaagcacacagccaccaataaaattcacttgctccctagtaaattattaggtcaaagaagagtaaaggattaaagctaaatacttatagctccttgttaaactggggctgttataatctaagaattcatgagaaaccattttcaaacttagaagcgggtgggagagaagcaactatagtcaactgtaatatagtaaggatctgtcacatgatctaattacagaaatgaaagcaacccaggaattatgtggtctattcaagcctgcaaggagtacgaacaaagaatataattatacatcaagcctgttgattaaacaattactatttaaagcagatatagatttaaaattaatttgcttctgcattctgaggatttggggactgagataaacagtgtttgaagtttaattatccgtgcgtaagatgaaggggctcatttcaatttggttagctctgcagagtgttttggatggtgtaaaagaatgaatccgactctgctgcaagtctcggcactgctgaaatgtgtgattaaagtgagcaagaaggctcactcagcctaattcccacagaatgtggtaatatcacaggagggattgtgcaattgcaaattaatatttaaatgaacactagtttgaagtttacctggagggtgaaacacactatctccaaaagaacagaagaaggccaaccaaacagttccaggctccacagcagtgaaatctgaggagtggagaccttcacgcttgtttgagcaaataggacacctacctgccagcgactctgaatggagtgattcttatcagaggccacatgtacagtgtcccacggcagaattgcagggctgaggggtgggcagggtgaaagggtgaattggagttggagtaaaagacaataaacagagactagaaaattccaaagttaaagagtgattgtcgagatgcaaggaaccgtgtctgtgttcccacaccgagatcagaacgtgtggggacagaattcccagaactcaaagccgactcaacagcttccatgaagggaaggtgtgctcctgacctggctgtgctcgaaagaacagaaggatgccacagagtgtcctggttcagagaatggacttcagaatgagaaaactgagtttcattcccagctctaccacttttcagtcttgtgaccttagcaaagcattcagctctctcagaaccttctgtttctttagtaaaatagctttcattccttcctcacggtagttgcaaatattaaatatggtaatgagggcagcctaagagtgtcctttccctactgaaaaccactctgtggctcatcactgccttttggataaaaataaatctctttagcatgg

SEQ ID NO: 44317 - DNA, 581 bp, Homo sapiens
gttggagaaagggaattagagtagcagacacttggctggctttgaaatagagcaaaaggaacagaggaaatgaaaaccagacttggctgaatttacaaaactgcctgaggccagcactgcttcccaggggaggagagaccagtggaaagggtgatctggctgtttttagggtgatgtctttgataccctaacctcattggcaccactcctcagggaatgataagccctcaaagagctgtgagactgggagtgtcaggagcagagcaggagcaggagaaaaacctaggaaacatcagaatttctccaggctgggaggagtggagtggggcaaaggtcttggagtttcccattgggtaaccatgcccaggcccatctcctggggaggcaggtgtgcctggcacagtttaagttgtggctgagcatctgtaagtgcctatctaagaccatctgggatctctgatctcctagggaaagaagcatgtgacaaagaactggcaacatcagatggacctgtcctgactcagacatgagaaatatgttcatcaatttcaccgacccatcctgctgctcgtctctctccc

SEQ ID NO: 44318 - DNA, 2668 bp, Homo sapiens
aggatacaagagcagtaatgaataggtagtacccaattatggaaaatagcatttctttggggcaaatgtcctacaaaatctcccagttgggaagaaatcattcttcagggactcattcccctagacaggggcaaaattgcttttgttgtggggagtcagcactgccactgtccagctctgtgagatgagacaaactgtttagtatctctgagtctcagttgctttatgtataaaatgaggacaaatacacctatctcatcaggttgtgaggattcaatttaatattatgcaatatgtgcaaaccatgtaactcaaggcttgttacatagtaaacaagggaaaattgtagcaaccacagcaactattcctacacattttgagagggggaatatttggccttccaaaggtacttgaagataactatgtgatattcacattattaaaaaaattaaaaggcataaaactaggaaaataatttgggcttgagaattccacattgccctttgagacaactggcaaaaccttgaaatgtctcaacctcagggataggaatttctacactagagatagacattacctgtctggcagctcccggagacagaacagagggcctggccacccctggagaagacttctccctcccactaagctaagggcatcccattccctgtcctttccctcacctcacccttttccacccaccagctcccctcccagctgtgagagcctgcaagagcctgcctaatctgaacttggagactgctcttttgcctttaaaatgccttgcccagcttaatcagtaaccagcgatcctctaactgccagttagtctcctgccctgacatgagctccttctcctgccagccggcagatgtgacttttttaggaagattcaattcccagcctttgcccttcctgccaatgacagcttccctctttgaaggttacctgtcgctagcattcttgcgcatgaatgcaaactaaagtgggtgcttatcctgaccttgaagaagcacatcattctgtatatgagttctaaaaaagcacacttgacatttgctgtcttatgtgtgtcaggactgagaaaaggaagccccacatggcgggataccctcttaggtccacagatctggcttgtgaatggcacttgtcaactaaatcttgcaatgatattcagcaggcatgatgtggaggaaatgttaatgaaatcctgcctaactgaaggaacacatttgaatagaatcaaagtcatatgtgggattttttttctcatatactgtcttctctgcatacattaaccttttgccagctttaaaaaaataaaaagacataaaactagaatgattcactcattcaatcattcttcaaacacttatggagcacccattatgtaccagaccctggtacagggaataaaatattgaatgagacacagattattttaggcaaataatctattattcagcattttatggtgagaacccaacttctcaatttgttaaaaaaacaaagtatttcaaatgaccctttgcttcattttaaaataggcaaagggaaaggcggggctcttagaaagagcagagtgttacattagctaagtcatgctgtggacttgtgaaaattttttgagaggcaatagcatgttgagttatgggaaacagacatgcaagcaaccaggatggatgggatgatcttggacagtctttcaggagagtgcctagacatgccattgtttgtgaaattgtctttcaaacaagaagaacctataatggcaaagttaggctagccctcccttgtccagtctcttcctcactgcctgacaccactgatagagaaattcagctgagcactgctctgctgatagtggtgtgaggcactccatttagcagaagcttcctgatgcagagtttttagagaactcaaggacttgctctgtcatcatcataagtgcatgtttccatcgctgagtcagaagaatgaaatcggagctggaccagacacaaatgggtgagtcaaaagaaagacttgctgcagagcaagccccactgctgctaagattgctgaggtgtggtgtggagcagctcagcaaatgcctagggcccattcattcatgcaacaaatggatatgaaatacctcgtgtgttttgagaactgtcctaggtactagggacagagcatcgaaccaaacagacaaggccacaccctcgggaggcttatattgtagggagagtgacaataaatgaatggtatcatttaaattattaaaagagtgaggaaaaaaataaaagatgagctaaagagtaacctataaaaaaagacttacattggtccagactgtattgcagacaacagaatccactctagctagtttaagcagaaaggaattccatacagggaattcagtgattacaaaattgttaaaaggactagaggaggaggctctagactgacctctcaagaacaatcccccatctatgcacattctaagaaactgttgtatggtgacttctgttgatatctggggtggggtgggggatgctgttgtattagggaaggtactacacccctgctgactgcagaaccatactagcccccagtgcaatcaaaatagcagacactgaatcaagaagctgcctcttcctgctacaagtcacagccacagcaatga

SEQ ID NO: 44319 - DNA, 2216 bp, Homo sapiens
agactggctggcatttcatagaaagatctagaaagcaatgccgtttcagtttgcatgtcatagaagcaactcctcttcagcctatatgtcatgttttctgttttatttctctcgttttcttataccagcaaattgtcatctgctcccgatgtttatcccctatttaaagacacagtagcagtttgtgaagccagcagttctctgccaatgctgtcacacacactcctgttccccccaggtctgtggctctgaaggcctgatcttcaacaagcagtgacacaaaaccactactgttccatccagagggagttgctgctgtgcagcgcatgttacaggatcaagccccaagtgaggaacataagagaaatcatagaaggcaagtaaaatagaaatgtgttcctcatgcaaacactccaagcaattaaaaataaaatgaaggaaagcatgaactaaaatagaaaactgtagtgatggaacacttttgaaatcaaagatcgtgcttctttccttactctctggaactctaaatcattacttaggtgaatttatgtctgttttcaacatttctgttaaacacgacaaagagctggaccctagttgctggttgccaggcaggctacaccccagaaggtcagaatgcataattaatccacgggaggctgcaggagatttgttatctgggagcctttaggttccccatgcacagacttctgcatgccagagcaggttgcacctaataaagttttcaaggtgattctgactttcttcaccactcctcacccccagcttcctcctaggcatttccagcctacttatcccaatatttcaggaaaggcacgatctccttcaaacaccacaccctctcctcaaacattatctgcagaaacaaatttgaaattacattataaattacatcaccactttgtgcagattacagacccagacaacaatttcccacatgggccaaggtgatccagggagcctggagtaccagtctgtccaaattggaagggggcaagacctcttggtgagcagatgctctgcccagcagatctaggaattctgtttcatttttaatttttttgcctttaaaaatgcagataggaatatcagacctagaagttttctgtgctgcacaatttatgccagctcattacctcctgctagactccaaggctttgtaacggaaattggctctgatttctgagatgggcattacatcatagtcttcttttagcacattatgtcatccctgctgaggcgcattatctagggttggctcagcagtagcgatttttgtgggccgactgcagtgttccaaaagaactgctgggaaccacagattgaaatctgaaacatttatcttctaaaaagctgaaaagggggaaagatgttcacactggaccccatttattttccttaaccctctcctgtctcagctccctttatgttacattgcagcaaatgcccataaacaatatgctgagtccgtgcaggaatgatcattttgaggtaaccaccattaaggatgcctaaaatattgctccctagaaagggctgatatatctgatacttgccatggttgtatctcagggcatgttacaaaatgcttaaaagatatcacctggcactcatattgataacatagaacttcttaaatcttgggttaagaaaagaatttcttttcatgatcagtctataaatgcatgtgaatgaaaactatatgtacacatatatacatgcttatccttctgaccgtgttgcagcaacaaaggcaaacttctagaaggtttatatgagaaataatttttacgcaggaaactgagctgatattatctcttctcacttcaaccatgaaattagaagcccattttgtatctctccatcctaggcaggattagaaaccattgcacagagggaatagacaggtgcttttaggataaagcaaagatattcccaaaccccagagaatcccaatacctctctcatcacaaaagcataattataaaaaaaaaaagtctcaaaataccaaaaggaaatgggatacattcaaccatgactaaagtacaattcatcccttatacaccaactaatgagattcattgggtggggaataagtgctgggggaggggctagaatgaagggcatgatgttcctttcctccacccatctatgtgcaactttttcactcatttttaaatagtgagtattttcat

SEQ ID NO: 44320 - DNA, 1286 bp, Homo sapiens
ctttaatgactaattttgattaaagccaaagccagaggttttggtctctgtttttgagtcttttaattgactgagataaagaactacatttctatcatgattttatagaaaattatcctggttacacataagtagaaaatgtttctacaacagtaaagtcaagaagagcaggctcttgacatcttttgaataaatcctaggtgcctgctataaggtgcttcattttatttcatttcactttatcttcccagcaaccccatgaggtaagtattaaccctcaatgtatgaggaaatcaaagttcatagaagttgaccgacgcgcccacagcaaacaagtggggaatcttccctttctgctctgtggtttccagccctggccacagaatagaatcccctagggagctttaaaaacaacaggtgctcaagtcccatgcccagagcatctgatttaattcattaggaatgggtctcaaatcttattggtgggttacaccatattcaaatagagggcacctagatcccgggaggaaaaaaaaatgccttagagttttcatttcatctttactccaactctgggaagtcaagccatgtgactgatactcagctatgtaagtgatgccagtaagtctcagctagggtggaaaaatcaggctgacaactgagcattttcgtagctcataagtgcttttagcctatctacgaagttataccaagtctcctaggtaactgggactattttcattaaactaggaaatattgagcagagtggatggtgaattgcattgagattttcatctcctggcagctcctttgttggggggttggaggtaacttacctctctgtgactcagcatgcttccccagtcaccaaaggaggaggaaagaagagagcactgagtggccttacagggaaaatttggaggcatgaatcaattagtccatgtttatgaagtgcattgtgctccttgagtaataatagagtgccagggcctggtattattagttttcacacaagtcccaagattaattggtcctctcaacctcagtccccaactcactagttctgctttgtgtccatcctaagttactttcctggcagaaagcaacatctgggctagagctctccctgtggagaggcgaagggacccagtgcatcctatagcaacccttctacccaagatggactcctctgagctggaattcaccttctgctaactccttggcatttgtttaacacaggccaagtaaccagatcaaaaactgaggctgccgtcacatccatgctg

SEQ ID NO: 44321 - DNA, 4184 bp, Homo sapiens
ggtggaaggcattgaaaggagaagtctccatcagagagggctgtgaggaaagtagaaccatcagataaaacctggatttccattagggccaggcagagaaaggaactttgtggaaagatggaagacaggacaactggaagataccaatagttatacccacaagaaggcctgagactggagaggagctgggctgagtggggaggagattgcaggaggacttgcttttctaactggggagaagggcgtatctcaatggcatggaggaaggagccaggcttggacctttggccttgaatcttatccccttcactcaatagctgcgtaattttgggcaaatactttcccctctccgagattcaatatcgtctactgtaaaacagagataataatatccacgaccttgcaatcctagaaataggattgcatttagatctaggtagcaattagtggtaatgtacaaagcaggctgtcaataaaaggtttcattgctgggttatcaaattttttttttactaatattgtgagatttgtcaggggcaacatataaatatcagaagaaattaactaggcagaattctgttgttgaaggagtttcaggccttgtgtttctgcttaaatatcaccaggctgactgtgatggaactgtgaggcacccagctgatcatttcttagaagctcggtataagggcagatggtaagacaggtctaactttcaatgtcaaatgatattattaaagttaaacagtctggataggcttggggaggttaactccgctttctatactctgcacaccctagagctaagtgcctagagctgaaagtgctgccagcaaagtgaagctgctctcgaggggaatacacttggcaaaaagagcgctcatcaggagcaggtggtgaaaactccactaagttagtgagaacatctcaaagcccagaatctaggctttaaatattaatctgacttcagtaagaaagagctagtttttacccattagctgagaagcacttcagctctgacttgttatttttaagcagtaatgtttttttaaagagtccaattctgctccccataagggagaggactagcttgagcaaaccccagtggtcttttttcttcagagtgtgggaacagagaagcagtcggctatcattcagcttgtgccgtcccgaggtcaccacacctgatgctggtttagagatgagattaaccacagttcaagaacaaactctctccgcaacgtaggctggaatggctccacgagccaaaccacttgacagaattttaagaaacagaaatctattgctgtttcctttctatactggaaatatacaagatattgaggctactcaccccatcaggccaccaaaaatacgtgtatgttctattgccatctgatgccatcctaccccacatgcacaatgccagtgtgggggctacaaagtacctcggtgcctattttaatccatttaggccactctaacaaaaataccatagattaggtggcttacaaacaacagaaatttatttctcaaagttttggagactgggaagtccaaggtcaaggcactaatcttggtttctggggacagcacacttcctgttcataaggcagcagtccctttgctatggcagaatgggtaagcgacctctctagggtctcttttctaagggcattaatcttattcctgagggctccaccctcgtgacctaatcacctcccaaaggcctcacctccaaatacccttacactggggattaggtttcaacatctgatttgaaggagacataaacattcagtctatagcagtgccccaattctggattttttttcctctcactttcagagcagaactcatctgagtgagaatgattaccttttcaaatagatgttagtttcattctaatcagggctttggaagagaatcagggaaagagtcttctcagaaaaggagtctgaaagaagaagttggcagaatttcagcaaacaggagtttaaaaaaatctaacatcatgaatctgttcactagcaggaaagaaaatatattgtattttcaaggcagggtaacaatgttgcataacttagggttggggggttggcattcactttacagtctatgtgaagggtgccccctagagttgtacagtgggcagcctgtgcacccaaatttgaaaagccctggttcagggtatccaagtcagaaaagtatctacaatcatttccacacaggcatgaaagctttagtctatggaaaaaattaagttgtgatagactattctgtggaaaattcttaatgcacacagtggaacccaaatttcccaccgaagtgagtcctaaattataaccggggttgaggggggacttggaggtcatttagaccatcacttcattttgcagatgaggcaactttagcccagagacatgtcttgcccaagaccagcaaggctatgctaaaaaagtgaaacagacttcccctgcttcccatagatggcaaaataggccactttgctgtgaatggcattcagtcacccagaccccaacctgagcctaattcatcattatcatcactcagcacttacggagcaccttctaaatactaagcctttcttgagaatacacaaagagtctctccaaaggtcccagcccatgaggcaacaggagggcagatcttcgcataaatcacacatcctttggtccaggaaatgaagactttgctagaaacgtttccaggcacaaaagtagtataaccctctttgagccatgaatggttatggtccgttgaacaaatccttatttaggcttttctttctgaagaatgtccccgttggagttgactaacttctttgaagctgccttggtttattggttaaatatttactcattaatatatttaaaagccatattatttacacaatggatttggaaccattctggactattgggtaattattacctatttaaaatcaggctatccaaagcaagaaaactgatggtcatttatagggagaatggggaaatttacaggttactgaggttgatctttaatctaaattttatttttaacccagtcattctactccttctaacgggagtttaatgcatgtttgaatgtgtgtggtgaaagtgaggtgggaggagagagaagcccttttaccaaaacccagtgcaattaaactgctttatggacaagctctctgccaaatttcttgttgaaatcaaagacacctttgagtttgttatgcaagagcagggcaaaaagcacctgcagtcacgtctgtttctcattttgtactcgtgtaactcagatgccctgtggattaagtggaatctgctcctgagtcgaaatcgtgtacaccacgtgtcagctcagcttgaatttggaaacaggagctcagaaggtgccattcaaacatgtggctctggttttccccaggtgtaacttgaacgcgggagtcatgttatggggcccctgcccccagcttcgctctaagtaagagatacagcagcaccttgtttccatttgatcgtgctgccccccactcctcacccgcatatgagtgcccatttaggctttcatgagagaaggtggaaaatgagtgctgtgaatgtgcgtgtggacagttcatgacctgtgcatgaatttacaaccgtgtcctgacacagagaaaggaagacaaccagaatgcgtgaccaaacatccccaggtagccaacataggtcacttctctgggcagatactgtttgtgccctacttaaatgtaaaaagcattctctgggtctagagaggttgcattagggtaaaataagtactcagcttttatgttaagactccaaccaaattctttccagttttaacccaaagaggcctcttttaaatatcacactgataaggaattctggatcttgtctctttgatcacattttaaaatattagcttcttatctgcctcttcattcactccgtggattcaacaaatatttaatgagtacctgctatgtgctatcgagcatcagcagctcataaaacaccaaggactttgctttcatggagtttcctttctatctggggaggggaagtattggctttgaactagcttggtgaatatgtgttccagttaaagtcaagtctccatgtggcattccagatttacacaggataaattgggatgtgataatttgcttcaaa

SEQ ID NO: 44322 - DNA, 675 bp, Homo sapiens
caagttaaccagctgaactttcaagcagagtgctattcatgcttttgaataaatgagtctgaatattaccataagaataaaaaaagaatttgatttcgccatttcccaatggagcagagacttgttgtatcatgtactaaatgcaaagtcaaaacataaatcccaggaaacatatatcctacatgatagatcagcctgtatatggaaagatgcattcaaaatggaacttttacttcaattacattgatcactatctaataaaaggtcttagagggaatatgattacactttcattttcataagcagatatccataatgatagaacaaatcaaaaaggaaagcaattgcagaataagtaagtgattgagctaattaaaattattgccaaaaaaagagtttcgtcactatggaacaaatcaatcaatatcaagtctaaaccagaaaactatgccaagaaatggtataacattttgcctttccaccttgaattttgaaaggaatgacgtgcatttgaagaacttctcaagtgagtaatatcaaaagtacaaagaaagaggggaaaaacaaagagatttctgcaactctcatttctaaaataacagtatacaatctgttttgtataagaaatattttataaagttttctagtggtgatgtcaataaaattagaatcttt

SEQ ID NO: 44323 - DNA, 1124 bp, Homo sapiens
aaaattaaatctttctataatgtatttcatctttgcattttaaagagccagcaaagctgactgatcatcatccaaggggcagtccactttgcttgctgttacactcaactagaagtatatttgtggtggtaattgcccaacggattgggactgaaaggatggattgcagtgggaagcctgcttagcaaacattgcaattagtgccacctaagtgttggagggtgagcaaggtaataaacaaaagagtaaattaatatgcatgttcattccccaaagatagccagatagctggctgcaacatcagatgtttcctctttgcctttgcagagagaatcactcctttgtgcagtgagtggtacagttgacatttgctgtgagcataggcatctgatagtggatgacaggagccatgaagcagcctagctgggatgccctgaggactttgagctcaaagccatgccaggtgtccccagggaccaggaagcacaaggaacagcagtcataaattggataaagagcaaatttcacaagcatagtgctgaccctgtcactacagactcacactgcccagggaagaaaagagggaatagaagagttggagaactagaaaagttcattttctctctgcctcagaagctcagagtgtccaaagttttccattctgtgtggtcaggctgtgactaaagccacatatgtaaaatccttgttcccacttcactgttagaaaacaaacgggcccttatttctctctaatgtaagcagccatatccacagcttttgtcatattccaaaaccaaaaggtggtcacctaaacaaagccctggacacctgggatggtctcagtgctcaagactgggcccactggacacatatgccaccaaaaaagcctttccaatgaccccctcactttttccttctgcttattttgtccttctgtctttccaactgctccatttgtgttttaccaaaatttttccaactaacaaataactaagcagcccaaaacaaaaagtccgggcaacagcacatggtatcataacagaagagagtgtctctattgctctctcccctctccccaaggattagaagacaaataaacagcacactgccctgctgaccacgag

SEQ ID NO: 44324 - DNA, 757 bp, Homo sapiens
atggaggggggaagaaaatcactgattgtaaactccacgcacagcagatttcagagggcaagatgtagttaataaaactacctttatgttttatattgctgctctttaacataaatagctaataagcaatttacattaacggtgtgggcacaaatgtaaattagcccatctttggtttatattactgcaatgcagtcctaatgctaaagtgttgcatttggcgatttcattaagggaaagatctgagaaccccatacagtcctagggcccgcttcaagggattttaatatgaaaccaaaattccactgcacattcttgttcaccacgtgggaatttccagaaagggctctgctatcaaatattttccctgtccatggctatgtccacaactctgagctcctgtgggtgttcaaaatatcctgctcgccaaaaatgcctcacaaccctgaggctgcaacaatatggtcttgtgcaattgcagtctggacttctgctcaactctctgcttgccgactggtagcagcctgactcaactacaaacaaagagacccttgttatcaaagggactttcacaggtccaggtggctggaggaaggaactgaggaggaccttcagggctttctgagtctatattcccactagccacaaagatcgaatgcaaatgctagcaaattccagcaacacacatttgtgctgcttgaacccatggaagttttccatttctggcctcattcatctgcgacctctcctactcaca

SEQ ID NO: 44325 - DNA, 1703 bp, Homo sapiens
actagcctcggtgctctcaaaatccagattcatgcaaagaagtaaagccagcatttctgaaaaggaagagttattcagcagatctgctagaggcaggaaataagcaaaatgtatactgaatttttagtaaaggctaaaaacctgcttccatccctaagtcattcaggttccattgcccacccttcccatctctgaattttggcatttgccctgcctaaattcggggtggattgtgttgtattatatcgtcctctagtggtttcaaaaatttcttgtctcccttctctacagtcagtgcctatcacagggccacacagacacttgatgtgaatgaatgttaaatggactgatggatgacataggtcctacatcctacttgatgactgagactgggtgacacaacctatgtcagcttcactaggagaatgagcatacaagtattttaggctcaagctacttatgccatcattgattgtccttaaaaatagacaacgaggctgggtgcagtggctcacaccagtaatcccagcactttgggaggccgaagcaggcatatcacctgaggtcaggagttcaagaccagcctgaccaacatggtgaaaccccgtctctactaaaaatacaaaaaattatctgggcatggtggcaagtgcctgtaatcccagctactcaggaggctaaggcaggagaattgcttgacctggaaggcagaggttgcagtgagctgagattgcgccactgcactccagcctgggcaacaagaatgaaactccatcttaaaaaatatatatatattctgtgagctaatttttgttgttgttgttgttgttgttgccagcttggtttattatgctttttggtttgaggtgttttttgtgtgtggattttttttttcactttatgtatttgttcaacaagtgtttattgcttccactatgtgcaagggaccctgatggtgagtttggggagcaattgaggtgcaaatgggatatatccttgccctcaaagtgcttacagcataggaagaaaccagagtaaacacggattccactccagcaatgtttcagggtgccccaagagagtaatggttttaaaagttcagagaagggagaggttgcctctgaaataattatctctggacatatgacacctgtctctctttcctaaatgaagaccactcaacagcaaacaaatcacaggatgtcaacatgacagagctgatgtcatagtctacacttaagctgtgactaagttcaagagtccattcctgttcttcaagtaacaaaaatgctactagatttcaacacagaaataatattcactcagtatttactgactttaaaataccttaccagttaccatgaggaaagaaaaaaaaatagctaagatattgactctgacatgaaggaaattattatatagtgggagaaagttgcttaggattagtaattaagcaatgtatcagaactgagatcttatgattctccaatttaaactcagctattaaagtttattgaaataatttataacatatctaggtgttagtattggaactggaggtagaaaaaaagttttatcttctttgctggaaagaaatttgcaaaacgtttgttgatgaaggaatggtataggcagaatataaagttttcctacaagttagtaataaaaagacaaaccacctaatcaaaagttggatgaaatac

SEQ ID NO: 44326 - DNA, 1454 bp, Homo sapiens
ttagccacaagattagacattatggttttggagtcatgcagctggaggctacaagattctaagattctgaccctccctaaactgctcctaagatcagtacttgagatattctgcagaccctgcacttgatgcatcagctggcaccacccagatcaataaactggctcacctgatcttgtggcccccacccaggaactgactcagctccagatgacagctttgactccttatgatttcatccttgaccaatcagcactcctggcttactggcttccccccaccaagttgtccttaaaaactctgctcctcaaatgctcaggaagacagatttgaattaataataaaactccagtctctcgcacaaccagttctgcctaaattactctttctctattgcagttgccctgtcttgagaaatcggctctgtctaggcagtgggcaaggtccacaccacatttgatgtcataacacttcaaaagtgttgccaatccaaagaatacagaattgtatttcactgtggtttccatttgaaattccctgttactaataggattgagcatcttttcatatggctgtagccattcaggctaaattatactgtctcttatctgttcattcctttgcctatttgctattagggtgtttgactttaatttatttcaaaagacaaaattacaggctgggcacagtggctcaggcctgtaatcctagcactttgagaggccgaggcaggtgggtaacctgaagtcagtttgataccaggctggccaacctggtgaaaccccgtatctactaaaaatacaaaaattagccgagtgtggtggcaggtgcctatattcccagctacttggaaggctgaggcaagagaattgcttgaacctggcaggagcagaggttacagtgagccgagatcgcactacttcactccagcctgggtgacagagtgaaactccgtctcagaacaaaccaaaaaaaagacaaaattacaacaaatttagtttaaaaatccaattggcttttatttgtgattgtagaatcaggcaacacctcactgtatgaaatagaatgggtgttctggtagacagagcagaggaggttggctttgtaggccaaaaagggccgaagaaaacagaaacagagaccaaaaggtaaattggccatttcatagttactttccttctagggttaaaaacagaggggactggccgggtgtggtggctcacccctgtaatcccagcactttgggaggccaaggtgggtggatcacaatgtcaggagatcgagaccaaactggccaacatggtgaaactccgtctctactaaaaatacaaaaattagctgggcatggtggcacgcgcctgtagtcccagctactcgggaggctgaggcaggagaatcgcttgaacccagaaggtggaggttgcagtgagctgagatcatgccactgctgccac

SEQ ID NO: 44327 - DNA, 1531 bp, Homo sapiens
tgccgtgagccgagatcgcgccattgcactccagcctgggcaacaggagcgaaactccatctcaaaacaaaaaaaaaaagaatccctaacgcagaggaaaagattggtgagctttgtttaatcacacacgctgtacattttccacgccctccccctctgccctacaggaatccgctgtacttctgacggcccataggtggcactgtagggacaggtaagtgcacagggagcgccacccggagaggctgataggaggcggagcttcaatgcgacacaacgtggcgggaggagcctaagggacgaggaaaggcgagtgttctgcttgcgcagacgcaaggctgggcactcccccgggagtgagggttgctgggcctgatgacgtggcttggcaacgtccctaccgccgctgcttcccgggaacctggcgccgccggaactgatcgcggcctagtcccgacgcgtgtgtgctagtgagccggagccggcgacggcggcagtggcggcccggcctgcaggagcccgacggggtctctgccatgggggagtgacgcgcctgcacccgctgttccgcggcagcggcgagacatgaggagaccccgcgacaggggcagcggcggcggctcgtgagccccgggatggaggagaaatacggcggggacgtgctggccggccccggcggcggcggcggccttgggccggtggacgtacccagcgctcggtaagggaccgatccggaaggcagcgaccggccgggtcgctcaggatgcactttctccggcctccctccggtctccgctgacagcccgggacgtcccggggtcggcgcgccctctccccctgcctgcctccctgcgcgcaggctgcctccgggctccccgggctcttcgggtgcctgctgcagaaggaaggcgctaaagccaaaaagcttctgcttgaatttctgggttacaaggcagacagtcagtcttagaactgcccgccagttcacgtgagaggtttttctgatctgtgagaagcctttctcttggctgtttctccctgaaatagtctggcgactacttaacctttctgacgtttccctgcataaattaggggaaggtgtcaccatcagctctcttcaggcgacgaaaccaaagtacatacgtgaacttggatgttcaggggaacttggatgttcagattaactgagcacatcgagggtccagccccgttttctttttttattttgttcttaaataagaaatgtgtcctcgttgtcaaaaaaaaatctaaacagcaaagcaattcatagagtaaaaagtgaaaattcccacttcctctcttcaattctcccaccaacccgaaaagtaagggaccaacaggtgcagcgaccactttctagtgtatccttcctaagttctgagatagtgtcgaaaatgcacaaaatacagccctgcaatttggctggaactggtgttctttgcctccatttttaacgagttcttcccattctggaataaatacttctttgatatttaaagaaagtgataaa

SEQ ID NO: 44328 - DNA, 714 bp, Homo sapiens
ttgttaagggacaatcagtgttgtgaaaacaacacggatacaccccctccctccccctcaaaaaaaaaaaccctaaattcagttcccccgttgctaatgtgtgaccctggcaaagtcatctaagtcgctgagcttcagttcctccaacccagagagttgttgcaacgatcaaatgaaagaatgtctattaaagcctttcatgaactatattattgctgctaccgtagaaatggaaagtgtgcaacactagatccaaaactacttttgacacttctgagactgtggccgcgcctctgtcaccttccaaaggccactaggcctttcctgagctggcattggcaacgcacactcttgcccggctaacctttccaggtgggcggcgcactggcttcactgctctccaggtggccgctgcagctgcccgagagcgcaggcgcagaggcagaccacgtgagagcctggccaggccttccggcctagcctcactgtggccccgcccctctcgaacgccttcgcgcgatcgccctggaaacgcattctctgcgaccggcagccgccaatgggaagggagtgagtgccacgaacaggccaataaggagggagcagtgcggggtttaaatctgaggctaggctggctcttctcggcgtgctgcggcggaacggctgttggtttctgctgggtgtaggtccttggctggtcgggcctccggtgtt

SEQ ID NO: 44329 - DNA, 1241 bp, Homo sapiens
cctgcagacactcaaaacttgagggcacgcaactctcagttacgagtggtggcaatcataatgacagaatgaagtaccagtgcaagaaactggaagcgtgtggatgtctccaggctggaagtctgggttcgaaatgtctgcaatgcctcgcacttgtggcccgtccctgatcttcagaagccactggtttctccgccaaacaaagggtatgcacctcatgggctcaggtcaaaaaagtcttctaaacaaccctctaatgtttatctttcacagcctgccgggcacacccatcttcaaaggcagaggacggaaaagtgccaagatggatggacatatggctgtcgccgcactcccgtgtccaagcgccaaggccgaatgaccacttaggtcaggagatttttcccctccaggctgctgttcccgggagatgtcccaacgtctctagtccagcccctaactcagcactctacacatccgacgcttaacgaaagctattccaactttttaccagccgtctgcagttattttcaccagtagagcccggatgaaagaggagcccgtagtaaccacggcaaccgaaaaacaaggcggaaagggtggggccctgggcggaaggggcggggccctcgggccttttcccggcgtccatttagtggcgggaaaagcgaccttttctgagcgcgtttgcctgttgagtggtagcctttcccctcaaccagcaatggaggagcagccccagatgcaagacgccgacgagcccgcggactccggaggggaaggccgggcaggcgggccaccgcaggtcgccggcgcccaggcggcgtgcagcgaggaccgcatgaccctgctcctcaggttgttccctttggcctcctcagccggggccaagtgggcgttgtggcccggaactccgcccttgctcagaagggctagggttcgaattcacgctcggtcacgtcaggtctccgtgattgcctcattcacttaaactgttgaagctctttcttcatcagcgaaaaggagagaaaaatgaccccctggagagaggttacaagggttaaatgagatagtctaggaaagtgttgagcacagtgccccgggcccttagaagctgtaatttctcctcctgtttccccgccctccccctacctctctggtttacagacaaattgaatgccagagctaaactggaaggaaggtgcccctaccatttcttttagaactacgaccctttgtaaccc

SEQ ID NO: 44330 - DNA, 704 bp, Homo sapiens
gtgttttgtttgtttgtttttattgagatggagtttcgctcttgtcacccaggctggagtgcaatggcgtgatctcggctcactacaacccctgtctcccaggttcaagcagttctcctacctcagcctcttgagtagctgggattacatgggattacaggcgcctgccaccatgccccactgatttatatttttagtagagacgggtttcatcatgttggccaggttggtctccaactcctgacctcaggtgatccaccctcctcagcctcccacagtgctgataacaggcatgagtcactgcaccctgctcagatttgtcatttgtaaacattatatagatttgcctgttagcaaataatctcagggtcattagtagtattggtcatcttgtctattcccccatgtttttttaagtagaatcagggtcttgctatgtttcccagggtggtctcgaacttctggcaatcttcctgcctcagccttccaaagtgttggaattataagaatgagccacccatgctcaggctatacccttttgatgattcattttctccactgcattccaacctcctttaatatacattaatgttgaagaacaggcccctgaaatacatccatttatatttccaagtagtttaattcttagactatttccagtaatacaaaaaatgattgatgatgtttatccctggagaggggaa

SEQ ID NO: 44331 - DNA, 1012 bp, Homo sapiens
ggctttctggaaaggaaatggtcctagacaatttataggctaatgagcagagacccaccttaacaaaattttgtccccaaaacgaaacaatagaacacacgtgggtggatcctagtagggagaaggggtgggcggggtcaggcacagggggcggagccagccccacggcggaggagagcccagtccggtctccgcctccgtgacgtcccgggaagcaccgcccacagctgcccgggactccagtgatcgccgcggctcgctcgcgccccggaaactgccccttctcgggggtcatgatgggcagcaagatggcgtctgctagtagggtcgttcaggtaaagcaatttgtcgcgtttccgcatcttgggcggtagggacggtgctgactatggcgacggcgtcggggagtaaaggcggtggcagaggcagagcggtgaccgcgcctctgcggagggccagtgacggcgcccgcgggtgtgtgtgaggatgggactttgagcctgttggaccgggcagtgaggtgggtccggcgccgagggttcgagccttgcggcaaccgtgcagcatcttggcaggtaggtcctgtacctactgccgggatcccccgctcctccgccaggaccttgttagtcttaggcgtgtgcgggtgaggcgaccctggcggtagcctggccaatcgccgtctaggattggctgtggtgcccccgatcagccaatcggaaggaaggcggtagcggggcgtggaaggaagcgaaccctggatctgacccactgtcccttcaaggtctcgggaatggtcgggcaactggccccgcgtactgcgtcctcgccggagcgggttctccccaacctctccaagcgtctggctacaggccagatgagggaaatagaaaagtaaacttaagtttaattagtatgtgtgtgtgtatattaatgtgtgtgtgtgtgtgtgtgtgtgtgtgtataagcgttggtttcacaagcctattttcccctggtttagatagacagc

SEQ ID NO: 44332 - DNA, 1405 bp, Homo sapiens
tgtagttcattattttttccattttaccgagtagaaaactgaggactagaagctgattcccacagcacgtttcagttgagttggattttgttttcctgggcctgcttcttcataaagggactggactaagaatactcttgaccagcccgtaagaacttggcactcgtctcagtaatctgagatagcagggtttggcgtccatagcaaccacggcgacaggacgcgctcgagcaagaaccaaaaagcgagaacaggtacaaggccaaactttctacattcacagacacctaccaaaccccgaacatggaacaccaaattagaacgctgaccagttcctggtaatgtagaaaacacccaagttaaaacggcaacagagtgacacagcagccattgaagatgccccacttcaggcaccgacaggcgtcacgtgacgggtggggaacgccaaccgcctgggcctagcgcagcttcctccgcccaccacggaagtgaggcggggatactaaagcgacggagcccggtggacggaagtgggtgttggaggctttaaggtagctttaaattcgtgttgtcctgggagctcgcccttttcggctggagtcgggctttacggcgccggatggctctggacgtgaagtctcgggcaaagcgttatgagaagctggacttccttggggagggacaggtgaggctctctggaaggacggggagggccccaagcggacagccccgcgccgcctccacctttgcgggttttcccgtggaggccagaggtctggcttggctgctcgttctcgttgggggaaaccgtccagacgcacttgctgcccattctttacatcctgggggtgaatccctgaggggcctctccttgctgaagagtagcctggagctggacggagactgacccgccacgtttccagccgccgcgagtctgctcaggaactctgggctctttgcttcgcgaaatgtaaaaatgcaaaaaggcaaacacaaaaactcccataaacttatgttatttctatttttctttctagtttgccaccgtttacaaggccagagataagaacaccaaccaaattgtcgccattaagaaagtgagttacctttttatgttgtttttaagtctccttgaagatgtctgtattattaattgactgatagccattttattagtcttgaccatactctgataatgagttactcatgtcattttcagagacaaaataattaattagtgctttgtgttcccaaacggaactctagggttgaacccgttttaatttctattgaaatgaagaagaagctgtatgttatttttactgcataaattcatatgttgtgggcaagtactgcccatcttttcggtcctcagaactattggataccatgatctttctaggtc

SEQ ID NO: 44333 - DNA, 344 bp, Homo sapiens
agccaccacacccagcctgcaacttgttattctgagtcaacattatttccgaaatcctctatatcgtatgatacatgtagatccagttgattcatgctcgttgattattagattccattatatgactacactgaaattttctatccaaactctcgttgataaacatttaggctgctttttaatgttttcctttaatacattccttctctggatagtcatctgtgagtcatcttgtatgcaggtttgagtttctctagagaatgtatctataattgaaacaaattatgaattgatgcttcagagtatcacaaccatcagctttaccagatatggtcaaattgctc

SEQ ID NO: 44334 - DNA, 1944 bp, Homo sapiens
ataaaaataatgtatccaactgaagtgtcaccctgttttctacaacaaagctacagttttcacctccagtttcatctggcagtactccctggatgtactctgcgcttccacgtaagaggaactgcacttgctcccagggctcctccctcagctcagcttggtcacctgcaagcctctattggtgccattcttcaccccaggaatgctgtttcttctcagagccccctcagttcaggacagcactccctccagtagccttcctgactcccttggaccagatgtgatttcttccacatctgagtcttcccagttctgggaggttttactgaatctttttaatagtgcttacttcctacctgacctagactgactgtatattcccttatgcagagactttgtgtgtctcgtttgcttatgcacaacatgtgttccaaagatatttgacagaatcgaaagagaaaaccgattcctgcccggaaacctttggacagaagaatctacattcagtagcctgacaactctgccttagcaaacaagttggtcaaacatgcctaactccatgacaaagaggaactaacttgagccctccctggtgaacaatggcctgctgcactttgctttaggattttgtttcttaacttttcattttagaataattttagatgtacagtaaattgcaaagatagtactaagaattcctgtgtaccttttacccaaattcctctaatgtcaacatttgtgtacaatttgtcgaaattaagaaattaacatgggtacgtgctattaactaaaccacagcctttattattttttccactaatgtctttttctgtttcaggatccaaaccaggatactggcgctatagttttataaggctcaaaattaacagaagagaaaaaaagtaaagcaggtggagaggcagagagagaaatagggtctctgaaatctatttcttatttttttcttatcagacgaggccattaaactggcattcagggaaaaggatttgggcagtttgtccacaacctgcagagtttccacgaatctgcgcatcccgcccctgccctgggtcctccccactcccggttcccacctgccaggtctgaccccgggtaccctctcaaggtccgtggcggggaccggagcccggactccagctcagcgaacagcaccctcctaccgccccggcgccccactcagctcgctcacctggcaagtagcctcctctccgtgcgcgtgcgccgctgccgccgcgcgtcctccgggccaccacgtgaccgcgtgggcgcagtcccagacaggaaacgccggtgaggtcgccctgggccatggaggcagctcgcgctactttttcgcgacctcactgtgttcctgtgtgcaacctgatgttagctctgtccaccttcagctccaaagccaaccacgggtaaccaatatgcaaacaatgacatgagatttagaaaaacaacaagacggggcctgtgtcaatacaggtaaaatttggtggttcaaacattgaggttcagaccggcgcggggtttcacacctgtaatcccagcttttgggaggccaaggcgggaggatcgcttgaggccaggaattcgagaccagcatggccaacatagtgagaccccgctctacaaaaaatttaaaaagtagggctgggcgcggtggctcacgcctgtaatcccagcactttaggtggccgaggcgggtggatcacgaggtcaggagattgagaccatcctggctaacacagtgaaaacccttctctactaaaaatacaagaaattagccgggcgtggtggcgggtgcctgtagtcccagctgcgcaggaggctgaggcagaatggcgtgaacccgggaggcggagcttgcagtgagccaagatcgtgccactgcactccagcctgggcaacagaacgagtctccgtctcaaaaaa

SEQ ID NO: 44335 - DNA, 2479 bp, Homo sapiens
caaagaaaccctatttatgtttgcatgtaaatgtacatatatgtacatactctttgttatataaatacaacacatattcccttttacataaatgacaatactatatacattgttctttaccttccccttctgatacctattaaaattacatttcaagatcatcaaattcataattttcagctattcagatttaacatccctgaaattaaacttaagcataaagataacagggataatccagttcccatacccaggagaataacggtcacctcaagtccactataatacaccaagtctgaaccctggactcaacatgttttcaataaaatgttcactttaaagttttgacaatgacttaataaccagggcactatgtttgatccatgcaaaaagatgtaaaatcttccgcttaaggaatctaaaattctaaacgttatttgtggggtggttaatctgcacctctcagaaacagacatgtcttgtgcgctgccaacaattttacctttgggtgaatgatgtaactttactgttcccacaaagagtcttaatttttctgtaccttgcaataaaatctacatgcattagatttttccacgaatggcctacaatttgataaacactttcaggactaaacggctagcaaaaatattcgttaaagtcgttatgcagcattttaattcccttcactgataacatgcaccctgagtatggcttcaaagacccactcctacgcgagaaacgacccgaaatgctctatatgccttccttttaaggggcggggggatcctttgatgtaactcaacaaaagcatacagcaatttcgtcacgtcacaaacatctgaactcgtttaccgaaatctaatctgaggcgtttatcagaagcaaagaaaaaataaaatacggcccacggaggcctaaggagtgaggcatccaccattaatgactctaccgggaagcagatatggccttacgttatttcgctaaaaatcccaaggccaaccctgccaaagaatcaacaacccattttacaaacgaaataccagattcagaaagactaagcaggttgccaagctggagagctggatctgccgacctctctccacccccccccgcccccccccggagcctcaggccaacggaattaacgttccgcgtcccctccctcgcctcccgcaacgcccgcgagggtcggctcccggggcgctgacaaccgcctcgtggccctcggccggcctctgaagagggcagtgaggggcccccacctgggcgcccgatgcccagagcactctgcgcccccagcctgccccagcccagtccctcccggccgcgcgccctgaccggtgagcaggatgttcggaagcaacatggtccccgccgcgacggcttcgggcgcctcgctcacgtgccctttgctctacagggaggagccggaaggggcgggcggcagcaaaagcccacggccccaaaggccccgaagcccaccgcggcgcccctagcctgccccggcggcccagccgcggcccactggttacctggctttcgatgacacatttccgtcgcaaagttggagggtgggcataactcgggtcggtacttcgggtcaggcagtgcgctggatgcctaagtcacacactccttcggtggtccccgcccttcgcttgcgccgaccagtctggaaggtccccgggaggccgtacctccgagaggctcggcgttgagcccgggtagggccaggtggctgccctttcacctagggtagtccctggtcgcctccgctcttcgcctaaaaggggatgcagctccgggaaagtaaggccgccgcggttgcggctatattatgtatatgtcttagagacgtgagtctatctctgccttcaagctttcctgggctctcgtcgctcctcctcccgacccgcccatcccatctggggatgagaagattgagggtgcagagccctgtcctgcagcggggatttgcgagctcaacccggcaccccactgattacaggattacgttggacgaatatttgagcttagtattccctgttcactgtgtggggtggtggtgggtcggctaggaatagtcttgaaggtctacctctgacatctcatttcagtaacctcgcatcttcagggacagttatctgctttttaaaggaggtaattgtcaatcttgttttcaagagtgaatagagacctgaccgtgacaacagtctgcacctttttttgtttgtttgtttgtttttgttttgttttgagacggagtctcactcttgtcgcccaggctggagtgcaacctccgcctcctgggttcaagtgattctcctgccttagcctccagagtagctgggattacaggcgcccaccaccacgcccggctaatttttgcatttttaatagagacggggtttcaccatgttttggccaggctggtctcaaactcctgacctcagatgatccgcccgcctcgtcctcccac

SEQ ID NO: 44336 - DNA, 1735 bp, Homo sapiens
ctcagatagttttgatgtgttgtacagtggaatatcttagatactttttggaaagtatttacataagttatatcacaattaaaatgttgaatttaattttgtttctcctgtcttttaacattatctagcacgcactcgctgccatgggtccttaagcacagtgcaccaatctccctcccccagtgtcaaacttttcaaaagatagggaagaggatggcaacgttgcgatgagaactgtaaactctttccaaaagagcccagtgtgtggtcattgccgcgacgtgccggctggtggcaccgagcagcctgggcccagagcggttgtcgggccgacagatccgggcggggcaaagccgggcggggaaagctgggctcgtcccgtcccggccccgcccccaccccgggagcccgataccggtttcagagtcctgggcagcgtgcgcgctcttcctggcggctgcgcaggtaagtgggaccggggtggggccacgtgaccgggagaggagggcccggcggcccccggcccaggtgtgctgcgacggacggctgcccgcgctcggcgctcagcctgccatagcccgcgggggaggccggagccagggatccggggaggcccgcgtcccgccaggtttcgctctgcggacgcaggtgcggccgagccgccgtccttccgggcgcggggcggggcgcgcacctcggggcgatctcggtgctccttacctgggaggtctcccggcttagtttcggcctcgttgggtcggaatctccaaagacagtgggtttcagccagaaacgcgaagacgaacgcctagccggcgcgggcagaaccgaggacacaatgagatttgtgggaccgggcgcccagaggctggcgcgggggagaccccacagctaaaatgctcggtacccccgggcagtcgtgggttagttagaaccgcagagcctttcccgacccctcggaagcgcagaagtatccgaaatctacccgtttcttgggtccagcaaaacttttaagccaggtaaaccggtggttctgtttgtgtaaaggtgaccaggcatgattcctgtgacactttgctggggcagccatttctcctgccattgccgcggctttccaagatgagtgtccaagagtggagtaagggtccggggcctgagcaggacaaagacacacgctgccgcgacctgcgggaccagaacgaactctcagtgacatcttgaaagacattaggggtatccagatatttaagatgtaatgaaatacagctaaccattcccttctaaaaatcacattatcttgcttttccacaactctttaataattgcttgttttttctttaaaaatggatagggtggtttgattcaaataagccacttcacaggtgaagagttaaatccattacagtgaatcgtatttttaccagtgagttgaattaagcatagcgtatcctgtaaatgctgtgtaaaacttgctaaaatcatttgttgtgcttttgcttctacatttcttaggaatgtgtttcaaaaactagagtcgtaatagcatttctagaacttacacttttttagagaaagaaagagaaaggtacaaaaataactgattgttataatatacagagccgctttgcattgggcaccctgctggggccatcacagttaatcctctaaggtcggagtgccctattagaagaccctgggtttccaccgcattcccttgtctccagtctgtacatac

SEQ ID NO: 44337 - DNA, 1741 bp, Homo sapiens
agaattatcttggctttggactttattcataaatgttttatttctgttagtatgaacaatagactgccttaacaaagtttttttttaaacaaaatcgttcttgttggattttattcagcagcatctatcatgtagataaattcccaggtgtagcattacagcttctgactaatatagctgccattcagacaattaatgttcaaagagttttctaaagtgataaaaccaaagaaaagcatgtggaaaagcagaagcttagaaagttgtggtcactgaatgcactccctggtttttatttgtcagtgaaatctttatgcattcattgttaatattttaattccatggctttgtaggctgtgctgtgtctgaaggggtaacacctagggaaacatgaggccccttatgggaccccccaaatggaacaacttcactttctcttttatgtattgagccctgtgttaacatttcacttaagaagagcaccagtgctttaaaaaaaaaaaaaggtaaaatattaccattttgatagactgtaaagagttagattcctgttgaagtgttaaggaaatttaactttgtgaaacttttaaaataaagtttataaatgtagctaatctttgaaaaaccaatgcagtaacactgatttgtaaatgttgtggtcaatccctaggtgcattaaagtttcagtcacctgccgtgtgtgtgtgtgcccttttatgtttgccttcctagcattcctgtgttcactgtgcatgttcttgaaaatattttcacttgtcagaaaataaactggaaagtcattgaaaacccgtaggtcacgatgctcaggtgactcactgtttctccttcccccattattcgcaataattcaaagtccaggccactatattagtttcctaggactgccatgacaatgtactacaaactgagtggctcaaaacaactgaagtgtgttgtctcacagacctgcagcctagaagtctggaagcagggtgtcagctgggacatgctccctcaaaaacctgtaggggagtcctcttctagtttctggtggtttgctggccatgtttgatgttccttggcttgtagatgcatctctccaatcctccattctcgcatggccttctccctgtctggccataccagtcatattggatgagaggcccaccttctccagcatgacctcctgtgaactcattacatttgctaggacgctatttccaagtaaagtcacgttctgaggtactggaggttaggaacttcagtgttatctttttgagaggccacagtttagcctgtaatagctacatttggcaagttacaagattcagaaggaaaagtacttccctgtacattttctttcttccatattattttttcttttattttttgtgatggagactcactctgtcgcccaggctggagtgcagtagtgtgattggctcactgcaacctctgcctcctgggttcaagctagtctcctgcctcagcctcccaagtagctgggattacaggcactcaccaccacacccagctaaattctatatttttagtagagacagggtttcatcttatgttggccaggctgttctcgaactcctgacctcaagtgatctgcccgcctcggcctcccaaagcaattcccctgcctcagccttccaaagtgctgggattacaggtgtgaaccactgcacccagcccttccatattatttcaacatgtattctaatttgaaaattaa

SEQ ID NO: 44338 - DNA, 1793 bp, Homo sapiens
cccgcctcggcctcccaaagtgctgtgatttataggcgtgagccaccatgcccggctggtcattgcccatttttaaattgggttgtggtcgttttgttgttcagttgtaggagttctttatatattttgaatttgatttagttttgaacttggctaaatccatctgtttgttcatcagaagagttgtaaaaatatatgccagaaaataatctcagctaaattatctttggatacaaaaataatataatctgatagggggcttaatgatggtggagtttaggtcaacagatgttactgttggactgctggttgggctggccagataagtatagtaggtcacaaaaaaattaaaagtatagaagtcaagcaacaaggccaagactcctttgagacctgcagctgtgttttctgggtacccagtacccaagccttgtgcttggtacttgtcctctgtactccaaacctgggtgtccataaattgggtagaaaatggcagaaacagctgggcgcagtggctcatgcctgtaatcccagcactttgggaggccgaggtggatggatcacctgaagtcaggagttagagaccagcgtgaccaacatgggtttcaccatgttggtcacgctggtctcaactaaaaatacaaaaattcgctgggtgtggtggcagatgcctgtaatcccacctactcgggaggctgaaataggagaatcgcttgaacctgggaggcagaggttgcagtgagccaagatcatgccactgcactccagcctgagagacagagtgagactccatctcaagaaaaaaaaagaaagagagagagagaaaaaaagaaaggaaggaaggaaggaaggaaggaaggaaggaaggaaggaaggaaggggaaggtaagggaaagaaggaaggaaggaagaaagaaaatggaagagacaggtttcacacgtgtttttggtttgtagcagtgggtagggagtgcttcagttaatcattcacagatcctctaggtcaaaagattctgaagaaaatagaacacatacttggtgaaactgttgtgggacatgtgaatgaaattaggaatatatgatgggagagctcattcagagaactgggagaatggggattcaggtataaatattgagtaagaaaataggaaagtagttatcagaaacaaatacttgggacaacggtattaaaattattataaaacaaacctcctgattatactttccatctccagagctggtttcggtatcactattttacaggaatattacacctggcagagttaagaggcaatctaaatatttactttcatgctgcaacctttgccctgtttgcagtctagtttccctgagcttttagaagataagatacaagcatttgaattttgagatagtttcataaatatcgcaaataactgaagcaccatgctaacaaaacctgaccttttcaaaacagcaacacaaagattggttatatctaatgttatagaaaattatttttatctagttatctcattataataattcaacatatattccgaataagaggaaggaaaactacttaaaattttaccaaaataaatcagttaataagccttttagctttttttctttttctttctttccttgtttttgtttgtttgtttttgtttgtggctatttcaactccagataagccctttaaataaaataataaacactttcggaggctgaggtgggaggatcacttgagcctagaagtttgagactagcctgggcaacatggcaagacccatctctaaaaaaaaaaaaat

SEQ ID NO: 44339 - DNA, 1420 bp, Homo sapiens
agattcggtctataatttttatttatttgtttgtttatttatttatttatttatttatttatttatttatttatttttgagacggagtctcactctgtcgcccaggctggggtgcagtggcgcgacctcggctcactgcaagctccgcctcctgggttcacgccattctcctgcctcagcctcttgagtaggtgggactacaggcgcccgccactacgcccggctaattttttgcattttaagtagagatgggctttcaccgtgttagccaggatggtcagtctattattatttttaatcccggaagaaggaagagggaagagtccgtggctctgattttcatctctgaatttccaaggacataacctaacaaattcagccaccatgctcttccttctgtcgtgaaatctgttttattttcaactggcttgtggcagctgactctgcctcctctcttccaggctctgagatgccccttttcccggaatgactgtcttaatcccatccaaatattcaaagaggagggtggagaggtctcagagaagctaatttttcgcttaaattgaaaaactggggtggggttggagctattgttcttcctgaagcttgcttctgctagactttggaattgtcctcccagtgaaaaggttttaagttgtaaaagccagctcagcagagccccacccacatgaataaaacattcgtgcagaaacatagactcttggtttcttcgcagtcagaaacctatgcatgtacttcactctccccagcatccaattcatgaccaggttctttcttcctaaacagctctcaaacacttacctccaggatgccttccattcattttttttcaacaaatttgttgcccatctgctatatgtcaggcactgtgctagctattgggaacacagcagcaagccaaacctagtgaaaaagccaggggagtttatcatctggctaacccctccccaatcaaaccaaaccaaaccagctgggccaacccgcacagcactcctcactgctcgctgttaactctcagcatttgttgtttttttttttttgagacaagatcttgctctgtcacccaggctagagtgcagtggcaaaatcacagctcactgcacccttgacttcctgggctcaagtgatcctcccacgtcagcctccctggttgctgggaccacaggcacatgctgccggccccaatggcttttttttttttgagacagggtctcactgtgttgtccaggctggtcttgaactcctgggctcaagtgatccacctgcctcagcctcccgaagtgctaggattacaagcgtgagccaccgtgcctggcctcaaatggcttttaaacataagaaaatgtgctcagcctcactcatataaagtaaaatgcaagttaaaattataccaaggcca

SEQ ID NO: 44340 - DNA, 2696 bp, Homo sapiens
tccagatcaagaaatagaatacagcacccggaactaaggtgctttttcgttttcttaaaaaaaaaaaaaaagtaaaccaagtttattttgctttttaagtagtgttgttcttaaagcactacaggttggtaaacaacgtataaggtgctttttctcaggccaaagagccataatagtttaaatttcccggtcctcaagagcggaccgggtgggcaggagaggaccctggggtggtgatgtgtaaactgtattatgcactttagcctgctggatggcaactaacacctacagtagttcaccctcattttaacccctctaagtaattgtctcttattctgaatctagagattcagaaacagcgccaatgtttacacacgacttttgaaattttcccaggagtctttcgttggagcaatacatctagatgcctttttccagcaacagtttaatcaaattctggaagcagaaaagtgtcctgtgaggacgtgcctttcctatcaaagtgctgagtgcctggaccctctttccggaggaaacagtcccctctggacctcgttcggcctctctccatcagacaccccaaggttccatccgaagcaggcggagcaccgaacgcaccccggggtggtcagggacccccatccgtgctgccccctaggagcccgcgcctctcctctgcgccccgcctctcgggccgcaacgtcgcgcggttcctttaacagcgcgctggcagggtgtgggaagcaggaccgcgtcctcccgccccctcccatccgagtttcaggtgaattggtcaccgagggaggaggccgacacaccacacctacactcccgcgtccacctctccctccctgcttcctctggcggaggcggcaggaaccgagagccaggtccagagcgccgaggagccggtctaggacgcagcaggtgggactcgcggcgctggcccgcaggcttcccgcacccccttccacgttggtgcgcatgcccgggggcagggccggttgtagggaggagggaaaggagagggagaagggggaggagacgtccccagcccagtccccggctgagcgctggcggtcggtgcggcgtcaggtgcgcccgccaggtgagcgcgctccctggcaccgttggcccccggagggtcgggcccagttgcggcgagcgggtgagtgttgggcgcggcgtcaggggcgcacgggagcccgagggtccccgtggggggaccgcggcgactatgttaggggaggtgccggggggaggacgctccgcgctggtttcggtggcagtttcgtccccgagctgggactcgtgggaaccagagaggcgcgggtctgcggagagagcagcaccggccaacttgggaggctgcctcctggggcgaggggtggcttggagccgccgatcaagctttattccgcggaaacgctgaaagctagcagtgcctcagcggcgcgggcaacttttcacttttatggggcacgacattcctgaacagcgacgatcctgcatccgctctggggctgcagtttgggggggcggccttcatggagagggatcctgcgcccagctccttgggggtcctaagcctgaggctgcagcgaggcggctgttcggcggcccgggcggcttagatcccggggggaatttcattccttccgctcccaccccacccctttggatatcccggggagacgggggctggattcaatctgtgaaatattccaggagtcacggtgtgggccacactggctacttcgaatccacttgttgcgagttgtgtgaacccgcgtcgatttaagctggggggcggggagttaatttcgagtgaggctggacttcgagggaagctgctcacgcttcggattctcatccgtgaccaaaagggctgcccccaggggggcggaactgcctccgggcggtgcctgcccggcgaacgtgggcgcgcgctgcctgggagcgcctcggtgcgcacggaagccgggacccgcgcccagccgggccacggagtttggggacctccgggactgggccggccccgcgcgccagccatgttgcctgcgtcggaggaagcgtgcggggagcaggggtcgagggccaagatggcctctgcgcctaggggttgggagcggcgccgagcccctcgcgctcctcgggaagccaccgggcccgagggaaaagccgcggcatccttaggccggacccggggctcgctggccacactgcccgcttggggaattaccctgctcgaggaggaggcggcggctttccaggccagtcagtgtgtggcccttaggcaacaggtgtattattgggatacctggaaaagagaaacgtttcccatgaaggcacttatggtgttttttggtgattcttggtgtgatagaaaactaggcgttcccaagtgtaacaatagtaacagtagttcttttgcactgtacatatgaggtgcttgtgtgtgtgtgtgtgtgtgtttttccgagacggagtctggctctgtcccccagtgcagtggcatcatctgggctcactgcaacctctgcctcccgggttcaagcgattctcctgctcagcctcccgaatagctgggattacaggcacccactagtatgcacagctaatttttgtatttttagtagagacagggttttgccatttggtcaggctggtctcgaactcctgacctcaggtgattc

SEQ ID NO: 44341 - DNA, 2975 bp, Homo sapiens
agctgggattacaggcacgtgccaccatgcccagctaatttttgtatttttagtagagacggggttttgccatgatggccaggctggtctcgaactcctgacctagggtgatccacctgtctccacctcccaagtgctggaattacaggtgtgagccacctcacctggcctaaattcagtattccttaatgttctttttctgaagacaatctggacttttgcctttttatagtaccataacattttcgcctaaattgctcatttgtatgtgtgtttcaccattactagaatatagagaaattggccaggtgtattggctcatgcctgtaatcccagtactttgggaggccaaggcaggtggatagcttgagctcaggggtttgagaccagcctgggcaacatggtgaaaccttatctctactaaaaatacaaaaattagccaggcgtggtggcatgtgcctgtagtccagctacttgtgaggctgaggcaggaggattgcttgagcctgggaggcaggttgtagtgagctgagatgatggcactgcatttcatcctgggcaacagaatgagaccttgtctcaaaagaaaaaaaaaaaaagtatagagaaattgacttgagtgctagttacagggctgtgtacacttatgatttgtgcacttttctctatggtatactttaaaagtggcttttaaaaatgtagaaaagtcatcttccttcatgtctttggaaaattatgctaattgtgttggtgttattaacattctatatatttccatctttgaggatttatctaatacatagttgggcagggtttaattctgagagatttgaaatacactgtcctaaagggtatagaagagagttgccaggtggggcgtggtggctcatgcctgtaatcccagcactttgggaggccaaggagggcagattgcctgagctcaggagtttgacaccagactgtgcaacatggtgaaaccccatctttactaaaaatacaaacaattagccgggcgtggcagcgtgcgcctgtagtcccagctactcgggaggctgaggcaggagaatcgcttgaagccgggaggcggagattgcagtgagctgagatcatgccattgcattccatcctggtgacagagcgagactcggctcaaaaaaaaaaaaaagagttgccattaatttaaaaaaaagttttaagagtctgaattgatgtactgttgttaatatattaatgtatgattgtacagaccgtattagaaaaggaaaaaaaatcagatactttaatgtactcattatagatgttactcaagtgtcattcagggatcataccttttaaagttactctgatacttttccgttaccttcaacttgaaagcacaagaggttttgcaggcagagatatccatggtccaatctggttcctgtaaacattcaacaaattatctggacgtctactatgtgccaggcattgatttaatcagtgaacaaaacatgcaaaaattcctgctcacatggaatttaccttccagtagatctcaaagttccctactctactaatcactggtataacctggaaagaatttattgttggttcaacatagctaaggagtggcatgaagttctgtagctgatgtgggaagtaccttgccagtgtctccagcactgggttttctagaataatcctcaagctttataggttagggggttgtgtgtttaccacatcttgctgagacttgtctttttcctggagagctctcagtgcccatggatccacctacggacgtaggcagatgacctccatcttcacttcctcatggatgctaacaccagatgtgcactccccacaaaaactggtgtttcccaaatggaactcattgtttcaaactagcatagtgaaaagcacatgaaatcatctgggttcaagttacatctgagtgactcactgacatccatataaccttgagcatattacttcacatctctttctgaccctctttgcatctgtaaagtgactaatcaaccatggagggtcgttttgaggatgaaaggaggttttatgtaaagcacccagcacgtcggtaggtgtctgatgaatgttagtttccttcctatcttctgtctcctaagctagtccttcattgttgcctcacacctaggtttgctgctgctgactgtaggtgctcctttttactgttgactttgtctttcaaatctggttcaaatcaaacttacacctcccttgccgagaatcacgaactggctccctgtttcctacctgaaggaagtgagacactcccactagactttcaaagccctcccttttcttactcatcctccatccactatattcttactgtaaccttattttaaaagatgacaccattccaccatgctcccacttcactgttccataagctagccacctgtgttatcagcaccacaccagcctggaagagccaggaccccagcgctggctgtcatacgtcactcccacaggctctcctggtctagtgtaggcacttaataaatgcttgttgagtgaaatttctcctcagatgtttaggaacttgtgctgaagaattttaggacaaaatttcagaaaatgaccaattaataccatgcatattgttttttctccccttgtataaaaattgtgctcagtttcgaagacttggaaaaggagataagggaaaaatatctacaattccaccatttatagatgcattttattatcatttttaatgataaaggcatttaacccattagatggttactttgcattgaggagctagtatgtgctagtgcggctatatgtgcactttcttatacattctcatttaatatgaactttcaaaagtaatatgaaattatatatatttcaaatttttgtacaaaaaatacaggaattagccaggcatggtggtgcaggtctgtagtcctagctacttgggaggctgaggtaggaggagtacttga

SEQ ID NO: 44342 - DNA, 2579 bp, Homo sapiens
ggaggctgcagtgagccgagatggcagcagtacagtccagcttcggctcggcatcagtgggagaccgtggaaagagagggagagggagaccgtggggagagggagaggggggagagggagagggcaaaacttttgacatagataacagcatgacaaaccacagtgactaattctgagttaacattatgaaatacttcagtgaggcaaagacagattagaaaaatttccttttaaaaatatatactattaatcttaccaagcttcctatatgatgtgatttgctgaaagcctggaaagttcctctttaaagatgcctcccaaatgagtgttagtaaactgtttttagagctttttagaggccaggtgtggtggctcacacttggaatcccagcacttagggaggccaaggtggaaggatcacttgagtccaggagtttgagaacaacctaggcaacataatgggaccctgtctctacaaaaaataaaaaaaaaattagctgggcatgatgatgtatgcctgtagtcccagctactcaggaggctgaggtgatagaatcactggagcatgggaggttgaagctgcagtgagctgttattctgccactggcactcttgcctggatggcagagtgagaccctgtctcggaaaaaaataaaaatgaaaagatgtttggagtgaaactttttctaagaaatcctgttagggtcctgttagaagctacctcagaaactgacatcacagggttctttgagcagattgatttattgtcatgaaggtatggccacaggttcccaggaaggtttattttggccactgggagtggggtggctaaagatggatgctggctgctgctagtcaggtctggggtaaagacattaatatatatatatatatatattttttttttttttgagacggcttctggctctgtcgttcaggctggagtacagtggtgcaatattggctcactgcaacctccgcctcccgggttcaagagattctcctgccttggcctcccgagtagctaggactataggtgcataccaccatgcctgactaatttttttgtatttttaggagagatggggtttcaccacgttggccaggctggtctcgaactcctgacctcaagtgatctgcctgccttggcctcccaaagtgctgggattataggcaagacaatatcttgaaggcttagctctaacattctgtaagtctgatttttaaggaaatctaggaagatagatgaaatttttttctggttaattaaggagcaaaaatgaagcagtcttaggaaagccaggaaggctgtggtatgtattcaccactgagacgatagttcttatgtccctgcccttgacttgaagccctgttttttttttccctcactttaaagtgtgaaggtgttaggaagtgttttctttcgacatttacctccaggcaaggccacttgtagctggaataggacaggtctatattatgagctatgaagtaaatgtttcgctgagagtttctgggtgtgttagttttcgttggcagttagatttgtttacttaaggtttcaagaggcttaaaaacaacaaacccgactcaagggagaccaatgccagtaatattagagtcccagtgaactttggcctctcatctgattttactgtcatgaaggtttaatcagttctagttgcttttgataatttggcaaaagatagctgttgtaacttatggaggtgatgatgattaaggtgaaagaactacttagcttttaagaaggtattattttaataaaattcctccttgaacctctggaaatttgatagcctgtgggttgttgcatgtggacttcattgtttctctctagtaacaagtattttcattgtatgtaaaagaattgtctgttgaatagcagatatatgattttgcccaaactaatgttttatgtgattcttaaccagaggcaaattcctcatttcttttcctctgcccttcagttttttgaactgaaatgcctcagaaagcctatttaaaataaattatttggaggtggtttaaccacagatattttgcctttctttctattctcccctcacctgcccaagttcatgtcgcggaattcaataccacgttctcattatttccttaattgatggaacaggcagatgtagcctgttactctcatttctgcctgattagtttcaccctgataatgtggccatcgctgtggaattgtgtcatcctgcatctaaactgttcacagtggagtagattagggagttttcttccttttggtcatgagaaattaatatcaaaacaatctctacttaaaatagtggatgagaatctagaattaactacttgcactaaaggagaattaaaatttgggtttgattgattgcaaagagctgagacaggttactccccatatagctaataatggctgattcggggggaaaagaaaaactcatgtctgtaatcccagtacttgcgaggccaaggaggatcacttgagcccaggagtttaagaccatctggggcaagaaggcaagaccctatctctacaaaaaatttaaaaaattagccgg

SEQ ID NO: 44343 - DNA, 1454 bp, Homo sapiens
catttttaatctatgtctactcaatttagaatttctaaacccttcaggatcttcaaaagacaaaatcggccagcgattttaatagttccagtaaaggtttgagcagagaagtggactttcttctgttcctcttttcaactactcctaaggactcctggagaagaaagagcaaatatctctgcatctcaatttctggtccgcaggtaacccagtctcagtagcttggtagttaccatggctcccagtgctgtgcgtctgacgtcattctgcggcgctggctgatggcgcaatcagttgcggcgtcctgtgagcgcggggatgctgggaggagggtgaaatttagccatcggtgtgtggcagggtcatgaaaaagcggcggcggcgggagagaggaggaggcggcggcggggcagtgaaactacggtagctgccccctgagctggtggtgtggctttgtggggagggcgtagttcctaatcccctttccgggcagccgccggggctcggggctgtgagcggccgtgaggctgcctccccgggccccctgcctccgccatgttccgcagggcacgccttagcgtgaagccgaatgtcaggcctggtgtaggcgccaggggctccacagcttccaatccccagcgtggacgggagtctcccaggccgccggatcctgccacggactctgcttccaagcccgcggagcccacagatgtgcccacagtcgatttcggtggagcggagccccaagaaaaggctcctaggagcaggtaagaggttgcagagggaagaattttcatttgtcccgcctctccgggcatgtcacctggaagctgagcaaatgaattttatcacaggagtccgctctcgtttgcagtaagcctttcagttgaggcttgatgaaaccactccaaactgcagtttagttgtctgacctgcagggtgtggcttgtgtggattttgtcacggtctatagattctccgagaggagaccatgtcttcaagtggtggtagggagaatcggggtatggcagtcctgaagtgaagaatatccacactattcatttgagaatttaggtcactatagttttcatccttctggagtgctttgcagggaagtgtttttgtctttcaatttataaaatatttattttttaaaggagaagataagtattgctttggctttaccgatttatgtcagtgagtaagagttctggtcacttaattgaagtgtgcctctttaactatggtgaccgtgtttcctgaatagagaagcatggctttagcgtcatgtatcatatttggattcaggactcttttagtctacaggtaaacttttctcaggcagaatttgctcatctgcaaaatgggaataatattgcctacttggagcgttttggtgcagattggagataattcatattaactaccttgcaggggatatagcagaatagttg

SEQ ID NO: 44344 - DNA, 2612 bp, Homo sapiens
tgacttttagcatcttccttctgccttcatggctttagcagctgttctcttttaagccttatattctggacatatgcaacccatacttaggccaaggtatcatggggtatttccaccaggcctgtgaggtacccctctacacagttcctttttagaactatgctcctaaagattccctacctctgcagcctagttggattgctgtaccctgtttggccttcacctccctttccttggttaggaaattgagcccaggcagagagccaaggtaaacatgggcacatcttgtctgttttccttctctccgtgattgtagtcttgctctcactattgtcctttgcttgaaaataattgatgcatatattttgtcagtgttaaaagtcattcgtggtggagttggatatgtaggacctgtccataatgagttactttgccaaggccagaagtggaaattatgggatttattttgtgatcatggaatttggcctgttactggttcttacctatgaaatcattgactagtttcaatatatttctttgagaaagttttaaattgttctgaattatattaccaattaagtaaaatatgaggtagcactgttttagaattaaatgcctgaagcctattgatatttcttttaggacatttaatttagtgtttatagccaatcattttttgtggaggtaacatttgttaacttttgaggaaatgtttaaataacagtatgatcttttaaggcagaaataagattatctttgaaaacttctgtattgataataagttttgtgaagaaaaacaaaagaatgggaaagaagggcaacctgtacattaaaagatgttaatgtcatatcaggttttaaaaatatgggcaaggctaaactgtatcatctaagaatacacacttgggtcataaacaataaggaaatacaagaaagtgattgctttacaagtcatattagtggttaagttcttttgaagggaggaagggggcatgaagtacttcctttgttttatgtgatattctctctctcttttttgcaattaaaaagctttatttttgtgcttttaataaaaacttgtagatcactgacgtgtagatgggaaacattggctgtttgtttcctctcctacgatgtgtttgcgtgatcagacgtcttcagacacaaacttatgccctcagtcttcctaatgactttaggatggattgagccttaagccttaaacatctccctcttaatggaagtaatctggtagtaaactgaggacagggatttttggggctgagaaaaatgtgaggaaatgtgccttaatatatagaagtttgtcaggataaacttggcctgcttcaaaatttcacttagttgtttctctatagtcttctctccatgctacttgaaatatattagaacaatgatgtcagaggtttaacctgttacgaatacttaattttttaaaagttaataccagtgagcttagtcataggtttgatctgctttcatgtttgttgactttatttttttctgtcctctgtaaatccagcttccattgctgattcatgctattggtaatgagaatcaagaagctcagtaaaaatctttcatccttatttttaaaaagccgaaggtttaagtaacttgcctattggcaaagacatattaagtagagagcagtatgttattcctaagagtttcattttaatgcttactgcatttaaaaaaaaatgcttgttttatgagagaaaattaccatagggttttttgttgttaacagaataaatttaaacgggaagagaaaacaaatggatggagaatagacaaagcattccgtaagtattaagacctcttttacaaagtattacttgaagagcctaaaaaatgaccagtcttttgtctttggctttagtgtgttttagatttgttttgttcctgtattggcattaagaggaagcagtctgaaatttttctgtttagcagtatgggtctggcacttgctacaaatatattggcaggagattatccagaacatctaggtgcaggtaaacagttctaagtccaagaagttatggagggattgatgctaccacttctaagtgttatttattctgaaggaactgtatgggaggagatcattgtttctggaagacagtactattagttatatagatggttctttctggttctgaatgactaatcagtcattcagtcaataacactgaccacctactatatggtagtcattgttctaggtattgagcatgtaatggtggaagataaatggcagatgagaatcctgcatttagaaccttaagtctgattggatggcggaagaaatatagttgataagcataattttaggtagtgattcatttccaaaaagaagaaaaaagagagggtggatgtttaggtctcttttttcctaatgatcattggatcattagggaagttctgtctgaagagatacactagcatttgaatttagatctcatctgaaggaatgatagatatcttgcaatttctaactaaaatcctcattaaaattaacatatttttcttcaagtctagagaaagatatcaaaggatctataaagaaaaatacatttactgttaaaaat

SEQ ID NO: 44345 - DNA, 1650 bp, Homo sapiens
cgagcagagctcaagggcccggatatagaatcttcttgggtccaaatacccactagaagtttcctattggccattttatgctcacctcaaacccgattggttgcaagaagcaagcagtcagaggctagggtgaaattacaaagttatacttctatgcaaacgaagactggacccccaatcagtctgattggttgtggacagcaaccattcagaggctggagttaaggttcaaacttggcaaagcaagcctccaccagcagtaagtctgatttgtcggggacagccaatttcctatctgccctgcggaaaaggtgggggggtttgcaaagggagtagcctttggtccttttgttacttaggcatggaaagttagggttttcctttcagtttagctctaggaagtcagcgtgagacagccttaggttccctgcttccagacttattctcctgccttaggtacagtcactatcgtgatattatctatcgctgtgtcaacacaacaccaatccaagcccaaccgcagctctctcactgccgcaccgcttcgtgagggtcgatccgccggggagacctgctctcctgcgctcgggactagacgcgacctcgcggggctgaggctctgtcccttattggctgggtcagggggcgtggcgcggcttgaccaatcgcgggcggcgcgcttaggcacgtgtgtggacaggcctgagaatcagagaaaccttctctggggctgcaaggacctgagctcagcttccgccccagccagggaagcggcaggggaaagcaccggctccaggccagcgtgggccgctctctcgctcggtgcccgccgccatgtgggccgtcctgaggttagccctgcggccgtgtgcccgcgcctctcccgccgggccgcgcgcctatcacggggactcggtggcctcgctgggcacccagccggacttgggctctgccctctaccaggtaggctgagcgccccggtggcctggccgccggtgccaggctaggaagcaagtggaggaggggcacgcttcaacaactgctgctctcttgtccggagccccagttgattctgtgacgcacgtgaagtttgaagaagaaaagcctaacagatacaagaaagtttagttcacttttagagctggcactgtactttgtgtctttgaaatcagtggttcttaaagcctggtttagaattgccacctggggagctagctgaatagctgcctgagccctactctggaccttgtgggtctcaggtggagtcgctgtgtttatattgttagtgaactcattaggggacttttggcagccagctttgggaaccactggcctagagcagcccaacgaggggcgctgtgcttaggaaatttgagtttaaaagttgattatgatggccgagcccagtggctcacgcctgtaatcccagcgctttgggaggccctggcgggtggattacctgagatcaggagttcgagaacagcctggccaacgtggtgaaaccccatctctactaagaatacaaaaattagccgggcatggtggcgcgcgcctgtaatcccagctacctgggaggctgaggcaggggaatcgcttgaacttgggaggcggaggttgcagtgagctgagatcgtgccattgcactccagc

SEQ ID NO: 44346 - DNA, 564 bp, Homo sapiens
gaaaatgagtttttcttttctatcacatcatgaagctgcaaattttccaagcttttattttctgctttccttttaaacataagtttcaatttcaaaccatatctctgtgaatacataaaactgaatgcttttaatagcacccaagtcacctcttgaacactttgctgcttagaaatttcttccagtgcggtaacgtgaccgatcccggagaagccggcgggagccccggggagagttctcttttctttgtgaagggcagggcgccctggaatgggttcgccccgagagaggggcccgtgccttggaaagcgtcgcggttctggcggcatccggtgagctctcgctggcccttgaaaatccgggggagagggtgtaaatctcaacacattcaaaagctagcagaaggcaagaaataactaaaatcagagcagaactgaaggaaatagagacacaaaaaaacccttcaaaaaatcaatgaatccaggagctggttttttgaaaggatcaacaaaattgatagaccgctagcaagactaataaagaaaaaaagagagaagaatcaaa

SEQ ID NO: 44347 - DNA, 1027 bp, Homo sapiens
aggtaacagataccccaaataccctgacttgatcattacactttctatgcatgtaacaaaatatcatatatacctccataaatatgtaaaatattatgtattaatacaaaaatggctggctgttaatgaatataactagcttaccagagccctctagctgccctctttctgcaatagtgatgactaggaagttgctaagctttttcacccttgtatagcaccttgatatttcctgtgtgagtcacaccattactatccctccaacaacagaggctgaaaaaaattacactccaggccttgtttctcacacaatagggcttggcagcatgctccaccctcagattctattcctagggcttaccctccaaggagtctgcaatggactggatgtttttgtctcccctttttcctcccaaattcatatgataaaaagctcatcctaatgtgatggtatttggagaagaggcctttgggaggtcattaggtcattaggatggaatcctcatgaatgggattcaggccagtataagaagaggccagagagctagctattttttgctcttctatgtgagatacaatgaaaagtcagatatctacaaaccaggaagtaacctctcgccagacactggatctgctggctcctttatcttggacttgccaggctccacaactgtaagaaataaatgtttcttgataaaataaatgtttgttgtaccagtctatgataatttgttatagcagccttaactgaccaaaacagtaaatatattacgtacatacaagatgtgaacacaaaccaaaactccttattgagtccactaaagctttccatgagagttctgagaatagttctgccaaaacaagtgttggaaggagtatgaaggggttgctggagcttggaggtagtgacctaccaattcaaattagatgttatgtagctcatggtagatgtgtaggtagatagctagcgcccttgattgccaatgagtaagcaatgttagttgaaaaacagaactagaattaaggg

SEQ ID NO: 44348 - DNA, 3093 bp, Homo sapiens
ccaacaagatatcttcttgaggggtgagtaagcagggcttgtaaaccaaaaattatctaacacaggtctcaatcaatttagaagtgtattttgccaagagtaaggacatgcccagaagaagagaacacagaaatcacagaaacagtctgtggtctgtgcctgtctccaaagatgaatttgggggcttcaatattaaaagcagaaaactagactggaggggaaagagggagggtatgctaatccacatgttgtaagacaaaggagaaggtaggggaacagtcaactatgtattcatctcatgctcagtaaattggcaccttatataaggtaaggtgaacatagagttatcacctgtggagatatttaacctttaactgtagctctctgcttaggaacaaaaggaaaggcagtttcttgcatgactcggctttcagcttaatgtttttttcttttggcaaagtgaattggggtcctgagataagtaagaaagaactctatgttttattcacaagacaaactagcccttctaggtgttttaccaaaaggatgaaatggtaatgagctactggctccctccctctgggaacttcataggctggatgctgaagatgaccccatctctcttggggcaggtgtccaaatctgggaacccaggctaggggaggggcagacagatacttgctggtttctggaaaaaggacagtatgttagatgcacagctttctccaggatcacataggagacttctacagttctgaaagcttcgtgtgccctgtcctctgcctcctcaacctgtgtatcttcccccttcctttgggggaaagaaccacaggaagaactaaaggagagctctgggttctactctagagtgtgctcaagagaaacaagtaggaagtggacttgatacttagtattccccagtgaccttagcattggaaccccacttttggaaatgcctgggagaaaatgttagagtagctgaaggatgcttttagtcttcaacagaaagcagctgtgtgtttctcagtgcccttctgggtccagttgttacaaagactcagcctagcacctttacttctgcaaagtggtgtttgagtcatttgtcatcagatgcacttaaggtaggagctgtttcctggcctcctcttcttagctcttcctgtacaaaaaaaaaaattggcatgtttcctaatgatgttattaaagaatgatttcaagcatgacactggctatcacttacataagttatgaaagtcaagaatctggcccatgaaaggtatccagcaaggctgttactgaaagtggtacaattcagtgttttagaaggtggctaaatgatctgtgagctgaatggggcagtgtggtgggaaggaggggcctctgttatgtcactaggggaggaagaatgtgccaagggaggctgccatggaggggactgaactgtgactcatgccaatgctggtgggcttgttggcagagaagggagatgcccctgtcctctgaatgctggatgctttccagtgtccgaccctctttgctgggtcacagtgatttcatttttttttggctttttatagttggctgtgaaaatagcctttcaccttcaatgaatcacatttaaagcagacagggagtataggagagtaatgagattaattggcctccttttggacttcctggtaagtccaaggggcaaatttgtgatgtgtcaccagcagcaacactttgttgatctttggacagaaatgacaaagcaaatacctttgaggaaggcaaaagggaagcaagttgaggagatcccttttcactccactagctggctgctaatctcggcacgcaggtcagattgaactggagctgggacatggtctgaggatgcttggcttaacctctgttggcagaggcctgccatgcttggctgccgcaggaggccagacttttccagagagtgaggctggactcaagcatgatgggaggctccttatctgcccccaccagggtcttggggcaaagccaagctgcttacaccatgtgactgggaatggcagtgactcagagggagcaagctagaagggaggaagtgctggtgtcctcagccattgttagggaagaacggaggagcccaagaggaaggctccagcgctgagaggaccacaggcctgaggcagttgcctagcaacggtacccaagcgcctccctccaccagcctgtcagcagcgtgaggcctcttaccagctcctaccctccagttccttccttcaaagccgccctctatatgccttttcaccaaattccacctgaacagaaatgatcctgggggtgtgggtcagggggagcctccagaccacggaatgtcttagagagctgtgctttgtgttgctaactgtagttaggaactcagatgccagagccagacctgcatgcaaattccagggccaacacttgttagctctgtcatctggggcaagtttcttaacctcccaatgcttgattttctccatccataaacgatagagaaagatagtacctatctcaattggggcaatttgaggcttagtgtggatggaaggatggacggatggatggatggatgagtaaatagatagacagaaatagaatcaattaaaatagtgcctggcacatagaacgtctacgtatgcgttcattactagtagtcctggaggacagttggacacaagcacttgctcccaggtggggcagaggagctggggagggagccccaatctccagtttcatgatggcgtgtggtactggaatatctgcttccaggccactgttctaacagtggcttgctgtgggctcttgggcaagcagcaattttccccttggaggatggactgaaagggtctggatttcctcaacttctccttgccttgtagcatcctggatgtgactgagctgagtcacctctgtctccgcagctatggggggattagaaaatgtgacaataggagggggttccagctgagccccagagggaaggtttgggtgagcaatgggtgaatagtctcagatggggggtgtttagtccagacctgggaaggggcaggcagccaggctcatactggtatc

SEQ ID NO: 44349 - DNA, 1685 bp, Homo sapiens
cgggcgcctgtaatcccagcttctcgggaggctgaggcaggagaatcgcttgaacctgggaggaggaggtttaagcgagctgagatcgtgccattgcactccaacctgggcgacaagagcaaggctctaagaaaataaaataaaataagaaagagagtatcagggatatctgaacactaactggatatttcgtgatatttacaaccctattaatattttaggtgtgataatggtattgaaaagcacccttgtcttttggagatctgtatcaaaatatttacggatgaaatgacttactgcctgggatctccttcaaaattatccaaagcatcgggatggggaaacagtaataaagataaaataaagactaagagctgataattgttgaagccaggtgatgggtaaagggggctccttataccaaggtgtctacaccttcaaatgttaaaacactaaaaaaaaaaaatctgtggcgttagaagtcaggataccggttacctttggagagactaagtgggggccgcaataagggcttctggagcggtaggaatgctcttgcttcctacacaggtttactcgctttgtggtaattcatcaatgtctatattacgacttgcacacttttcagtatgtatattatactccaataaaaaagtattttaaagaagaaatcgactactttaatgtaggcggaagatcctatggtagaatctcaggtactacagcaatcactgagaaagctttttgggcggaaaggaaagtgaggctctcgcccggtttcctcctctccacggtggaactggcagcggccctggctggctgctgagagcgcggaacggggcggcgttctgacgttcgcgccggggccctctggacgcaccgcgggcgcaggtcctagacagctgcattggcgtccaccgcggccccggcgctgggaaactgccctcacgctagggccctccccgaggagctctctggcacaatcagccacgaggacgaagagagggggcaccggaaccgcaagcccactccgagaggccagaacctctctctcgccgtactccccggcagggcacggctcaggggagacggcgctctggcacatgaagcccacacccacacgccgcagtgtcccttgctgcctcgatctccaatggggatgggagcggcgaaagcctcatatcggccctcctccgtcccccaatcagcgagcccgctttgagcacctcacggccctccggctggcggcgcccaatcacagcgctccacatgctgggcgcggccctgcgcgcgcacgctacccgacagccccgcgcccactcgccgcgttccacccgcggggcggcggattcccgcaggggccacactgccacctactgtcccatctccagagctggagccacgggcgctctccctaccatgcggcctccctgctaagtgccagtagctcaacccaaacgctcaaataaaaatgagggaaaacaagtagtgtcgtcgagtaaaaccgaaaacaatgtccattttgaaaaaagcggcaataattaccttccagtacacagtaggaaaaagtctcaaaagctttctttgttccaagcagtgtgagttccaaaacattatttcacctcacacgttttatagagggctaaaaacaaggggcttagggactcctcagtgcacatatttct

SEQ ID NO: 44350 - DNA, 1594 bp, Homo sapiens
aatgtttatctgacgtccctctaaagaaacctcagatgggagaaaaatgtcccagccccaggaatggacacatttaggtttttccttttttttttttttttttttttttgagacagggtctcgctctgttgcccaggctggagtgtagtggcgcgatctctgctcactgcaacctccgcctcccgagttcaagcgattatcctgcctcagccccccgagtagctgggattacaggcgcgcgccaccaggcccagataatttctttgtattttttagtagagatggggtttcgccctgttggccaggctggtctcgaactcctggcgatccgcccgcctcgcgttcccaaagtgctgggaccacaggcgtgggccaccgcgcccggcgcacatttgggtttttcgtggtcagcaaaagcacgaccaccccaacacataaatctggcgaatcatacgcaaattccctcatgctatataaccttccactgctcttcgtacctttggacaggaacatactgttattttagggaaggaaatggatcagataccttgtctccttcttctgcactaccaaacaccccaaatggcgtccctagcaatcagattccagaaacgtttcctctcctcttgaaagcccaccgctcccttcacccaaaaaacagaataatcaggggcctaatgaagctgtccggccaacctgcaggagagagctgaggaagaaccacttgccgcgccaggagcatcccgcgccgcactatggaggcagccatcttggagcgtaccaaaaggaacagccaacgggttacggacagaggaaggggcggggttacagctcgacctctcggggcgcccagaattggacgaatcccttttgtcgctctcgacgacaggaccgacgctccgcctcctcgccccggttccagtagttggtatggtccgagacagtatggctgctgcatttcggccctcgaatcgagttctcctgcaggcgctgcagattttggtgtatcctggggtgggaggctccggctctgtcagctgccgctgccctctcggaggtatccgcggctttagcctagggaaggaggggagggatgggagagaagggagtgttagatcccagctagcatctctgtggagcagccacagctcctaagtcactcactggcctggagcgcaccctcgccctctagttgcacgtgggtgcagtggtgaccactgggggtcgtggatacccccagtgcctgcaaatcgaaggactgctggggtattgaccttggggctgtagtgctccctcagatggggcgacgttcgtcttcaggaacatccctcccgccttgggtgacttttatttatttatttatttatttttgagacgaagtcttgctctgtcgcccaagctggagtgcggtggcgcgatctcggctcactgcagcctccgcctcccgggttcaagcgattctcctgcctcagctttccgagtagttgggactacaggcgtgcgccaccacgcccgggtaattttttgtatttttagtagagacgggtttcactatgttggccaggctggtttcgaactcctgacctcgtggtcc

SEQ ID NO: 44351 - DNA, 800 bp, Homo sapiens
caaaatgcttttacatgagagaaaggtgagcccaaggaaccagaaagatggagagagtgataacagagaacttgaaaaaatgaaatgggtttgtaatggaagaaacaaaatactagaaaaatatcgacagagacattttagtttcaaagggcataaacttggagggcatgaactcaactatatacacctggtaatggatttgatatgaactgatgaatgccataagaaagcagggaagtatgagggctcagaaatgagtttataaggcattaatggtgaggcagaggaagcaccagaaaagagagggaaggacttgcagctgtgtagaaatccaagcggctgagagccctccctgtcttagcctgctgcaggtagctcctgttcatcttgggggctgaagcagaaactacaggtctgagcaggtgggtcagcctgaaaagctcacacgctaaagcaggtctgggaggccaaggttggcaaaggtccagagtccagaaggtcaggtcatttgagcaagtgataccagtaagctaaacagactgggaagcctggtcttccagcaggcatactatgtctctgacttatctgcttcctactggatatggacagctctggtattccagtatataattgcttctgagagagagaatggccttcagatgtcccatctatcatgatgggacagaatagaactgctgggattagcaagatactcttccactaaagctaaagctatccaagtctctgataacatcaggaaggaaagaaaggagaaaagggggagaagtgttttacttgga

SEQ ID NO: 44352 - DNA, 1343 bp, Homo sapiens
ctcccaaccaaagtgtccccactctttctctattctgttctgcctattattcaaggtctaacttgtgtcactttttcaatgaggcatttgcaagctctttaaattctcaaggattctccattaattcaccatatctattttgagaatctacaaaggacaaggcactacgaaagactctacatgccacagggaaaagacagacaagatctctgtcccaacacagaaaattttagcctgccatgttgactcccagggatctttttgtttctgtaggaggtgctcattacagagtggccaaattcctactgaagaatggacttggttgtgaaataaaacaatcctgggcaatatttgttgatagttttgttgaggatgattcaggaaataaatacaaacttttaactactcataatgaatattgttgggatattataatgaggaggtaaggatttacctgctacaatttgggtaggcaaaaatgtaggcttctctgtttctttgcagtgaactaaaacttcttatgaactctggttatactgaaaacaggagtcatgggagacttgatcttgcttaaaggatattttagtctttgatttctttgaggtaaatgttcaatctttttgcgtatcttcctcctaccttttcatagccaagatgacagctgaacaggctctcatcttaaacctgaacaggcatcagaatcacttggagagcttgttaaaatacagattgatgggccccacccccagaatatctgattccatacatatgagtcagggcccaagaatttgcattacaaatgcattctcagatgatgcctttgctagtctgggcaacacactttaagaatagttggtataacagaaagcttgtgtgtcttgtgtgtctatgtggacaggagttgtgggcttcagattcatcctctgtgtcctctggtctcagttgtgaggagggggaagagtgggaagtctggccttgtctctggactcctgagtaaataatgtgctgatgcagtgttgggcccagcaggccttttagagggtcatgccagcacccactgctgaggtctgtagtctctaccatctgccctacacataataagtacccttcctctgctattctctcttgctgaccccaagcccaccaatgaattaattgaatcaagagttccaaggcattaggttaaagacattgaaaaatatatccatttattttttcaaatatacataaagaaatccatacaaactaaggccaattgtggcaaaactacatgagacttgactaaaataacccacaattcaaatttccttcataacatttctacctataaatttgattcagag

SEQ ID NO: 44353 - DNA, 577 bp, Homo sapiens
aatagtttatttatgtgttacaataaatcatactggttatgtatacgaatggaaggagacattgacatgaagagttgaagaaaaggttaacatattttctttatgatttttgagtacggatgttccaatgatcctggaattctcattgtttcaaataaaatgatgaggtcattgtaaaaacatctgagttgagacagcagagtcatgcttttgcatcctgtcctgtggaactgcactctgatcttcagcttaccacaaaaatcggctatagcaccttcaaactgatgaaatgctcacctaagccacactcttctgtcaaagctggctgttttctacatcctggcttccttgttgctgacttaaaagcttttcttattagatttttattggaaaagttaacaaattttagggtattggcaaattgttcagtaaaattatgttgatgatgttaacaagaatgttaaagaaaattttgcaggtgataacacaccgatggtatggtaggagttgggaacctgggctcccagacctctcggggtatcagtggatgcttgaacaaggtgtttgggatacaagt

SEQ ID NO: 44354 - DNA, 1177 bp, Homo sapiens
aaaggaccgtgagaaaacaggaagctttgaaaagtacaagagaaagcaagatgaaatctatttgcaggcggtcccctggggacatgtgaggcattgttaagcaggcagttcatacggctatatccttccttctgctgaggagggctttgctgccaaaaggctgctatctggtcactgccttaaccccctccatgccagcctgaaaactctgaccccaaacactgggcccctcaaagccccccatctggtttcttccttcctggagcgtcaaagaaagtgaggggaaaatggagccagtttgacaacagtggtggaacccctctgcagggagatctcatccctattctgacagctctgccctctggccttcagccttctgctacagacaaggtttcagatgacctggtgattcataacttaggcagctgccggcttcacccatctcaaaagagaatttgtcccggaaattctggatggctgtttttcctggacaggtttcccgaagacggcagctggttctttgctgttatggagtttggccactacaaggataggctccaaatcaacccctgtgtgcttacccagaatctgggaagcatatttctgaaaagtggcttaagtctacaggcgcagatctctggaaaaactccagctggctccaagaagcacgagtccaaaagtccagccaacagcaaaagagccgagaagggcagtaacttttttataaggaaaaaaagaaaagaaacatggaatggaaacctttcctctcctctaattttccatcctattgttaatgcctaatcccacagtgagtgaacatttctgcgtgctagggacagctgtttccactgagcactgggctggagaagatcagttcatattgagacaggaggaaggatgcatgttaagaaggaattttaatggtgagaatcccccaaaattagactctgttactaaaagcctcttccttgttgtgagtttttgggtaaaggagagagaacgaagactgcctcttctgcccagccacgtcaatcacaagacatgaagtggatggctcttccctgttatggcaacaaaacacaagttcagttgcctggcttgtactccaacaccacggagcagccagccagccatgtctctcagatggctgtgaactgcattgcaatgggcaaatggc

SEQ ID NO: 44355 - DNA, 2605 bp, Homo sapiens
gaaaattgttaacacgtttagaagaacaaataaattaccttagtaaaaatttagacattttctagtattatgtactgtaattttacctaaactatgacaggaaggcaacaactgtcacacattttcaaaatatatacagcacttccagtaagatagtcggaactgctggtatttctactcacactgatcatgtgaggaatattatcacgggcatcatcaccttagaaaataaaaatcagctagctatgcaaattttaagtatttttatacagtaaattttacatataagaataatctgagggaaggaaactgatatttatctcattacccttgttgcagttgggtataaaaacgtccaccactcccattttgaatcatttgccgtacagaaaatacaggacattttaatttctcatgatggcaggttagggagagaaaggcttgttatttctaagagcaagaaactacagttttataggattgaacacctggaggcgtaaacattttataaatcactgaattctaattacatagtagtttatacgccagatacaacatacgtcaaaagcctatcttgttctaagcgggcagccatccaccggcgtctacctaccgaagccatttctgctttttaccagcgacgctggaacagtgttattgtgggatatgttcagtgttgaacaggctcccagggcacggctgttactttggaggttatgctggggtacagaagttaggctggggcagggccatccacctaggagggcccagcacagtctgggcaaccacaccggcgggccgttttgctcacagccccaccgcgccgggcagcgtctgcagctgctgcgtgcgagacccagaggctccggtcagcgcgccggccgcagggagtgcgagcacttgtgagccccgcgccgggccggtgaagtctggtgctgccgagcccgcttagaaagcacggccgcgcgctgtcggacgcaggcccacaggcccagccgacccaggcagcaattttcctagccccgccgccgttgccaaggcgaccgccgccgaatgttcccgccgcgggctccgccccccggccaatcggaccggcgctcggtgaagcccagattctctttgttccgcagccatttcaggccccggacaggaggcagtgccgcttcggccgaaggcccgagcgcccgaggcgtctgggatggtgtgggaccgggtaggtggcgtgagggtgcgcggccccgaactgcaggggcgggaacggaggctgggagcgccgagctgcctgacgcgcctacgggagagacgccgggctcgcccgctctctcggcgcctgcccggccgtttgaagccgagaggcagcggcggcgcggttctaaccccaacagctgcccgcccaggcgccctgcgggacccgggtagggagcaggcgacggcggctcctcaagcgtccgaggatcccgttaggggcggcaggagcccgttacaaggggcgggaagggaagggtcttacattcaggggagcgtttgcctcgcctgttaagctgtggcgtttgagggcccttgagtgctgcagtcggctgccccgggacggctgcctttcactggttctgggcgctggccggcgctgcccgagatgggccagtctttgtcccgccctgggcccctctgcccgggtctcctgcgtccgcacacagcgcccatcgtccttacatgcagcttgccgttctcttcctcccggcggttctttctccttggggcctcttggcctcacgacatgtttacataatgtttgtgactgtacgagttttgcgtgggcttgtgggttttgcccttctacctccactcccatgcgtacaagcaacagggaacagctgctgaggagcagattggccaccacaatcaagctattttcggaatgactttctttaaaaatgatcgcgtgttgcttactgattttaaaaatcaactggattttgcaaggattgcttagagtttaagtctgttatcttaatcgctaatcaggatggtctatcagtagatgtaaatgtagaaatttgaaattggaggctatctacaaattgattttgacagctgtattaagaagcttaataactgtcctttgaaacagtaatgacttaaatgatgaatgtgtaagtggtactttttttaccctaaagaaaagatacttttaaaattgcaagatgtatggtgtaataggtgtttggaaatgaaggttgtaaaatggctgtcctgacgtactactcacttttagaataacaaaagttcctgcagctttttaagtttccctgttatatcaaagctttcatgttagagtggtgaagaagctatgtttagtggaaaaggggaaagttccgttttttgggaaaggatctgttttccactttcaccttacctggcaccgtagttgttcctagagaaggctgtgccaggatgaaaattagcaaccacaaaagggaaacaatagtttgtaggtgcagatatcttttttagtctctagctatgcagtgcataaatttatactagcttggcagtacgatttttacttcatgcaatttaacgtgagcctaatgaagtactagtgttc

SEQ ID NO: 44356 - DNA, 1587 bp, Homo sapiens
ctaattattgctgaactgtcagggaaattaacaacctttttaccctatttcaatcatttttcgttaattcaccatgtgtatgtaaaataatatacccaaaacagatctcttcaggtgtttcgcaggggttttgataaggacttgactttttattagcccttaagtcagtagtaatctggacggaattagagatgggttgggttggagaaaactgcgtggcactaggacccagggggctcccgtgagcggatcttggggccagattgcaaattcgcggtgactcagtctggtcggctccttgcgctcggcggccgcggcggcagcagcagcagacgctggcggccgggctgccaggagcagttccgccgggtttcactgtccgtgacttccttcggggcacctcaggcaggtccgcggcgtttggggagcgctggggttgtggtggcggggagaacgggtcagctgcgcgcgggaagcctctgggcctgtgcaccgggagtaacagttgctccgtctcttcctgtgtctggctttatttgcagcaaaccaagatggagtatgagtggaaacctgacgagcaagggcttcagcaaatcctgcagctgttgaaggagtcccagtccccagacaccaccatccagagaaccgtgcaacaagtatcctttccgaggcctggccgccacccgcgcagctcgccccgcgctgcggcccagcccccggcggccgggggctcccgtcgcctccgcctctgcccctcccccatcctccgagaccggcctcctccctgggtccgggcgcgggggaagccgccgctgcccctgccgggcgactcgcgcacgcggccctggtgcctgggccgggggcgccgccgcgtggggctcacgccgccaaggccaccggcttccggcgcgcaggaggcgggggcccccggccgccgcccgggatcgcgacatgtgcgcgggccgggccgccacgtccccgcccgccgctgacctgccgcgggggtagggagcgggcgggcgggagcggcccgggcccacacaatgcgccccgtgggtgggggtggcaggccgagcgggaggccgggtggagggcgctctgtgcgcggcggagctcgccgcctgactggccagaaatgggtggagctggcgcggggtttgaactgcagctgtgtgggtcttgggggtttttccacgtccttgccctaaaaaggctggggacctacaggtgggggaaaggggtctctgtgcctcaccctggggttactggtgttaacacctgttgcgaactccttgtcacccaagtgagattttctttttaaagctttggctcaaggctgactgcacaattatgtaggtctttaccgagtgtgctggtgtagtgatcctgttgctacggttttagagacaggaaaggttaagagaaccaaaactctaccacgtatgctttctgtagtgccctaaaccgtgctcaaatggagagctcttactggatgcagtaaaggaaacattcactctatatcatgaataaccttttaacccccgttttaagcctaaagaagttagttaagtctactattttttgcag

SEQ ID NO: 44357 - DNA, 816 bp, Homo sapiens
aggacttccgctttgccattccttctccaaattccactgaaatcacaaagaaatagaaaaataaattcaaagcagcacaggaaaaccagaaaaggtgcttccagcaaacaatatagaaaggaatttttgaaaaaaataagaaacgtgggaatcagtagagaaatctagcagggcataagaacctaaaaccattcaaaggaacaaagtactttgttaactgaagaaataacggagccatacccctaagtccccatcaattcctggagttgctcttggagcagctggctccattgtttgggcttagatgagagtcatgggtatagttttctgacatagtacagcagccccacagcaatggtatgctaaatgaagtcagtctcttaagaatctagtttgcacatctcttctcaactccccattcagtgactgttatgttgctagcttgaaaattggctagggtgggagattttacattgcatggaaatcaggaaatgctgcaaactaggacttcccccactccacccagagctggctgtcaaacatttaccaacatattactgttccagagtaagctaaggtcagaggaaaaggacaataccctggagggtcaggaaactattctaagaagagacgttacctacagagtctgcctatccctaccaaatcccatgaggcagattcttgtaatcaaaacttgcattcactgccaggtaaacatgagttctcatttgaagtgaggaaatgcgtccagctatgaatttcagtctagactgaaattctgttcctacaaatggaacaacaacaacaaaagaacca

SEQ ID NO: 44358 - DNA, 2749 bp, Homo sapiens
gtatttgctgtgtgacctagatggctgaattttttaaaaagttcttcagcatcgagaaaaatccagttagaccgatagcttagagagctgtagcttatttctaaatttgactttccctaaaactaagtgtaaatgtcagtgatatgaggactttttaaagaaacaaaataaagaaacaagatacacaaaaatagagcaactatggccaatcttgtttcatcccttttcatctatgaccttactcatacccctatccataataaatgactttcagcaaatcctagatgttctgcatcctatatctttctaacagatattcttaaaaagtatgaccacaataccattatccaattattccttgttcaacaagcacttacaatttcatccatgtgaaaggcacctcatgatttttacttgaggatgaagataatttctcatgaattctcattgttttaagtcacctgaagaggtgtgatatgctacaataaatctatttgtagggcttggcttcaagaactgaagattctggacctagctgatctggtgacagtgaacttgagacctctaatagcgtttaactatttttttttaacttttggaaagcaaggtgtaggaaggggatttagtttttccattaggtcgtggcatgttaagacttgtttctttttccaaaatgttcaagttgctgaagagaactatggactatgggtcaggaagtccgtcggtttcgggtcacattccgctcccgcaggcctgcgggccgccccagctggtttgttcccggcgtgttagaggtcagaggccgaggccgcactcagtgcctgggtctcgcgcagctccagggctctcaggcgacactgggcgtttcctttccggcttcggaaagttttgttttggttcaaggaaaggcgccctgttgaccaaaggcttctcagtctcctccgggtggccagcggccaagtttcctccagcccagcgagtccagactatagtccgttcgagatcctcgaaggccggggaagcgagtcttgtgaggagagaaagcgagtgggcagccagcctgccgactccactgccgctggctggcccttctcttccctctgtccctgggccagtgcccgtcgcaccacaaacagtgcgagcagtctccccggtgactcctcaaggacccagttctccaccattcctaagagaacactcaacccagccgcgcccgggatgcagagagatctaccaacacccgagaatggggacagggcgcatgcgcacaccgtggccgtggcgtctaagtgctcgcccagctgcggcagccgctaggtggcgcatgcgccctggaaggtgcgggccggtctctgggaagaaggcggcggcggcgaaaggcgggggtgctgtgggggccgggccgtgtttacacagcggcgggcgggcgcggacgcggaacccggcgcggcggcggcacgatggtcatggcgtatttcgtcgagaatttttgggtaagcttaggatgttggaagtcgtgtgtttcgaagtccaaggcttttggcgcctgagcttggcctgcgtgcgcttcgggcggcggcggcggcccctccggcagggcgagcgtcctcctgccgcgtcccgcctgggtgaggtccggcgggcgaccggtcgccagcctatagggactcccgggctcgcagccctatggggacgggggctgtcaccgcggcccgggggcccgcagcggggccgccggccaccggggctgggacaaagcgccggatggggcgggagacgggacccagccccaccggaggctcccggtgccgcgctccgcgcggggcgtgcgcggcagctcggacgcgaaggacgggcccgcggcacagccgcctcccgctgcgcgctggctgggagcgccgggcggtggggttttgcctcctgccctcaccgcgggccccccatctgagcgatcccttttacctctgacggtttccacaccaaatccagtgcggggttgggctggactagcacttcctctcagcctcgcagctcggctcgtgggtttgcgcccaggactttgcctctgggcctgttcacaaagcgtttaaaagttggatttaatgtaactggactccttgggcttaaatgcatggagacctccccctactctgtgctccttccccttcctcattctttccaccccttgtcttagctcagtattagattcttctttgagaatttctccggctcccggtggagtatttttctgcagttattgtttttttttttgtaatgggaagtacagttcagccatgtacaggaaaggaacgtgtttactcaggtatctttcgtgaatcccattttatgccctgacagttgcaagtactgcaggtccattttcgttgagatttagacatatttaaaggggtaatcttttagctagtaaggaatgtatgttaaattcttaattctaagtgcctcaagcatggtcttggttagtaatcagatcagttcatagttatttatttgtcttgaatgtaccttgttttccacaaagaacgtatatactagaccttaggtgttttgttttttaaacagctttattgagttcacatttccgtaccaatacactcatttaaagtgtagtacaattcagaggttttttcatatgttcatagagttgtgtaaacatcaccatatcagttttacaacaatttcgttatcccagaaagaatccctagacccattagcagtcactccccatttt

SEQ ID NO: 44359 - DNA, 2693 bp, Homo sapiens
aggaaggatatctccaccccaaacatagattactgcaatgtccttgggacacagtgcctgtattgttataataatctaaacgtgcttggcatcacaaggccatgagggcgttttctgggttcacagcatggtgtgttctctgagtgacaggtgtgctgcgggagaaacactgaatggtcagcgcatctgcatctggctcaggccttctctgcatgtcaaccagctgcagaggttactttacctctgtcagcctggacctcagtttcctcaactgacaaatgactgtttttctcagtctcctgtcccctgctgcctccaaccttttctgaactgctggagagatgtagcaaagaaccacaaagcaaggggtcgtgagtgttggcattgttcatttcgacagtaatcagggctgttagttatggcggggatttacagaggtcgggcaccctggctatgaaaaagtccacctttggccacccaggcaagtgccccaccaaattccaatggcaagaacttgtccgttctgcctccctggtgaaccctaaagcccaggtaaccccctcccctctttacctctctgactggttctttaagtctcttctcacctctgatgattagctaagcctgcttcatactttaccttcagtgagcatgaccaggaatctcttgttgtatcaggtaggtaaagtgcttgcttgcacattgaaaagtttcatccattggccttaactctagatagggtttcaggcaaggcagacaggaagctgagaagagaaggcagggctgggaagtccccgtggctcagggcacctctgcgcttgggcagagaacccttgactcaccttccaccgtgccctgacccctggtgtggaaactagcacagttggatccgtatcacgtgtcacggggctggttacaaatagcacagggattggcaaactcatcccgaaactcccggttcaagggcagggaaagttaccagtttaattccggcagatcattagtggtggagaaccaggaagggggttctatcgcaaaggagggctgtgcgcagacacgtgggtgcgggaggggcagagctggtccggcgcggggcttgccgcgtctcggcctcagtctcggagccaggacctcaggcctgaatggctgggtgtggagggcccttgtctcacattctgtagagcgcacgtcgtcccgtgacctggtggctccatattcgatggggagctcgcagcgagtcgcttccctctgtaaccccactccaggtctccagagcagtaggagggccacagggctgctgggtgtagtcgccccggacctcgcggtggccaaggccaaggcggccggggcacggtaccctgttcggcctgggccgcaaccacgaaggaggcggtggaggcgggggccggcgcttcctccgcgccccccacgccgccgctctctcgcgcccctatagaactgggcctcaggcctcgagggggagcgggcctcggcgggcggggcgcacagttccgccagccggcgggggcatctcaactcgccggccccgccaggtgtgcgggccaggcagccgtggaaggtgcccatttctcccagattcctcgcgcgcacggccacgagcgcggaggctgccaaacccgccagccctgggttccgaagccgcccctggctctccattccctcgcgggcgcgccccgggcccccagtggcggccagctcccaccggtcgctcctgcactgccctgccctgccctccccgggccgccgcgcccgcgcagcaccgcctccttctctaaatactgccgggtccgccctccgcaccaggacgcgcggtgggtagggtgcagggcggccggcgcagccgaggccgcgtgcggaggcggacgccgcgcccagccagtgcccacagcagcgcggtcagccaggcgccggacccagcttcaggtaagctgccccggcccgcgcgcctgcgccggcggcggcgggtcgggcgctgagctgtgcggccaggctgggcgcggggagccgcggcagcgcggaggcgctgggtatccgagcccaacctgcgtccctgcgagcccctccggctgttgcttgcgctcgggctccctaaaagccgcaaaccgatttcgcacagaaggcatttgcctctcgtttcgttccccaaacgcaccatagctttggacgtggagaggtgctgtgaattttggaaatgtcttttggaaaaccaataggagtgttggagaggggagtttggctttggggagtttaagtgtagggtggtgtttggaaaaggtttcattgcgagtgaatgtgggtgtctttgtatccgtttgtgagtgcatctgtgggagaaggagagagagagagtatttccacactattatggatcagaggtgaacactcagccaggtgctccgtccactagtccacggacaagaaactacagattcagttttgggcttctatttactggtgtttgggaatttgccttaagacagttgaagccttgtgactcactgcaaagttgactatactgggaataaatgaattcctgataggactttgcagccgagaatcacccttctctttcttgtctccgaaaccgcaaaagagattgcatgattcaggaaaaaaattaaaacaacaacaataacaaaaaaccaatatatataggtttcaggactctccat

SEQ ID NO: 44360 - DNA, 703 bp, Homo sapiens
ccctgccctccgtccgtgcataaccacgttctcgttcacgaagcggccagcctcgcggcgctggggagaaggcttcctccttgtccgcacttctgggtcaacagccttagatggggcggggggggggggtgcggagctgccgaaaccttctcgaagatcccagggagtctctgtcccgcagaatcagcaccatcctcctcggagcgcagcttttcctccctgcccaagtgcggtgcacccgcgcaccacccaagcgcccagcatcgagggcgcggcggcggcggccagggcggccagggcccttgagcacccgcgcggttttccccctatggccgcatgggggcaggagagaggagctgtggcgcagagcacgcggagagggacctggagcgcgggagccaggacggcgcaggcagctggggaggccgcggggctgcccagcgagtggagtgcccaagaattggccggggtggaaaggtccgcgggagacgatccccgacctccgggaacaggcctgcggtcggccgccttggcacccaggctctgccgcccccggagactcggatcgagcgctggaagtggccgcaagggacgcgagggagagcagagctgtgaatcagccggaaagtcactccaactccagggaattccgctccgggaagaaaggtggcgagcttctccctgcgttcccctccacccccag

SEQ ID NO: 44361 - DNA, 2109 bp, Homo sapiens
ttttatttaaattgccattttaaatatcagtcgttttatcttaaagcttgtcctgggtttaacaaagtttaactcacatccacgcgttgtctctccaaacacagcaggcagaaattctcctttgattggattaagatagataaagtctgcttaaccgtgaatcgctaattgtcaaatccatgccaattcggtacctaggagtcaatttttttgcctgataaacaagataattgtgtggaccgttttaaggtggttagtcatctgctaaattggctgaaatgcggattacccagttccttcgtcgtacagagttgcattctgaggagtggggctcggggatacagcccccagaaattctgaacctcggtcccgcaatctaccacaccacctaaccttggaaggccaaactaacttcactatttttgacaaaatgctttggtaatggctcattcgggccgagagggaaattctgcaattctccaacccacacctccagcaaggggagagctgcttgagtggtgagcacaagctgggcacctccggcgtctccaggaaacgtgaataggccctttcttcggagggcacagaacttcaggatcagggcccaatggagactgagcggacttaaccctaactgtgcacaggaccgcgctctccgacccctttgtggcctctcccagaggtacgggctgcgccccaagccagcagtctctcgtagggcctacagccggcagccgctggagcaggaggaggagaatagggactcgctggaccatcacaaacgctgtcgcgcgtgcgcagggaggaaccgagttcgcggcgaagtcagtttcctgactcttgaaggaagtggccttgtgtcacttccggcctccctttagctgccatcttgcgtccccgcgtgtgtgcgcctaatctcaggtggtccacccgagaccccttgagcaccaaccctagtcccccgcgcggccccttattcgctccgacaaggtacaaaaaggctctggacggcggcgtggtaggaggacgggagcgggggcgggaagttccctgaaggagcgagacagggagggacagggcagaggaggagaggaaggcgatgcgacggacaggcgcacccgctcaggctgactctcgggggcgaggtcgagccaggggcggctgccctgggggcgaggcgacgctgtctcaacctccacctcgcggcggaacccgaggacaggagcctcaggtaccgcgaggcttgcggagagtggccgggccgggcaggccctggctaggccgaggccaggccagggccaggggtggggggtgctggccaggcgtggggtagagcctttcatccgggcctgccaagagcggggagctgtgggggagtggtggggaggcgggtgctctttgggctccctggaaacccaaatttggagctttgcggggtggatttgggatccaggtttcggcctgtgtaggacgtttattttcctgctggtatcttgggaaataacgagcatggaatgctagagtgagctaaacctatccttgctgaggatttcctctttttctagatgaaagaaacaatcatgaaccaggaaaaactcgccaaactgcaggcacaagtgcgcattggtgggaaagtaagttttaatagttcgggtttgtgggttttttttttaaggtttaggtattttaaaaaacatattccttttgcgcttcttatattatcggtgacaaactttgcctatcgagggaaattcacggagctagcaaatctcgaggagcgggggagacgagggttggagacacatcagtgagacgagctaaaaacatcgcctttgtgtaaacatgtttgtgttttcagtgttacagagtgtaagtagaacacaaaagtgtttcctaatttaattagtaaggaaaatgtgtcatttcagttagatcgttgtgcacatcatacccttgacttgttttggcctgagttttctaaagtcagtgcttgtttgtctctcttgtaaattgagacctttctgtactgctttctgaactaaatattctttagggtagttgcatatttcaagggtatttgaagatacgggtacattttggagtttaaga

SEQ ID NO: 44362 - DNA, 2317 bp, Homo sapiens
ggtgctccataaatgttttctgatcttaactttaacaattttttccatattcttttctatttctaacatttgctgattagacctggctttccactcccaacatcgctactaactagctggccactcctggacaaataaataatacaagttttctgaaattcatctattataaaaaggtgttgaaataggcctttctaatattctttccagctctaaacagcttccatgttacaaatcagggtttatagatggaattacaggtcttcgagaggagaatagcaaatgtgcttaggcgaagggggtgggtggaaaatgaacgcttatcttggcacagcagtttaacgagaggagaagcaaagttgattggtaggccaaaattttgaagaacaggagagggaggcgggggtgaggggagtggggtaacaggacttagaagaggtggtggtgagaaaaagggggtaaggcaatcgatagctaggttcacctcgatctgtcagagcccagggatgaagggatagagagtctacggagataaagtgggcagctatgctagttcctgtggatgctaataacaggagcccctcgtttcttcctgatcctggaattattctacaaggagaggaaggtgctatgaaaataaatgatgcctcacaggcgacaggtgtcccagcgtcccgagacaggagcccgctgtctcccgctggaggggagactcttgcaggaaagaaagtccgttctgtcgccaccggccagctgtgcccgaaaagtcccaggaagaaactctcgctcatccgcggcgagcggatcccgggcacaggggctggaggccgacccggtgagagtgcaaggtctcgcgaccaccgacgacagcagacagcgagtcgggccttcccatctgaggccagcttcagtacaggcctccaagcccgggcttgttttggccgcgacgtcacttccgatttcttctttcgccttctggctaaaaaacgttccgcagcaatgcagctgaaactttcgggttttcttttttttgtccctctctccttttttttaatatttttgtttttgccgcctttacgctccgaggcccatcctgccggagtactacacagacagggtcatttcagttgacggttctgggtcaccagagcagaggaagccccaatttcgccctccggtcacacctcctactccagatcgccccgcccacctgacccgcctctgcgccgccgggctgcgtgagtctcatgagcgtgctctggtacgtcatcttcgcgcgacgttcggttcgctgtgtgtgtcgccggctccttgagggtccatgtgatttttacgccagtgctgctgaactgtgcagggtagggagctggcacagtccgattaattgtccttgggtcgaggtgtctcgtcggaccctttggggctcagtggaggtaggtgaaggcggctcccattgagggaagcccacactcacacccggccttcctgtgttaatctggcatgctcttctggggcttcccaggctatataggagagtggccaaattctttaaccggctcaagttcccctcaattaagcttcgacctaggttcttctctgcgattacaccctttcctgtccaccgttgttagttcccggagtaatcagcaactctccaaggcaatggacacatttccatctttgcctttgcttacgaggctccctcaggtgaagtgaacctaatggagttttaaaatatttgggagataaaatcagcagatcttgttaactatttggatgttaggagtgaggaagaaaaggacacgtcaaggctgagtctaggttaatatctggtgccagtcaccagccaaaatggagtatattggagtaagcaaaggcacagaccatgtctttatttcattcaccattatagccccagtgcctagagcagtgtcctgcacattggtaggtactttaatgaacagaagagtgttcccaaagaccagtgaaatacaatcattggtcattgtatttcattaaagcaccttttaaatatatgttacacctatttatcgtggtgttactaatgtaaagttttcaggctttttggaatagatgatgagcagcacctctggaatcatttacctgataacattgaatctcttttgcaattgagtcgttctggaaaaatgttttggcttgattgcatgttatttaaaagttttatcctattctgccactttagtgttgaatttaatttcaggactgctttattacagttttctttcctactgtttaaaccttttaaagtaaatttaattttaagcttctacattag

SEQ ID NO: 44363 - DNA, 453 bp, Homo sapiens
ctggaatatgttaagcataagtactggttgccattattgtgattctgagattgtgatgcatagtacaattcctcgcaggactgggtgactaagaccagtggccaatgagaaagtggctccctagaagccattgccaagagtagctcttcagaaggcaattcaagttatgctgttatttcccaagggcagagtcagggaggagtctaacagaattacctggggagcattgtctgggattcaccctggatcggctgaatcaatatctccaggggtggggcccaggcatgagtaatgggaaaaggcttctggtgatatgtcttcccaggtctctggcctgacaatgtcactggtgctgcctagccttgggatatcaactggacaggggaattcatttaacatagatgtgtgctgagaacaatatgctgctctgtagtttttttaaatacacagaag

SEQ ID NO: 44364 - DNA, 2340 bp, Homo sapiens
cacacctttgttatggttctgtgcgtagccagtcttcaaaggaaaaacaaagcagagactcaaggtgattttataaattttattagaaactttatatttcaatactaatttccttacaaatagtcttaactataacacttactgccacagcagtctcagatgggcaattttacctttaaagctgcaataatggtcttaagtctgtatatgagagcctggctgatgaagaggcttggcttctgctcttggggctgtcatcacatctaagaggaaaactgctttggaggataaggaagtcccttcacattgctgttcattgtaaaagtggttatggttttcatacgtttttgaattaagacttgcagccacttgcgtgcataaacgtgaagggaatcgcagcttgcaaagctctcggccagggaacatgagcttcaaataagagggcaaatgctgtttttaaaaataatatttcctattgtaatagacccgggccgtattatgtcacgggtgtggtggcttttggctgggaacagcctgagcctccctcgggcctggcacaactcctttcgcgagcgggcagcccagcgcctccctcgggaggcgccaaggcgtgggggcgcccggggcgcaactggcactcctgtggcccgccaggtccgcgccagcctccgcgcctccgatctccggaggccaacggccgcagccccgcagcgggagggggctggcggagacagcgcggtaggggcagcttcaggtttcctcctggagccggtgtcgggcgcggccggcgggcgggcctcgccatgtgatgcggccgccgcgagccgggccgggaggtgggcaggcggggatccagtggcagcggggaggcgcggggggagcggggggagcgggggcggcacccgctgctggcgcagccagccgggcccgggcgcgcggccgcggctccaccccctaaaccttggcttcagcccggccgccgccaggcgttggcatcgccggggagagccttccggactccgggcggcggctggctgggggcgcgttccgaggcgccctcaggcagggcgcgggggcagagcctcgcctgggttctggaggctgcggggccatcgctccaggtaaatgctctttgggactccatcgtctgcgtttccctgcagctctgggcggaaaagtttgtccacctgagttcgcatccgcagggccactttctccagggtccccagggatgcgagggtcagcagaggtgaccggggaaccgctgcaggcgctgcggcgcgagggctgggcgccgcctcccgctccctcgggagcggcaacaagtggagagggcggcgcagcctcgtgcggcggcggcagctgcggagcgcggggtcgctcgggcgcactgagagccgggggctgggcgggtgaaagccccgccagtgtccttcgggagacagggaaataaacagcactcctgcggtggagaagggagaacgtcgagagttggtgtccgcccttcccatccatgcttcagctccgggactgagggtgcttggcagggccaggaccgcagaatgcagacggaacgcaagctcaggacacacgcactaccacttactcgtgtggaagcatctgctgtgtttcaaaaggcatttatggttaccttggttgggaaaggtggtcagaattatgtgggactccttacgcttattttatggatttgtttccccttaaatacccggggtgtatgtggtggtgccccagccttcccgtgcttaggttttccgaatgacaggccggtgtttggccaagaaagcaccatttgggtcgagggctgtatggaaactgggtgctcaggcggccctggatacccagctttggtttcccagagaccagttagatttctaagaaagaatccatctctataggcccacagcgtccccgcattggttggctgggtgggccgaggaacagtggcaacatctgtgtttgtgcggcttctcccgccttgacccctgcctgggtatccacacatctcctcacaccaggagttatagaggttcaccacggaccacaccaattgggcaaaatccaaagaaagtaagatctttaattttcgtttataaagaactgatcatttggggttccatggggcccctggctttctgaagcgttgttatcttgtgttcctaggccctgaagctgtcaggtgtaagtgaaatcctgttttcactgcaaaaacaaatcaaggacctacccttgttaggttctgtggcatctactttgtacatgacaatccaagcgtagtgatgacttctgggaaacctgggaaggtttctctagatctgtcct

SEQ ID NO: 44365 - DNA, 1744 bp, Homo sapiens
tatgcagggatactcaatcggccaccctgggtagaatgagtttgcatagaaaaggtgtatgaaagaaaggggcctcagtcatagagtgcttcagccattttgggtgcaaacaacataaatagactttttggtgtctaaatatcaccctaacttctctccttaagttagggtgcttaagttattatctgcttaagagtggacccctgcttaagcatcctagtcatgtaccagcccctggctgcactggggcagggagagggacaatgaaatcccattggcttctgtaaggacaatgggatcctacttcctgtcagtgctattcacaatgggggatttccccagaagggagatccaggtgctagcagaaaaaagggaaggatgccagacaaccagaaccccataaatgtctgctctggagaaaccaggaaggaagcatggcctgaggcactcgaggggctctcaacaccagcctcaaatggcaggtacagggagaggcctttcctctctaggagccactgagagattggcagtaggggagtgggctaggcacccagagcagcatttttagaagctgaatctttagtcgtgggcctcatggcctggagagagctggggctgaaagtctgaaagtggggggaccagtcaggagattagtgtctgtgtgcagtaaacacggaaccagaaatctggaattcaccatgagtcattagcagatggggattagaactcattgaccttggggaagtcatcagacttttcttgcctcaggtgaacacagtggcataattatgctggcccacccagtgaaatgctgccagaatgaactcagtcatctctttcatccagatacagattcatcatggtgtcaggtttagctcattgcttgtttctaccccttgtgtgtctgatcattttctagttaccactccttttttttctgaaatgaaaagtcaaggcatgtgaaaacctgacgttcacagtaatctaagcacatccttgctctgtcagggagagattctgcctccagatggtgcattcatctggtctttggcatgttctgagccaggatttagacaaaatgaaaggttgtttgaatactaatgtaaaatctcattgggcaaggaaaactgtctatttggattatgaatagaatctgtacagtggcctattcacttcaatgttaattgtcaccatttagtggagctggacagcatttagaaaatgaggaataacgccttcaacaaagctcttttcatggacagcttttacaatgtgctcaattctatggctcttgaacaaaagtccatattttctccttgggtttgtcatgctctgagcttgcacaacaactaggagtttggcctaactatggttcacaggtcaacatgtttaacctttatgtggagacttacaagagtgacagcttcttggtagtttttaatgatttttgacctgtttaatattgtgttttatcttgagaaattatttctacatatccttacattggaactgtacttcacagagacctttaacacattatctccttttatctgcataggcccatgcaagagaactcctggtatcttagtctaatttccagtggggtttgtaagaagagggttaaaattgctctgtccttaacactaagaatagaatttcattgtccctttatttgagtagctcatagtattttatacacactaattcattaaccctcaacaaagttctgtgtgtaggcagtgga

SEQ ID NO: 44366 - DNA, 2355 bp, Homo sapiens
gtgctttgcacatagtaagtgacagtacattgggttttggacatgaaagacatactttagaaatttattgctaatgaggaaattgataccttggtaggtcgtatcttgcccatgatgcttgagtgatgattgagctttgcgttgacatgaacaatacattaaacagactcatagcataagtaagattgtaaaggtgatgtctgatagattgagaacaagcttttaaagggcttaatcactttgtgtgcaaatatatcctgcgaaatacaagtgagtgtgacaggtttggcggaacattttgttagcagctagcttgtgctcctctttgtactttataaacgttaggctgcacaatttcagactgactggctctccttcctccctatccccacaaccaccattagtttgaattaatgagatcttagtgaacagttactttgttgtttcctttctaatcttcagacatctccccactgagtttaccaaataattcaaccctttcacttaaagcagcttagacctgcataactcaggtagataactgtagtctgaaacaggtctatagacactgttgtgtgttcaataataggtttatttcaaatactgtctccctacccatttccattgtgctggcattgaaggtttttacttagacttggccttatctcccagctgtttactgttcttttccagttagtataacagttgtgaaatgcaattataagcctacattcctaggttagtataaggaactgtgagtcagcatttccttccaaatgcagaaagtttcaaactaacatggcaaatagaattacctcaatagttgttgctctgtcctttgaattttcaaactgtagggggaccattcagctctataaaatcaaataaaattctgtggagctttatgtcttacatttatttggtacaatgtatttggaattcctgatccctggaggtttctctgggccatcaggtttaggctgagctgggtaggcctatttcagaccctcctggccccaattaccagttactgctgagtcattttggtcagtttaatatttagagattctgagtgatttcatttgaaataaatattcaaagtcttaaaaaatccttttatatacttaacatgtaataataataataatagttaatagttgcaactagcatttagtgtttctggtagacactaagttttttctctttttaccctatcaaatctcttaatcgtcacaacagtctttgggataggtactatgattaattctacttgacagacgaggaactggccaaggaaagtaaaatagtgaacctaaagtcatgcaattaagacatactgtaggccggggcagtggttcacacctgtaatcccaacactgggaggctgaggtgggaggattgcttgagctcaggagttcaagaccagcctgggcaacagagtgacactccatctctttaaaaaaaaaaaaaaaaggtgggtgtggtggtatgctcctgcagttccagctactcagagggctgaggtgggaggatcacttgaactggggaggtcaaggctacagtgagccttgattgtgccactgctctccagcctgggtgacagagtgagactctgtttcaaaacaaaaacaaaaccaaaaacaaaacataccatagctgagattcaatgcagcttgttcccaagcctgtattcctaactgtgaagcttttgctgtcttttagccaagcaaatcactgtctttcagaccagttgtatgttacaaaaggactttgtgctgaggctacagagaacatgggatgggatcagacaggctggatttacatctgctaagccacttctagctgctggacctcagtcaagtgccacaactttgctgagcttttctttcctcatatgtaaagtgaggacaggaacatgcgaggtccccttatctgaggatagcaggtatgatattgtgaaacatacacggtattttgacttcattctttctcctgtttcctggcatacaatgcctaaactccttagaatctcccaaatgatgtattttttatgctaatgaggtgactggtggctggcagcccctaggtagtttcaggataggcactggtcacaggaaagactaagggaagattagaggattgggattttcagctccaccccccaacctctggggagaagagaggggctgaagactaaactgatcacaaatggccaatgatgcaatgagtcatgcttatgtaatgaagcttccttaaaaacctaaaaggactgggttcttggaactactggatggcagaacacgtggaggttcctggagggtggcacacccaggggagggtagggaagctccttgc

SEQ ID NO: 44367 - DNA, 1342 bp, Homo sapiens
atatagagggtggcatttatatagtgaaaagtgacagcacatcaaggacttaagcagttgtaacttgcctagcaaatacaaatttgttttattatcaaacttggtgtgaaaggaggcacagcatggtttagccatgtggctctgcaagtgagcatggaactcagtgctctactgtgaaagaggaattaacttggggaaaatccaaatgagaatataaaattttaaaatatatttcagtttgaagtttcctggttttattgagtatatatttgctccagcatatttttttctacaattagtctatgaaattctatagggcttttagaaggattaggactgagggtgagtactgtggtgactttattttttttcaaggagtgaaaagtggttgctctgaaaaacaaaattaattgctgttcaaatggtttttaaatttctgtactgaaaaatggcaaatggtagagtaatgaataatgaaatacaagttattggctataaagtgaaatgtaaataacattgtctagcccttgacatttcaccttttgctgagatcatagtataatccaaatttgagggaggcctttgatacagctggtttcttcttgactgaaaagtgcaaagcgttggcatctgggtccttcgtgaagctgtgtgattctggactttggactgtagtccactgtagcctgccttctcactgtgtaaatacataactacatgggctcccgtgagcttgccacacgccacaggctatgcctaattctacaaagcctgaaggaaaaatactgtgaaaaatacttatagcttgacaactagggaaaaaggctcactttttaggtgcagatcttcaaaatgtacccttatcaagttaaaaaaaaaagggggggagttagcatgtaccctatttaatgtatttatttatagtcatttataaatcatattactgtaacaatgtatatatattttgactagggacagggtctggctctgttgctcagactgaagggcagtggtgcagtggcacgatcatacctcactgtagcctacaactcctgggtttgggagatcctcctgcctcagcctcctgagtagctaggactacaggcatgcaccaccgtgcccggttaatttcaaaattatttttgtagagatagggtcttgctatgttgcccaggctgatctcaaactccatgacatgttctctttggaagattaaataaaaaaagttagaaatctctttctccaaaaatttacagaatgccatgtgagagcttttgtaggtagcaaactttaaatgatttttttgcaacaaaagcaatggaaacatggacagatactcttt

SEQ ID NO: 44368 - DNA, 1339 bp, Homo sapiens
tcaagtgttggaaattgctttgtaaaaagggtttaaattatgaaatattggaatcatagagaatagtacagcaagtaatataacaaagccctcttttaacttatcacctatagttaagacaagtcgaaaggttaatgtttttccttctcgtccagaaagctaaagaatgttgtcagccacagagagatgttgtggcaccctgtactaaatacacggtactgaatgttctggccaaagagaaaacgtttctcattggagaaccctgatgagatcagccattgagagtgctgccaaacgactccaggttgagtaggttctgcaaatcatgttgctttctgtggctgctctttccaacatatatcttgtgttccaaaggagcagttttggtgcaggatagttgaccataggtgtgtgaacttgccccaagaaacaaaggaagactacggtgctggcattaaaatgtgagctttatagcagttcaagggacaatcaagaaaataaataacaaagaaaagcagaaaatggcagaaagccctggatatgataagaggcctcataaatatcactgcagtctgaagggactgacccacagttgtggatagctagaggcaattcttggcttcaagggatttcaagaacctgtaaggattgccagtgtgtgtagctgcatcgctgtgaggacttggctgtgagagtttaagagactgcctggctcagcctcctgacaagctgtgtgatcttaggcaagttatttaagtgctccctgcctcagtttcctcatttgtcaaatgaggattataatagacacctacctcaaaggactgttgtgggattaaactgatcaactgaaagctgttagaactgagattgacaggttggctaggtgatgatatgtgttgctctaatcatgaggatgaccatgtatagtgctgattttatttttaagaacatatcctctgggctaaaggaatgctgccttagggggagctgcagtatttactctatctcctgtgaaacagagtgaaacattcatgtttgctggctggatcttgccccaaggacaatgctaaataaatattgaacaattctcattctttagattttctgtttctaaaagtcatttagatggccatacttttgtttgtattcttcatcacaacatcaccctttatttaaatacacagaatgtgttagatttctcaagtttatttagtcaccgatcacatttcaggcgggcagcttcttttgatattatggaggcagatacatatctttcctcgataaggtgggtagtaagtagctaattttactcaaattgtatagactatttttgttagtg

SEQ ID NO: 44369 - DNA, 2717 bp, Homo sapiens
ctaggttcaaatccttcatgttccatatactacttaagtgagcctaagcaattgcataattatgtcaaggcttagtttctgcccctataaaataaggatagtaatagtacatacatcatagaatggctgtcaggattaaatgagataacgcatataaagtgctgaataaaggttagctctttatagaaacaagaaaggtaaaatccttatcatagtcactgacactgagtaagaatgaaagaagaaatgttggtgtggtggttcatttctttttttcattcatggataatcgttgtccatctgtattcctggttgacttttttccaacctccccttcctccctccagatatggcagcatcttttatactgatttccggtttggtttatcccatttaccttcctcttctagtctcaccagaatatcccttgttgattgtgccttacaggtgaaggaaaggatgaaatcatccattgaagctgtagctcatacccaaagagtgtaatatttctaatatttctcaatccgggactttggacacaagacactggcttccagtgcaagggcactgaatggaccctgcctggctgtaggcgaatggccagtttcctggttgtctttgaaggcagacttccaatgcagacttcaaagggccatctgcgaggcatgatgagtccacactttttctgcttgtcaataataaaattagactgcaatgtattttcatttgtctcccaaacagaacagggtccctggagagtcaagtgggagggcgtctgagaattctagctcatctggggtataaggggagatcttgcagaagagtgcctgcacacagttggctatcagcaaatatctgttgagtgaaatgaatggtggacttgaatcatagccttgaagcaacattaacaaatgaaagaaaaatcgataaaggctggaaaggaggaggtatgccataattgctacttacaacacctaatgaccgcctgctgcccaaagcatgggattacagcacatttgtcttaatagcacatctgatgcaattacagtgcacggtaagcaggcagctagttccttacaattatgcctttaaattgtgaccacaggaaaattgttttcagacataccacatatctatttagtgactgtttattgtagtttttttgtattaaaaagatcagacaaatgtgtaaaactgcttagtccccccaatactggcttttatagttcttgacagccctgtcccatttgttattttcattacagccccctggcaatcccaggtagtaggctgggcagttatcatgtccgttttacagatcaagcaacttgaaacttgagaattaaatggctttccatttcattctagctgttagctggaggcttgctatgtgttcaaatccagagctttgaatccttggtctccccatctttgtaccatacagtgttgtatctggattcttaatatcttatactggtggctatatgcataatttagtttggaaatatcctcagaatgtgaaggtcaaaaattgagttgccatcttgaaattctgatgaagactttttaaagttgcaactgatttagtattcgttccacaagctaaaataaagtatatcttgccaatatgagatgcaaaatccaggaagtacattccagtgttatacagcactatgtgaattttctggaatgaatgtgtgtgtgatgggtgttttcccaaattattttcaggtgattttcagccggaggtggttgtaatatgagtgtctcgactgtgctgaagcagaaaacaagttttagggaggaaaaacctgccattatgcttgtttcagtcctcctcctctaccttttgggcttatgatccagccatgccaaccatgttggtcttgcgctctgtggaatgtcctgatttcatgtctttcttatgagtgtgtttgtatttgcagttcctatcctggactcaccaacctcagatctcctgtttacaaaaggctgatttgtttatctacatgccagagctctgagtaggctgtgtaaatggaagatgctctaaggcacaacccttttctcattcttattgagaatcctgaaaacatcttaaagattgtgtatgatacccatgccaaattctctcttctactctctatgtaaatttttaataatttttttcattgtactttttgttcatcatttttggcattttataaatatctgtaaattttcatatcatgatacatgatgtaggttgaattaatttaacatgcagatttgttttcttgtagtccagacagtttccttacttctattcacattctttgtgtctagaactacaaacaatgaagtaagcctagagctgtagttcatcacatagtgatttcatgggccagatatttatagacagtccctgatttatgatggtttgatttatgattttgattttatcattgtgtgaaatgtgatggtgtgaaagcaatatacattcagtagaaagtgtacttcaaattttgaattttgaccttttcctgggctaggccatatgcagtatgatactcttgtgatgctggacagtaacggtgagccacggctcccagtcagccagccacacaatcacaagagtaatcagtcaatactccacagtgcattgtgtggccagtggtttttggatattgtgttttgtgtttggccatcccatcatatctacaaaacacctattttca

SEQ ID NO: 44370 - DNA, 1358 bp, Homo sapiens
ccttcctaaatctcctcccaggtactctctatttcttcaaggctaatttggaccccagccctatctcttgagttacttagaggtgaatagagcataatgaagctaatggggtgtttgaagatacaggctgagctatcagcagaggctgagtttgggcacctggatgtctgtgaagacctctggggctgacaagtgagaggcagatgagcacgaaccactccagttggtttcctctggttctgtgaagctgaggcatctcacacacctggaaggcacacatgggcaggacagtcttagaagttgcaaggggtgaggtgttgctgatggtagtgactgagggctcaagctgatgtgaaatcaggaaaagctaaatcaatgctcagagtgagattaatggagaaggtgggtaacccacggggtcaccgtgagcctacacgtgcatggggctccctggaggctgagggagtgtggttggtatgctgtgccaacacacgacagagcagttacaaccattcggaaatcatgctgtgtagagcagagcaaggaggaagcacccttggtgttggttgatggtgttgctagtagcttggccacatgccagaggtggtttccaggatcttgctgcatgtggccctactgaaattggaacagaaatttagacccacactaagcaatatacacgtccttaatatttttgctatttaaggtaagagtaatgatttacttacagaagaggggaagaggaaggcaaaaagagagcaaacatctctgtatagatggctgttgtgggccactgatgtcagggccattgctgttactcacgcacacaggatgtctcagctacaaattgcatcatgctcctgggaatgttagctttgaagaatgtttgctaagatgaattgctgggggagggaggtaggctactaaaagtattaaacactgagacgatcttaatttcaggttttaaaaactcactctagtttcaaacttgtaaacttgtgagcaagaagcatgtgctacggaaattgtagtagtctgacctcgtctgagtgttttgtcagtaacatcattaagtctgtgaaggatttgagaaagataaatgagcacaactttagtccagtgatttatgaaaaggaccatgatgagtgtttgttgtgctagcattttctttttggttcatttaaactttttgaattaataaagtcccctgagtttttgcaaaggaaattataacagattttcaaagaacctgagagagaaggggacagcaagctgtgagcaatagtcagatggtcagacacagtctggaataggaaatgggctctccctggaggccacttcaacactcttttgttatt

SEQ ID NO: 44371 - DNA, 1219 bp, Homo sapiens
cactttcattctgagggtagtttttctttctttcttctgggtaacactaagaccattggtgaaaaggactttctataaacttcagaacttggtgaaggtccctttgaatgaggaaatttgggagattgtatatgcagcagctgggctttgctctctgtcaggaccgtgtttgcgttctggttcaaccacttaataacctgggcaggttaatcactttccctgggccttagctttcttgtctacaaaacaaatatagtaatgactcatgcagttatggagagtaagtttggcagatggttaaaaacaattctgtatgctcttgggtaaaacgtttccagttaatacatttatacatatattatcagatatggtcgacttactgataacctaccattttgcataaaattacacagctttacttaagaggcacattttaaaaatatgactttttcagattcttattttaggtctaaggatggttattcttaaaaatctagaaattacagatagtaaagagttgaaaataaaaactgcttatattttgtcacctagaaatagcagttgacatcttagtttatcttttaggtctttgagtcttgagtatcttgaaagttgttgtactcttaaacaaaatgagataatgtatctactgttctgtgaatgttttctcagcaagactcagcaaactgccaggggtgaataggacagggccaggaagtgggcgaacatacctaggtacaagtcacactgtaacacattaatgaaacttcttaatggaaaaataccagacattgctcaaataccattttctttggttcaaaataggatacttggtaaccctaattattacataaaggactttgaactacatagcagagtgtctgcagagagccaccattgattagctgtgtgcccttgggaagttacttaaatagcactgcagtttcctcatctgtcaaatggaattgttttggggatgaaatgtgttaataaatattaatcatacagtgcctggttcagagtaagcaccatagttatgttagctacaatagtagtagtgtctggtataattacccagtgtgtagcaggtgttccagagatgctgactgtgatagcagttcatattttacatctaattcctactttttaatgtttttcttcctgatatcttcttcccagtacctttactttgcatatctgcctgatcatcccattattt

SEQ ID NO: 44372 - DNA, 451 bp, Homo sapiens
gcctcccaggctcaagcgattctcctgcctcagcctcctgagtcgctgggactataggcacatgccacaacacccagctatatgtgagattttaatgctgtttcatttgatgctgacatcaaatgtatttaactatttgtttttgaacatttaattttttcctaattttttaaacaaataatttggcaatgagcattcctttgcacatatcattgtccacatatttggtgattgcctaagattaaattctagaatcagtatgagtaggtcaaagtgtgtatttgatttcctcttttacccacaactttttttagaagtaatttcaaaatttacagttactttttggcggggggagagggtggtttaaactttgcttattcatattaaggtttttacatggagcaataccaatatgatacatacagtctctgctgttttggttaaataatct

SEQ ID NO: 44373 - DNA, 863 bp, Homo sapiens
ggaagaggctgttcggatgtggatcccgggatccagggtgtggtaaccgacttggccgtctctgatgcaggggagaaggtattgtgaactgatttgttagtaaacggcagcggttactgtgtataataaaatagcctcaggttctggtctgtcacggcagtcagtggggcaaaggtgcttttctgaattgttctcaattgatttaaatattcatatttaaactttctaacttatttcttcttcaaatgtgcttgcactgcctgtgtcatgtaggtgtaaacaaagcaacgattgaaaagttattaaaaagattaaaaactctcctgtgtatatgtgtgtctgtgctctctgacttctggtctttctgccctgcaaacctttgcttctcacccactatgtctggcagctctggcacccgggggcccttttgcaaccagatggcgccaaagtaattgaaacaccttttactttggaatattcttgcttctttcaccttccttgaccctcctctccttgcagagttgatttcctgtcaccacccacatttcacctactttttttgtggttaatttttaattaatctgaccagtttttgcttggggcacagcgattcccaaagggaatcctcttttttgacttactgctatagacatagatattaactctctctttaagaattaaatacataaaacttcctattaatgtctactgaaagtgagatgtcagaaatagggaaggaataaaatatgattctgggaggtggctagttggcctcttcctgcttgtcagggctccagagtttagctttatctaaaattgaattaggtacattaataggtgccaatatgtgtcaatgtgaaaaa

SEQ ID NO: 44374 - DNA, 424 bp, Homo sapiens
tattgcttgctcttggtaatctatatcatgacaaaaatataaagtactgggctcaagggcttaattttcatctttctcatcgacaagtggagatgattgactttagccttttgcagattttatacaaggaaaaggaaagatgacattcgcttgtagagcctggtgagccaggagtgcttactgccaacttcctgattgcatatttctctgggggcaggttggctatgtgagccaactgggccagggccatcccgcctcagcacacagagcctaagacacagcaggagagcaaaaccagcaggtgggtggattcagaggcagccagccagccatgcgggtgtctgttcatctctaccctgggttccagtttaatttggacaagctgctgaagtgtgggagtccacatggtgtgaatgctccagag

SEQ ID NO: 44375 - DNA, 1326 bp, Homo sapiens
ttctgagaatcagatcaaatttaggaaaatcagctaagacagacatattactattgttattattataacttacaacagcaataataataatgaacagtgaccctggaattaaaaatccaggtctctctgtttgtaaagttcatgcttttcccaccagactacactttcttctttagagaaaagaggtcagacatcccccagcctgtcttggaaatatcatatttagactgttacatgaattaaatcattccttatttcttacttaaacaaagcttctccagctcaacagatttgtcagttaaatgggagctcgccaaaagaacaaagtgtactgttttccttttaacatctcaatgccagacatgattccatgtctttcacccaccagggactttccggaacatcatctcataagacagccaatgagaattcaatataaatcactgtaattagtattcaaatgataggtgtttgtcacaagtccattatcagaaaccaaatattcattaggcaatagacatgacctttagagcttctaaacatttgtgaccacggctcaagatgctccccatctgccaatgctcacagaggcagctcataggagagagaaaattctgtaatctttaaaaatagccaggaaatgtgattcccagacagaaagatttccaggtcatggtgacacaaataatacactatgtgtatacaggatgaggatgaactatagaaggagatagaaaagctgtggaatattgtaaggatttgggtgatgatagaaataacctaagtttgagagatcatccttctctgaaggctcctccacccaccttcctcaacatttttcctacgaactgtcttcttttctcccagtggtgcagaaagcagtgaattacaaagtcagtgttctggggaagctaccaacttgggagaagggttccattatccaaataatcgaaaattatcatagctccagggcataacctcttaacagatgaatcatggacaggaacctggctctgggtatgttgacagcaaggtgtaaggaagaacatacgggcttcaaagcagaaaaacccaggttcaggttctgactctgctactttctagctgtgaacccttgaacacatcactcggcctctgtgactcttctgtagtaaaatgagggtagtgacacctattataaaggttattctgagaattggatcaaatttaggaaaatcatctggcacagatatagtatatctttaatcaacataagagctattgttgccttggcctctaagtacataactcaaacagagctaccatatgagtaggctccatgggaaa

SEQ ID NO: 44376 - DNA, 1833 bp, Homo sapiens
atattagtcctcaacgtgaagacaagctgatctcatcaccacctctggtcacctatatttctcttattgcagctaatcaatatggcccactatagtgggaataattatgattacataactatgtatctgaaattttgccaggttagaatctgctcagcctttccccaaatccatatctcccaattttgcgaggcatgtggtccacaagaaatcactgctcttccaagaattggtatagagacagtcaaaggtcaccaagggtcaccaagtcatagggcagttctcaaacttttccaccaaaatctctcaagggcagagggagccaatacatcacttgaagggtgagcccaaatgccttcaacaagtgaatggcttcttcaaagtctcatgcttgtgataatctttcatttttgcccataagtccacatatttcaatataaaaataatcgtttttattacttatgtacttagagttgaagctttaagaatgcctccatgaatctagtatttcaagtgccaccttacattctgagggtagaaatatggaatctaatgtcctcagttcttaaaaatcagagcaaagggtaggagagagagaaaatggatgaaaagaagccgtctggtcaactgaatgacagagctaaatttattgcaaattgataataagaacaaaccctagcctgctctattttaaagaagactgtgcaaatgtgtgtgcattgtctcccagttacacgggcagtataagcaccatttcacagcaaggatcacttgtaacagagctactgaatggctcatttccctgcaaccagggggctgactcatgggaatgtttctgcactgacccagcctggaaatccccacagaaccttccctgtctctcgttccctcctcagcagtgaggtggggagatgagcctcctcccagggttctcaggcaccatgtctcagctgcccttagcttgacaggccagtcttccccctgattggagtcttcatagggaatgggccccagagtgtagtagaagtggctgccatggtgaggtcctgttacacacgcttcaggctgttgccaccaggccttatctggccatctgtgcatatctgtgaggacagttgccatggcaccagcctgtgggcagtgagagaggtgctggaagggaattcagagcctgaataaccctggggtgagtaacagaaagcgaggaggcagtgcagggaggggtaaggaaggtgctagaagttctgtgagattatgtcagagatagtgctgctccttaaagctccctcagaaagagccacaagtctccttccctcaccagacctccttgggccatcatggctgccttgggctctcacctggggccacatgtttacccttgtctggcacaagggcatttgccatggcctccaagcctgtcttcccctctggcctcaccactataccacccatcacatcttctcctttctgctttcaaaacctactctaggaatattctctagagatcctggaatattccctgacaccctcacgattgctctcatttccatacaaggataaaatagatgtgtgtacatgtgtgtaaggtgttttagttgtgagcagcaagccagacctggaaagaaaaaaatcaaaacagagtaaaacagtgaatctaaaaagaattaagtgaaaaacaatttctatgattttcaagtaaaggaggagagcatctgcatgggaggggaacctctgttccctccagaatactggggtatggaaggttgcaatatcttctgatatgaggacaaaaatccaaaaaaaggaaagagaggcaacagaaaaaggaacaga

SEQ ID NO: 44377 - DNA, 661 bp, Homo sapiens
aaaaaagtagataacctcaattgacctgggaagacctggaaggtatcgtgtggaccacttcaaacccttactgtaccattgtaggcaggcaaaatgactcactagaaatcaccctataagtccgccaagtgctcagggcatctgcccatcaaatctgtattcatttcacccatactcttattctcaggacaagcaggtggtgtttgtttttcaaaaattcaacacaaatatcagccacaaaaattacctgaacgaagaggaatccaactgcttactttgtttgaatcgaagctctctttcagagtgcttggtacctggaggtcacatacttcctatgtgaagtaaaggatcccaagacaaaaagtgttattcaatatgtgtggatgaattgcaaaatctcggttacctggcacaactacaaggagttgccacagtcagcaagcttattgggtaacttttgcaaatactcatttgactcattaagcatgttttcttttgtatattagtgtgcaaaagtcacaggaaaaaattacttagtaggagtgtgtccttgagtgctgtttaaataagattttctcaccattacttggaaagaagaagacacataaatgaaaactatattaatagacaatctcctccaacaatttttgcacatcttttg

SEQ ID NO: 44378 - DNA, 696 bp, Homo sapiens
aataagagagcaaaagatactctatgtaaaaaatactcctattattctggagattccaaggattttaaggtctatgtgtcaggaaattgaacaaagaccagacatatatttcagaatgtcatagtctaccctctggttttttaacagagatctcttaagtcaaaacaatacaccactacaaaagatgctggctggcacattcctataattccatccaatcattaataattagtccagtccatcatcattatacaaaaatgtctcccaggatgaggccatcaagtttgtaagattccttatcacacatgggtagaactggcttcagaccatgaactggcttcagacatagctggattcaaaggtcaaatgaagtcaccaggatttcatctctcaactttctccagtgtgggcttcattctcagcttcatctaagagatcctaagaatgcaggtcttctgtgtcctaagccaagccccaagctcaaggtttgttgtcaggaaaccccagagccactccctgtgtgtttcatggctccctgctcccttgtgatttttttccttcctcagacagacccacagcaaccagcaatatctcctgaaaggatgatagcttcctatcatccatcctatggaaggatggaggttttgggttgtgatctcagctgttaattctctgttgtgtgtttttggacaattt

SEQ ID NO: 44379 - DNA, 1429 bp, Homo sapiens
ggaaatgaattattttaaaatgaaaatagctcaaatacattaacagaaaaatactaccagtcacattttctaagcattctttattgtatacacagttgatcatcctggactgtataagaggcacatgttcgaaaaaaaaaaaaaaaaagaagaagaacaagctgctgttttcactccagggattattttacagggaactcagcaggctcagcccttccttagcatttttttctgtttctgtcccaacagaaatgagattttagtgtttgtcttttgtgctgctaacactgagcttgccaaggtatccctgtttgatgctctacttccattgatggagcgagggaggaaagagcaagtaaatgaggaagctctgagatttctcttcccctccaaatggcagagataaatctagccagtgaacatgaaggcgccctggctcaattaaaaaccaactttgataaaatattttgtttaaagagaaaaatagtctctccagtgaaaactgtttagggcagctgtgcaggggaagcaggtgttgagtctaccctgagggcttcagaaatattaatatttaaacctctcacatttcactaaagttcacgacagcttcctaatgcctggaggaagacagagcaggaaaatcacaagccacaaagtggggaatgccttctaatttggccagagcagggcctgattgtctgtctccctgactcagcctctctgatttgctgcaagctcacaaagaccatgcattagaatttcaaagctggctccatcctccacacgctgtaaagacataacatgtcatcaaaacacagggttttccaggccgtgatttgtttgtctagactctggccattgaactctgtttattactaaacagagtttagtgtggaatgggcaacaaatcaaagggggctctgagagccctgagtgcatgcagacactcttccttctcagtttccactgctcttagaggtctatctttcccaggacccaggggctgatcactagactaacgtttcatctttttttgacctgggacatgaccctgggccatttgtaaccctcagatcccctccccatcattgtgcaagtaggcagcccttaataattatattctggcggctgcatggagaggtcatgaagaatgactaatgattaacatttgaaaatggaacatgataggaaaataccaccaatcacggcaaaaccgtctgtcagaagagcagagggcaacgacaacaaaacactattcaaagaatatcctcttccaagatgagaatgtgccattcagaagaagtcttcaggtttgtttttcaaaagacacataattatcagatacgttgttatcatttttaatgcataattgttagcctacttgttaatgaatatatatttcctactttaaaagacttgatgtagagga

SEQ ID NO: 44380 - DNA, 1179 bp, Homo sapiens
tgttggccagactggtctcgaactcctgacctcagtcaatctgcccacctctgcctcccaaagtgctgggaatacaggcgtgagccaccgtgcccagccaggaatccactactaaataataaacacctcttagtgcctctggcccaaatgcccagttaactgtggcccagtttccctgggtgttggctgagtgtttagctggggcagagagccaatcaacaaattaggggcattgatcctttttattatctttgtttttatctctcacttctgacctgcaacaacatcccattgtcagctcagattctggagcgtttaaacccttcccctgccactgagaaagcgtttttctaatgaggaagtagtgtgactgcagaacggtggtacagtaggagggatctcccccggtacccatcacgcagggacagactggctctgggttctactcctaacttctctcatcattggtactactctccacgaccatcatttcagagaaatttctctgctttggtatatacaggaatttgacctgggatttgtgtgaaatatttacattgtttttcatttgggtagatggcctcagaacaatgcagttcccaatttccttgtgctgttctcctttgcttgcaagcaggacaggagcagagaattagaggaaaggatttcactgagtggcgtacagtctttcctccaaactttccatggcaaacacagtgttgatctatacttgtgagaacctcctggggctgcatgtacttcctaatgggcctggctgccaagttgcctcttgtgggactgacctggagcctctagagcaagggtcaggagacaggatgcagggtttatgtcactgtccgaactgggagcacaggctgagctgccctacagtgggaaccgaaggctcagacattacttcacatctcagcagaatgatgcaatgatagctctgctgcaagttctgctaaacagctcaatgtttggttctccatcctcagtaatattcttgtcactgagccaatggcctcatcaaaggaactaagcaaggatcctctaacagccttttttcagttattggtaagaacagtaataattgtgggttccctataacaagcactgtgcaaaagccataaaagggaaaaatggccctgtttttccagcatcacatcttcctaaaga

SEQ ID NO: 44381 - DNA, 1986 bp, Homo sapiens
aactgtgttccagcactgtgttaagctacatctataaaagtaataataataattggtcttttcggtgcagatttaaaagagatagctccccatcacaaataagaacaacaagcagagaatagctcaaaggaattagtcatagtcccagctggtagatgtaatcatgccaaagtatgtcagagtcaggaaatgccacgaggttaagactacaaagtataaagatgactataattactcacctttaactgaatagtataattgaatcacataattcatttccattatctgagttcccggcttaggctctttgagtaccacgaatcaggaatgactatgctccacttcacccttcgctagtcaaagactgccaggaggcccggggttgtggtattcaacgttacagacgtaaggccctcctgcccacccagcactccaaatatttcatgacatatgaaggctctgacattgcaaaccggactacgacaagcctttgacttctccgggttgtgaggagttttagaaaataactgagaagcaacttttttgaggatgatgtattaagcagagtcctgtaataggaagaacacagtatttggcaataggaaatctggatttgagtctccattcacacctaactggttttggactttagcaaggccacagcctctcagactcctgtctgaagtagcttgtcttgcaggtcactcatgaggattacatgagacgctacatgtgaaggcacttacggtgggtcttagtgtttacagaaggaaaaggtaatcattaacacacgtattccaccttccatgctaagtgtacgctaataaccgtggtttttctgagcaacagatcatattaaattgaaaaattaaattcagccgggcatggtagcgcatgcttgtattcccagtgctttgaaaggccaaggcgggaggatcactttaggccaggagttggagaccagcctggacaacacagcaagacccccatctctactaaaataaaaatattagcaaggcacagcggcacatacctgtagtcccagctacttgggaggctgaggcaggagaatcacttgtgcccaggagtttgaggatgcagtgaactatgtttatacccctgcactccagcctgggaggcagagcaagactgtctccaaaaaaaaaataataataatttcaaaatatactttattgtaacaattatttcaggcaaagcaatcttcctgattttctttaaaaaacattgccctttacgagaaatggtttagtcattttgcttcatacaatctgcttttaatctttctctcatattccgttgggccaaacagaaactgaaagaagttaggcaagcagaggaaggctaggccagattcttgcattgtttcagttccacagagagctctgagaatgacacagatttaagatacagggggtgggaatgaaggaaagcaaggaagggagggtatttccaactctgagaaaatatccctagccaggaaacaaagcctcaggcctcagattccagaaaggcaccagcttggtgacagcccgcgcccactggcagcccagccctcacctgcactgctttttcacaagagcccagttggaaagcccacgggttgggccatagaacttggtgcattttgctgcagctttgtgttttggagggcaatatcattcgtggcctggagggcagtatcaacatcagaagagcgtgtttacttaggtgtggcaaggctggtttcatgtattagattaggaggcaatttgcttaccctgtcaaccactctagccatctctttgttttggtgtttgtgtgccttaatgttttgtgcccattggtttgtgtggctgaagggggataagttgcagtgcaggtgcgtaagagcggtctctcaatagattatttcagataatctacagtcatcccttggtatctgaggaagattggttccaggactccccacagataccaaaactcaca

SEQ ID NO: 44382 - DNA, 1224 bp, Homo sapiens
aaaccttggaaactgtcaggctatcagtcgaattctcatgaaacacatactctgcctctagctggaactaggtgctatgggaaaaggggcatttccaaaaaaatgcataagacaaagtcactatcttgagtagatcaaaatctctttggtgattgcaaaacacacttcattttaaaaaaacaaagagcaaagccctatggtcagaggtccatcatggtctaaatccagaatatattatatctggaatatatatacctagaatatagacacctaggtccaagagagcagaaaggcttcccggagagggtggagcctaaactggacttattttatgtttccctctgactactgttgtcttcaaagaacactgtcttctaccccacctccaccttaatccactagaatctgtttctcaaatattgtcttagcaacccgtttactgattaacactgacaagccaaacaggccagcatcaatgctgccgccgaactctgacctctggctctgggctgcttttctttttttttttttttttcattttgagatggagtttcgctcttgttgcccaggttggagttcaatggcacaatctcggctcactgcaacctctgcctcccaggttcaagcgattctcctgcctcagcctcccaagtagctggaattacaggcatgcaccaccacacccggctaatgtttgtattattagtagagatggggtttcaccatgttggccaggctggtctcgaactcctgacctcgtgatccacctgcccaagcctcccaatgtgctggaattacagacgtgagccaccgcgcccagcctctgggctgcttttctaacatcaaagagtgtcaaggtcagagggactttagaggtcacccagtccaaattcccttcccctccttaggaaagagacatctgggaacaagttctgcagactccctagaagagtgaacctagtggctgtggaagtctggccaagaaaatcagcctcaaagaagcagaagctgttaggacacaaaacacacctgaacagtctcactggtgtgagtaaacgcaatcacctgggagacgcaggcatcatcacacccaattgtgtaattatagccacacattgaattaaccctcaatccaaccccaaatcaccagaccaaccctgttgtagttatcatgcctaaatctccaacttggtgtgaaagttagacagtttgtacccaagcgat

SEQ ID NO: 44383 - DNA, 1705 bp, Homo sapiens
gcaagctttgtatctccccgtcacatctgtgctttctctgcgtgatgacgagtgattctaacatagccttcctttgccctcagagtccccacagagcaatgtaaaggaattgggtaattctcttatgtagggtaagcaacatataatttcagaaatgaaatgggagtctctttttaaaaggcaatgcaattgcctattaactttctttaattacaacacatcattacattattttgtaattacatattttctaagccatctgttttgtctgcttgacagagagccctccaagggcaaggattgcttgtgtcttatcttcatatccccaatggcacagagacggacttgaagtaggcagtcagtaagtatttgttaaatgagtgaatgaaaaatggaatgaatgcattcaggatttgaatccctatcttctcctggacacagtgatctggtcaatccaagaaccatcttaacagtatcttttggtcaaactagttgctatgacttgtctgcacaacagtgtaacaggaaacaactgacatatctctgtcttagaaatctgctctgccctatattctctgaatagtttgactaaaacgtattgcccattcaattttggagctgttccaggtttagattttcttttatactttgatatttaagtttcctactttccaaaatactaaatacttcatttttctgatgatgatgactgcttttaaatttacatttctcccctgttcatcttctctgccacttttaaaacacactaatcctttctgtctatattttctgatattgttccagttaaatttcttctttggaaaataaaaatatcttttttgtttcctttatttctttcctgtaatttgttcccaaggcctcgagtctaaaagctgtctttgacccttgaacttatgctgagttcccatagccacttcctcagctggcctgcctggcgctatctctaaaacattcctagaattgctccttgctgagaccgaaacccatgtgctcaccttaatctcaacttatcttgacttccaatttttccatatatggtcctcatacctccctattgtctgaaggtccacagaggaaatctgttccacatcaagaagtatatatatatatacatatatattactttcttggttgttctcttctcctctggcattttggaactttcctgggctaacttctatcctcaaatctgatattggtcttcaaattatttcatttgagccagtgatcacatgtagaagcttgtgttttattttgttttgtttttccactggctctgctactcacaggataaaaagttggagacaaggtattgaacttgactcagtgagtagaaagcagggatttaaaatacttggcatatgtcctgctttggagtgcagctctaagaatgaatgagtctaaaaccacagcaaagaatttattattatagatctctattagcagtactatcactttactgatgatggtaatggagctcataataatataaagaaacgcattagcaaacatggaatctcagaaagactctattacatagtctttaagaattacctgggctgggctcagtggctcacacctatattctcagcactttgggaggctaagatgggaggattgcttgaggccaggagttcaagaccagcccggggaacatagaaagaccctatttgtacaataataa

SEQ ID NO: 44384 - DNA, 1175 bp, Homo sapiens
ctttgggaagggttccaaatgtctgctattctcatagtagaggaaaccaccaaagtatatttccaacaacctcaagcacgaaaagccaagtccaatcttcttcaactcagtgccagagaaataatatgaatacacacacacacacacacgtatgtgaaataaaaacaataaaaatgttaaagaagaaagaaaaataataaagcttttagtagttatagttccaactccaccactacttcgttttgtgccaacagttctttggtagatcttactaattctttagtagacttcacactggaaaattcattcattaaacaaatatttattcagcacctagggcataccaggctcctgttcttggtactggggacatgatttaaaaaaagatagattaagagctctgctctctttgagctcagagtccagcaggaagaaaggtttaaaaattaagtattgggccaggtgtggtggcatgtgcctgtggtcccagctactccagaggctgaagtggaaggaccccttgagtccaggaggtcgagggtacaatgagccatgattgagccactgcactccagcctgggcaacagagcaagagcccgtctaaataagtaaataaaataagtactaattacaagtcctaggaagaagaagaacagggtgctgtgaaaagtgtaaaggtctatcctggtttgggagtcaaggaaagcatgaatgagaaagtgacaatgcataatttgacctaaggatgagtaggcactagccaggagaaagggagaagggcaaagccaggcctttctccaatcaagcaatgcaaaaggagtttctaaaactattgtctggtaatgcctttctcctcccatccttgaagatcctcagactagtttgctcattatagctaagatctctttaatttttctagctgtaacttctgatgttactgatagctgtaggcataattttaagaggacaggaaatatcagatttgatgaaattgggcccttaggaagacaggcaataatgagtttctagaaattaattctcagaatggtccaggagtggcttgagaatccagtctgtgcaggtatccaggagtctggcttactgacacaacatggggtaaatggcggctcactggtggttggtaaacagaaccatctcaggcaaccaaaaaggat

SEQ ID NO: 44385 - DNA, 693 bp, Homo sapiens
tcccctatcaattgacccaagtctgagttgggacagatcacaggagattaaagatcaaaccactcatttgacagagaagcaacctaaaactcaggaaggtctagaacttaaaactagggccagaatacacatgtggcttctctcctctttctgcctcaatttccttaccttgttccaaggattccagccagcctgcccattgtcattttttatgtaccaccaccctggtagcaatttttatggctcttctgtgcaaatatagtcagttctggactaacacccaactaagtgtgctgttaattgatgctttcgcctaggaggttctttaaacctgctttagaggtgagtcatgcattcatatctcaaatgaaataaccactttcagagcatttgtttattcaagattactgagatgccagcaaggctacaaaaaaccagtttggtgtgagacactattagcccagttgctccccagaggaggtgtctgattgttcctgctgctttgaaggagtttcattccaggaaagcatgacataactcagaactctgataactgtacgaaggctggaagagataactgaagaagtaaaaaaaatagcaagctggaggccaagtgcggtggctcacgcctgtaatcccagcactttgggaggctgagatgggtggatcacttgaggtcaggagttcaagacc

SEQ ID NO: 44386 - DNA, 3141 bp, Homo sapiens
gtggataaattcagtgtttcatctccaggcccaccaattcctatcctttgtaactaataatgttaacacgacagatcaagaaactagtttttcagaaagcagttttcattcattctctatagacatttccgccgcagtgaacatgcccgcactcagggtgtctgtgcatggccccaactttcctccaagccggggaggatgcaacgtgggccaaccatcccgcgcgctcggccctggaggctgcggggagcgacgcagcgcgacattcacccccaggaaagcgctgctttccgcagaggagagaggctgactgtatccttagctcggctcctcgcttccccagcggctcgccccagacattgcaccgcggaggggaggccggtcgacctctccggcgatgcccggcttctgcctgctgtgggagggcagcggcgggcaccgtgatctccgcaccgagaagagctccccttgccctctagtcgaagctcccgagtgctcggagcacgctcacccctcgcgaacacacccctgcagccgaagcagcccctgaagcccgcagcgcctgcaacaggtccggggcagtgggggaaacttacagcagtggcgactggccgcaacgcacaactgagttctagcgacggtcacgggcaaggaggcgacgaaccggtcgtctcagcccagggaagcggtggcgaatgccccggagaaaggagggccagccggggagaggactgcgccccgaacgatggctcgcggaccggctaccgatggcgttcgcctccgtctgtcgtccccacgccgcggacccggtgtccaggacccgcagagcgtctccggagcgcgtcacggtagggcagagcaagcctgccactgcaggcgccgcggaaggaggcgggctgtgcgctcgggggagggagctagaaagcgccttgtgtgccggcggccgccaggcgtctggaccgggtctccgcagcgccaccgccgcaccgcctcctctccggctgccagagcagtctgcgccccgccgccgtgcgccccgctataagtggcgcggcggggaggggagggggcgcgtatgcaaagagaccgacaccgggggagggaggaagcgcattagcgcggcctgtggtgtaggaggaggaagaggaggagaaggagtgggaggaggagaggagctagagaagagcgtgtcgggggagttaatcgggagaggaagcgggagaggggggctgcggggagtgcagagagacaaagcggacgcactgtctcagccgctggcagctgcaaccccgggaaccgagaataaaataagttttcccgggttcgagtgtctgcgcctctttgggccagcctggttaatggacagccccggatctgagggacccaccttaggggagcgcagcccggggctgtgcgcttggtgatgccagagcccgcgagatgctctaaaaagggctgcaaggggcgagctgggtatccgcaggacaggccctgggcacgcatagacagcgccttgggtaggacacccagagtggggagagatagtggcaatggacgggcaaaagtctggacagtttagggacactcgggttgagcaagccaggacgtttaagtttcttgctggcagagagccaaagagactccagccccaggcatttcctatgtgtcctccctccccactccccagtgggtgcggcacccccggctggactctgccctaagccaggcgactgcaggggcagccggggcgcagtcctgcggggcgcgcaccacgtgcttttcagccaatcgccgcggccgcttgattcaaagtgaactcctcaaagcagcagccacgccgcctcctctcctagcgattaagcctccatcaccttctcctgttttttatcgctcggtggtgttagtttggagttcagtaaagaaatggcccagcacacacacacgtttaatagtcccgcgtgtcaggagaagggaaggcgattcgaaaaataatctcgcgtggtgatcacttttacgaatcccatttatctttgcaactagaggcttgtctttccactgggagttaaaatatctgtcttttattcggtatttggagctaagtctataaatgaacgggatagatgaccggtccagcccccttgttttacaggtggggaaccgaggcccagggagatgtgaattgcctggctcgtagtcacttagcaacaatgtcccagctctgcagctcgagagtgagggccccacgacagagtttattccgtccccgggtccccgcgtccccaagcgcccgcgcttcgcctcccagcttgctttaaaacactaggcgcaggagcgatttaaactggctaaggaggccccacatggcgcttccagagtccagactgctgaaaccaagactgtcagttcttcattctaatttcattttcctttatccttgttccttcctggtatttgcgccgagaaatttcgctccttgcaaacaaagaaagacagtgccctctgaagtcctttgttagcattaactcggcagcctcaccacgaacctttcaatatatatattttttaatgcagagtctcggcttgaggctgattcacagagacagcccggatcaattcatgtcaagaaccacgtatggagagccaggggggctgcgaggttaggagagggctggcaagcagcacccaggttctgaagcaaagaccagacagatggaaactctgtagactccagagataggtgctgaaaagatgggaggcggaaatgtgtaactattgcacatatgtctttttaaaacatgtttctgtagcctgtggcaaggtgtgggggagctcatcaaggcagccaccaacgcaccttttagacacctcctagacccactctgtctgcttcctttgtgagtcaaatctacctaaaacggcacctagatgaccttgcctagaaatggactatgtacatagctcagctggttggttggggattttgccacaggaagcgacagaactagggacaggtatgtatctttaccacctagaaattgcgggatgtccttaaccaagggaacagcaaagttcagatccctttgcaaagaactttgctaagcaggcagggctgagaaaggaaagaaatccgctggccattgt

SEQ ID NO: 44387 - DNA, 1316 bp, Homo sapiens
tcaggtgatccgcccgcctcggcctcccaaagtgctggggctacaggcgtgagccaccacgtacggccagcaccgggcatttttcttactttagccatcccgtgtttgaggttgctgtctgggctctgctcctacccgagggcacccctggaggaaattctcgaggtgacctggacagggcgggctgggcgaggacgctcccggggcctggaggcggagtcgggggcgggcgcgcgcagtcatctgactcggtgactcacccgcggccgcgcttcctctgatccgggccgggcgggaagtcgggtcccgaggctccggctcggcagaccgggcggaaagcagccgagcggccatggagctgtgcgggctggggctgccccggccgcccatgctgctggcgctgctgttggcgacactgctggcggcgatgttggcgctgctgactcaggtggcgctggtggtgcaggtggcggaggcggctcgggccccgagcgtctcggccaagccggggccggcgctgtggcccctgccgctcttggtgaagatgaccccgaacctgctgcatctcgccccggagaacttctacatcagccacagccccaattccacggcgggcccctcctgcaccctgctggaggaagcgtttcgacggtgagcgctcccggcccggccgggagttgtcctgggggaggggagaggcggaccaccccggagcgctgtgcagaccctcaccaccccactgcgcagacgagaaaccgcctgggagctggcaggcgatctgcccagcgccacatggactgaacccacgctcttgcccccaccctcctactgcttcttaagggacaccttgggtgctcaggaaccctggtttgagagccggatagtaagtggaagagggagtttgctctgaggccttgttgggcaaatggcatggacggaggggacaccggagctggggaggaaagtgacagctccttatttgaaggacgtgcaaagggataagttacccgaagggcttagacaagctctcttgagggaccaggaatcccccaaagctgactgtcatttataggccagtttcgccccctcacctctcctcacatctcctggtaacagctcaaatggcagaagtcctcagtttcgagcactgcctaaaactgccctctctcctaaaatctcttccatataaaatgtgacatgtttgcatctgactacgtttctgcggtcagtggttaggcagtatccaactttgtttctcaacaccgatcatgttgcctgctctccctgcttcctcttttacagacccctagatagcg

SEQ ID NO: 44388 - DNA, 344 bp, Homo sapiens
tgtatcacaaaccttgctttgaaacagtatgctttttgcaggcagagagtttggctgttagatgcatagctgcttctttagcttctagaacagcgttcatcacatgctagtcactcatttttaaaaataaacaaatagcttcactccttcatttcctggaaggctaaactaacccacatacctttgacatactgcctcacagccctttgagttttctgttagaattttactacctagggtcaaggttctaagccagcttccaactctgatctcaaagctgccagcagctttaatttcttttttaaaaaaattttaattaaggaaaaaatacacataacataaaa

SEQ ID NO: 44389 - DNA, 1026 bp, Homo sapiens
tcctaggggaaagaataaggataaaattaatactgatttgctattttgagctgaccttaaaacaatggttttcctcaacctgcagcattagcatgggctgagggcttgtttgaaaaacatgcttaggctccaatccagacaagagaatcagaaactcttggggatggagccaaacaatctgtttaaactagctctccagttgattctaatagctacagattgagaaccacaaccctaaagttctgaaagtcagaagctgagtcagaaaggttaaataaggtatctcacccaggatacaccttggttttcctctacatctgctgaaaggtctgtagggggcaatgaactctaaaaccattagttgttttcaggatttattacagttacacattagaatcatctggaaagcttcttgaagacacgggggtggggagagaaaatgagaactggaggaactgggcagtggcatttaaaaaaaattcccagggtgtctccaatgtagcattcaactgagaatcactgagttagagcaggtctgcttaaggccaagcctacctcctctaccttagctgcttacctaaccttctcatgttctcatgtaaaggctgaatattctccacctcagtttatgcccagaccactagatatacatttaatagctgccaatgtagttggaattgttagtgtatgtaatgatttagggccaccacaatctgctttttgtttcatgaactgcgtatctgtgcgatctatattatttctacattagttaccaagtttctggcaataataagctactatcctcagaaaataattccactgcataatgactaggataagacccagtgtctatcacagcgtgcatagtctgaaagcgtcagcaataaaagcactgaagaaaaactgggtaactccttgggccacttaatgagatcacaaatggaatacagaaatatatcttcttcaaaatgctgctcaggtgatttttaaagtagcaaaaaaaaattgtagatgaatggtaaggct

SEQ ID NO: 44390 - DNA, 941 bp, Homo sapiens
tttttccttattaagccaagaatgttcaccttttcacttaaagggagcactttatggcttctctttggcacatccaaattgccagcatcactactcttgcgctctgggaccgtgattaagtaaaataaaggttacttgaacacaagcactgcagtatcacaacagtgaatctgataacccagatggctactgactcatgggtggggagtgtatacaatgtggatatgctgggcaaaggaatgactcacctcccaggtgggattaagtgggatggcatgagatttcatcacagtactcagaatggcacacaatttaaaacttatgaattatttctggaatttcccatttaattttcagaccacagttgactctgagcaactgaaacagctaaacagcaaaaccatgaataaggggaaactattgtactccctgttaagtcactgaagataaaaagaaacaacccaaacaagctttaaagtaatctctcacttagctatagataaaaagggtattattatgtttgagatttaatatctttaagtatactgaagatgtgatagtttagaaaataatttatagtgttttgaagaggattcaggagtcagaccagagctaaagactaaaacaatgttcctgagacaaatatcagactgccgaagaagctggcttccaacagctctgcagaagacagccaaaagtagttgtatcaaccattgtataattatgttgtactttgatattaacagaaactttatttcataagagtctcaatccatggatacttaatattacaaagcacattatttgttagtagtttaaagatgtgcattaagtgatgacattcttagatataaaaccctacccctccttcaaaaacaactggcattttagtactccatgagaccagtatttagctacagctgttcttttacttttaaatt

SEQ ID NO: 44391 - DNA, 1800 bp, Homo sapiens
aggtcggaggatcgcttgatcccgggaggtcgaggctgcggtgagccgagctcgtgcccctgcactccagcctgggcgactgggcgagatgccgtctcaaaatacccataaaaacaaaaacaaaaacaaaatactgcctcaaatacaagcactaagaattaatgaaagtattcttttggtacagttctttttgttcatcaactgaatcacgctgcaagctgtgaagtaattaagggaacttctgcaactgtgcagtaaaagggtaaacctgatagtgtatttaagtagacgtactttctggtagttaattacttcttgacactagggggccactaaatacaagtccactcagcatttgattcggtgcaccaaaatgcctcagaaatttctggaatcagtcctgtacctccaaaaaaccagaatgttatcttcttcttttctaacagctgcaaagccccagtagttccatttttctgtacactaagttttcattcctcagtatccttcacaatcatgcacacattacacagagtgaccggaacaaagatgagtcgacttcgccgaatgatagagaaaaacttccatactgagcgaacaccgaggggagtccggaggccctgttgtcctcttccgtggctggctgtgtccgtcgcagcctgaaaggtcagcggtacccagcgctgtgacagggtcacaggcgcgcgatgtctcacagctcggagcagtactcacctggcattaggccgcgtgccgcaggccagctctcaccgctgggctcttgaagcaggaggcgcgagccgcgccaaagtctgcaacggcctcaagtctcgacgccagcctaggcaaaaggcaatgtatctaaacgaaaagaaaataggctttctccgctctaccgcctcgggcagccacacctccacacttccggcggtgtaccggccaaatgccgcctgccagcaacttccgtcctcctagctaaaagcggaaaacagaggctcggaaccgctgcgtggttcttgctcttcactcggccgttttaaagggtgactctttcctgtcccggcctgcgtggtgtgggcttgtgggtctttgagacccgaaaattgagagcgttttcgcactccagcggctgctcctggcggctctgcggccgtcaccatggtaaggaggatgcctcggacgctcgcgacacacagcgtctgagttagtgggacctgaggactctggggcgctggggtagggggtgagcggtggtaggcggaaatgagaactgccaagagaaaaggatggtagacccgtggggtgggctctgaggagtggaaacaacttcacattcgagacacagacggtatttgccagaacacaagctttggagcaagattttactctgtcctgttttcttttttctttttgatccaccgctaagagtcctaaaaattcctgatttcaccacaagcgtggttatcagccccagagcctaatgggaatatggttgtcccttgtacagtcttagatgtcagtcccgcccccttcattttactgctgaggaaactgaaggcgtccttgccaaagaccagacagctaatgaattgcgaagccgggcttaacggcccagatctaactgccaggtcctttctctttgtgttacgtctctataatctgcgtttctttgcaaaatggcattccatacacccttcatgtgattgctgcaaagtttatgtgatagcagttggtagcagcacaccttgttggttgttacttaacattgctctctgtgctggacttggctttgtatcattttta

SEQ ID NO: 44392 - DNA, 1726 bp, Homo sapiens
ctccatcctaattccaagggagacaaaatatcaatttttagtgttccaccctggggagccaaagcaggactcataaggctgaaatgaaactcataaagttatttcaaaggtgctcaacagttggaacacaaaatacatactgaattaccacacccaggaatggatgataaatcattatcttaatatctatattctatgaacaggaaatagagaatgctacttacttgcctcgaaacatttgcaaaagcctaacaataaattaatagatatttaagagagaaagaaatagaaatgggcttgtaattgaagcttccacatgatcctactacatactgtagtacagtaaagtaatacatttgcctgtggaatatgtcagcaactctggtacttcacaacccagactactaaatactctttataaatcagcagtgtacaaagctcaggaaagaaaaaataagcacttaaattaataaatcataaaattgtgtccatttcaacactgacaatataaaatttcttacattatacctggcttctctaccacgtatctgactatacagggactttagtaaagttaacagggattggacatagtaaacctccaggatacaaccaatttttaaaaacacgagtctaactatatgttcactgttgtagatatttttaacataaaatatcacagagatttgtctcatttagaacaatgaagactgatgttttcattttaaaggaaacatgtctaactcacaacaaaagcaaaaagaaaccaaaacttggcacttaattttggcataccatttgcgaaatattctgctgagtcacaatccccatcactacccgaccaaactccctagtattttcactagacaactaagaaatataaccatgggctgccattatatagcagagtatctcagcaatttggaaaaatggcagcccctgaaccacaggctctccaattctgtgcttttgggcctctccaactctgcacttggagctatggcctcattaacctgcttgtgctactctcttgcaaactcaggtgggcttatttacccagattcagtacaattcttacctctcattggcagcaggcccatgggaagaaggtacaagagacagtagtcttatctaacttcaaagcatatttactaaataaatgaatgactgaataaaagtttgtataaataaaccaaacactggtgctaggaggaagagctgccacagatgaacaagaacatgctgctagataaaaagtaacagatgtcctttcaagaggcagatagtggggaagaccctcaaaaagaatatgctgaatggatgactgaaagtacaccgagaacggcaagtagttggatttaccaagagagttaaggtatataacggcaaatggtggtggaagtactaggaaaataaattaaggacagaacatagcaggccaagaatcccagattaaagaatttagacttcacttggtatacaagcagcaggccattaagggaccttgggcagggaagagacattcaaggctattctttaagacaaattacctgacagctacatataggttggattggtaggaagaactgaagggagacaagttgaggtgctgctatggtaagtaccttgtgcataaatcttttaatatacttatcacataacaatacataatacataataatgtggttcatttttcttcatctgtctctcctaccaggctcagacc

SEQ ID NO: 44393 - DNA, 1763 bp, Homo sapiens
gcgggggaaggtgacctgcatcaggtggttatcttcgaatccacccgatacgatacccacgccgcttcccagacgctgaaaagccagtgagatgcttcatcctttctccccaaggacagtcatgggagtcagtgtaatccagacccccgagccataaaccacccagggttcaaggcttcacctcctgaggcacaggcctcttgaaaaatggcataatggagagctgagaacacaattaggacaaaactgcaacgaccagcattccagaggagggagaatcatacaatatctgttccaaaagtagttacaggtaaaggaaggcggtcagagcatctctggaggccacctggtcgggtgaaccgagtctaaacgctgaagttccacacctccccgagtccgcgtctccccaagccaaagcaatcagctcgcacgccaagcatccaggtggggagagggcgaggggagggggcggcaagccgcagctgcgaaccggcccgcggcggaggcgagcgaagacgggcattccctcacacaaaatggtggcgccgaggcggaggccggcgcacctgggggcgccacacgccctacgggatccccgcagaccgccgccagctggacgcgagccccgggtccaggcggcccgcactggtctgcgccaggcccagcccgcaggggccgcccacagccggtggcccgcgtcgccgctcggtgtccgcgggtctggtgctggcgggggcgcggggcccggcgcggccgtctcggcctcacccagcggtccgcgccggggagagggagcgcactcacctcagacgcgccccgggagccgctggaagagcccgggaaaggaggcggagccgcgcgaatgaatggagccggcggctgctcgctggcgacctccggccggtcccaggccgcacagctcgcggctgccagggcgagtgcggctgcctcccgctcgccccggacgcccggctcctcgtcgcgggtcggccgcggcccaccgtgccctccgacgacgtgacgcactagcgccgcagcgcctccagccttcgcttccgctccgcgcccgcgcccaccgcgaatccccccgcccgccagcgcggagcggcccctcctcggagcctgggacgccgccctgcctccctccagccccggctttcaggcgccggcccggcaggtgcgggcttggccagcccgggggcgtcacgcggcccccgcctcgccacccgcgccccctctctccgccccggccgccgtcacccggcagcgcgacgcccagctcagggcaatggcctggtattaaagagtgaccttggcttagatataaaaatagatgcggttaagccgcgggggctgcaacgctgattttgcgtattcctttaatgccgaccttcgcaggattctgttcgcatagcccggtggagttctccagccccgcgtaggccctcctgaaatttacccagagtgggcgcggccatcccggcctcgggacaggggtgcagagggcacgggcgaggaccgccggcctccgccccaccactttcatcctaaacctactgccacttaggtgcatgcaagttagaatcgtgggctgctttcacagtctacagaagtcctagagcccggactttcatctggagatgtcagggaaataccacattcctgcgctgaccttttctctttcaccgtttaaccggtacagaataaccctgacccagaaagacaacagggttccatccggctttcctcccgtgcctctccca

SEQ ID NO: 44394 - DNA, 634 bp, Homo sapiens
gaatctagtatccattaaccccaaagcctttcctattgtatttcactgatcctggattgtgattaatttgcccactttgtcctgattactaccagttctataagcttcacatacaatttgtttaaaaccaaatttatcatcttacttacctccctcaccaaatgcctctgctcctgagattccaatgtcaataatggccctgctatcctttggtgttatgcttgactcttccttcttctttctctattgtttgaagttatttccacagttattgtacttctgactcctaatgcccattgctgcaggtaggcctggctttatatgccctaagctgtggtatacagagtacccaacaagtacccatatgtgggaggtcctggagctgtgcccaaagagggctcattagcagtagatagcattccaacaatactctgcgccaagaaatgagatcagaatccagggaatgaagccaaacttggctagtctgttgccaagctggaagttcttggacacggttataagcaaagggaaagaagccagtagagagggagagattgactgatgatgaaactgagagaagcagtaatggatggggcagggtcctgggggaggcgatcaaaaggatcgccgtatg

SEQ ID NO: 44395 - DNA, 1100 bp, Homo sapiens
gaaagtagaacatttctagaaattcccagtagacttgcacttttgccagaactgttgtcacagctaccttaacagcaagggaacatagggaatataaatactaagcagtggattttttttccagtggttgttttgttttttactataaggaagatggggagaatgaataagcgctaggtcaatgatagtatctacacacaaggcccttcaggatttggcccctgactctttctaaaactatcccccttctctctccttcaggccccattgctccaggcatacctgcaagtctctaaatttaccatgctgtcacaagtccatacagctctgcacacgtttgtttgtttgttttttcctggattgctgtttttctttccttccaaactagatcctagttttctttcagacttcaacagcagtgtaatttcttctcacaagtctttctggtctcctcttctcttttcctatagtttctccagtttatctctctcttaggtggcacttctcatgccacactctgataattggtttgctgggtcatgagctgctcaagagtagagaccgtatttcactcaatgctactcacaacagtgtgagtcattaggaaatgtttgctgaacaaataaatccagccctatgttcactttccttagcggctgctgtgattggaatgtgtccctcaaagtccatgtgttgagaacataatctctaatgcaacagtgttgggaggtgggccttcctaaggggtgattagatcttgaggccttctggcctcatggatggattaatgttgccatctcaggagtgggtgagtcatgatgagagtgggtttgttatataagcgagttcagctgtcttgtttgcttgctctctctagcacatgctctcttgcccttccacttcctgccaatgagatgaccagtatgaaggccctcaccaaacgcagcccctggatcttggacttcccagcccttagaatcatgaaccaaataaagttctactgtttataaattatgcagtttgtggtattctgttatagcaaaaatggactaagacagtgacctagtcacatccatcttcctcacctttactttcactca

SEQ ID NO: 44396 - DNA, 1277 bp, Homo sapiens
ttttctcatagttctggagactggaagtccaatgtcaaagtgtcagcagggttggtttcttctgtctctctccttggcttgcagatgactgccttcttgctgtgttctcatgtggcctttcctctgtatgcacacatgtcttgtgtgtctccttgtgtgtccagatgtcctcttcttataaagacacatgcactttggattagggcccacccataggacctcatcctaatttaatcaacttgtttaatttaatcatcatatcttcagtacagtcctatcctgagacactgtgggttaggattccagcatgattttctggggggaggggcacaattcagtccataaaacttagtcttctccatgtgctgattcccacaaaggacccagtgagtggcaggctccatcgggaaactcattccaagtcctggccttgccctaaagtaggggaatttggaattattgctcctttctagagtagatcagtgtaaagaggggcccatgatatgtactgaacaaccccaacccttgtgggaagccccagaggacagccaggacactggagaaggagacatggcaaatgcttcaccattatcttttaaggatctttggagtagctgagagcatcaacctccttttctacagaatattttccaaaccgagaggaaagtaaaattttcttgattctcccttcctttcctaacctcgtctatctggcactggtggaaattgcaaaagataataaggtaaacaaaacacaaagaggcagaaacatagtttgcaccatggactcttgcataagtgaaaagcgggcaaagagtgtgccttgttcatttgcagagactttgcagcctgttacgaactgaatgtttgtgtccccctatccccaaattcatatattgaagccctaaccttcaggatttagagtaacaaagtaatttaggttaaatgaggtcttaagggagggctctgattcaataggattagtgtctttataaaaagagacactaagaagagttttttctcaggctctctccattcacatacccaggaaaggccgtatgaggacacagtgagaaggtggcaggaagagacccatcaccagaaaccaaattgaccagaaccttgatcttggacttctagccgcagaatgatgagaaaataacttgctactgttttagccacccagcctatgatttttgttattggcaacctaagtaaaataagacacagctttgggatatgctttctacatagtgagtagtcaatgaatgtcaaat

SEQ ID NO: 44397 - DNA, 1299 bp, Homo sapiens
ccctagaagtaacacagccgtgctgacacgttttagtccagtgagacccagtcagatttctgacttctagaactgtatgttaatttgtattgctttaaggcactacatttgtggtcacttgttacaacggcagcaggaaatgaatacactaagatactctctactcttcctcacttaattatttatacaactggccattaaaaatcctggccagaacctttgtgtctactagggacctcgccatctagtcttttctcgcaaagcaagaggcatcggcatatcacgtctggcgtaccatgttgttattgcctcttttcataatggccttttggagcaaagagcttacacaatactgtttcatactgataagtaaagaaactttgacagatcaataccatttctgtggagtcaaacactagggggctctgcatagcctgttacttactctgagatgtaataaatacaaatcagcaatagtacaattagtagatggcatatgtccatttgtggcttgtgcttctggaaaacaaggcatggctatcaccactaggcagctccctgggtttcctgagtcagctattaccaacggaactgcttcagtgctacgggaaatgaggtgaaaaaagtcaatgactaccagtcaagctccaaaggaaatggcacagctaatgtaagttcctctgaagctgacccggtatctgctggttgacagttaatgaccctggttgggaccccattagagagtggggtaaagagcatctttgttttcagctgaacactttagaaactgccttgtggattaaaggcgtccactgactaaatgccagccagcaggataatgatttaactaaccctcctgctgaagctggtggaaacccagagcagtcatttcctggtagaaactcttaccacaaaacaaattcaactgatttctgcctgctcctctcatcctctgtggagatcagaaagagcaaaacagtttgagctggttaaaccaaagatgccttccggagggcttcaatttgccaacaccgcaggaagccaggatgagccggggtccaataaaccccatgcggctttggcgcagagtgtcaggtcacttccagattcttacactcctctgtgctctgggctatctcctctatgcactctcaggggaaagttcccctcattaattaaatgctgcattaccccttaatgagtgttatgcactggtcacattactgctaaagcagaaataaggcattactgccttaagcattggaaatcatcccagtaactggctaacgctaagcttgt

SEQ ID NO: 44398 - DNA, 1057 bp, Homo sapiens
actacaatgatatggaggagagaagacagcctgtggtttggaacataactcagtctgctattaaaatgcatagggtgtctatagctaacaacagtgtactgtatatttctaaatagctagaagagaagagttgaaatgttcccaatacaaagaaataataaatgtttgaggtgatggataccctaataccctgatttgatcattacacatcatatgcatgttcaaaatattacatatgccccataaatatctacaaatattatttatcaataaaaaatgtatgcataaaatgagcagggcatgagtataatgtactgttctggatgacttgaagaaatactgccattgaacacaaaaacacatttgctagagtgcaaaggtcagggtgagaatgagtcattgagtcctggagacctcagggccattagctgtagtcaaatatcagccctgccaatcattactaattgatgacctaggattctgctcagagtcccctactaaatgctagccatgtgtcagccatcatgctacccaagagagtcgtttggtggacgtattgagagatctgcgtgcctgagccaatgtgagaacaagatggcaaagttcacacacgtaagtgtaaaattcatcactgcactgtaggtgaactcaggtttggtcttttaaagtcattcatcaaaaaagaaaaggcaaatgcaaaggtattgtcttcataatttttcctcatcacttgagagcacagactgggaaaatgaggctccaagaatgcccaaatatgttgttagtgctacatggaatttcaaagaatagggtatggatccacttggagagatcagacatgatttaaacatctaaagaacaagtcatggcaatatagaccttatattcagggcttttcacctatatcttctttctattaactagtagtgtgctacaggggagcccagggcagctgccttttaagccgcaaatctatctgttctccttaacttctctctgggtaggggcacagagtctcagtcctcaccacacctccaattccaaggagtaatctgga

SEQ ID NO: 44399 - DNA, 1770 bp, Homo sapiens
agtcatgccctcaggttgcagaaaggggatgatggatgctggccttgcagttctctgcgcttgctggatgatacatggagcagtggtgttggcctctgagggtggctgcccagtcgttggctggagcaggggtacaaagcagcacagcacagtgttggctaaggttccgcagtaagactacctgagttccagtcccattaggcttgctaccatttagctatgagaatttacttcacttctttctgtctccatttctttatctgtaaaatgcagatgataatagcacttacctcatagggtccatcgttaggattaagtgagctaatgtgagtaaagtactcagtacctggcgtatagtaagaactaaacttcactataatatatcactccatgggctaataggtcacttttaaaaattacagttttaggccgggtgcagtgggtcacacctgtaatcctagcactctgggaggccgaggcgggtggatcacctgaggtcaggagttcaaaaccagcctggccaaaatggtgaaaccccatctctactaaaaatacaaaaaaattagctggacatggtggcatgtgcctgcagtcccagctactcaagaggctgaggcaggagaattgcttgaacccgggaggcggaggttgcagtgagccgagatcacgccactgcactccagcctgggtgacagagcgagactccatctcaaaaaaagagaaaaaaaaacaaacgtggttataaatagccatgtgctggtaaatgtttaacaaccagctctttaggaaaaaagctctgacttgtaatgtttactgattttcatggtttaaatatttccaccatgattaattacaagccaccaacgtgacagcattggatgcagagccgggaggaagtgctcacagtcagctcccaagagccagcataccacagttatgaagcccagctggtaaaatgaaagatgtgaaaaaataagaataaaatttgaaatataaaattatcaccaactatgtaaaaaaaaattgtgtgcacagaaaaaaaagaaaggaaatttactggatactgactgtagttgtattagaagagtggtaggaatgtaattaactctttaatagatatatttttgttttccttaaagtgcttatgttaattttatagtggaaaaatgagcagagttaactacatacgtacacacacacacactttatattatggaaaatttcaaacatatggactaatagtataatttaagtactcattagtggctccaaaaattatcaatgttttgccaatcttctttcatttcaattaaataaaatttctttcattgtatttatctcagagaccatgtcatttcacctgaaatagcccaatatatattttaaaaacataactaccacatcatcatcaacatttaacaaaaatcctaataattcctcaatatcatctgacacctagtccatattcaagtttccccaatggagaaagatggcttttacagtttgtttccttgaacgagggttcaaacatggcactgtgttattactttaaatctttttttattccataatggttatcctctctttctctttcatgccagcaatttcttgaagaagctgatcatttgtcctgtggaatgtcccatgttccaattttggctaattgcttccttatggttgcttgtttctctagtccccacatttcctgtggccgctggttggactaagagagtgatccaggcaagagttttcacgggtggtgccagatac

SEQ ID NO: 44400 - DNA, 1483 bp, Homo sapiens
gctgtgatgtggaccattcctttcctttcaccagtcccatgttaatatgcatgcatgcgtaggactgagccaaaaacagaactacaagggtatggaactcatggtgatcacgcccttccctagctctgggaaaaagcctgaggcacaacatccctcaccctcactatcatttattcttgcaatcattcattcaacaaatatttgtaattgaggacattccatgtgccacatcctcaccaaggacacagtggccatcaaaaccagatgggactgctcttactgggcctacgattcccatgagacaccaacacgagggtggaatttacgctcacataaacttacagctgcaacaagagctgtgaggcacaggaacaagatactgtgagaatatgtaaaggggaaatcgcctgattaggtcagggaagtctgtgagtctgtgacagaaaaggggacatctatagaaacaggagaggggaacgtgtaatgggggataagaagagcatggggggaggccctgtgacgggaaaggagcatggcacatcctgggaatgaaagtagacaagggctggaggaggcccagccatgcttaggactcattctttatggtgaaggtagtgggaagcctttgaaccaccaactttggactgcattcctgagcagttgctcaaggccaaacagtgccccagcagccaccttctgtgtctgtctgccatctatggagttatcaaggaggcagatcttcatagcatcagcatccttgaactgtgactttagtcgtggtgatggccagcttgggatcagagagaaccaggccctggcagcttcctgctctgtcctgaaagttgacttcctttggtctgttgaatcatggcatttccaggaagatcaaatatcacaagagagagatagtaattacacaatgtatttgggacaaagatcactcatacttctttgcaaataagtcagctaataatattaagagtaatttggctgggtgcaatcgttcatgtctgtaattccagcactttgagaggccaaggctggcagatagcttgagccaaggagttcaagattagcctgagcaacagagcaagacccccatttctacaaaaaaattgtaaaaaattagccaggtgtggcacgtgcctgtagtcccagctgcttggggaggttgaggcaggaggatcacttgagctgaggaggttggggctgcagtaagccaagatcacaccactgcactccagcctgggtgacagagctagaccctgtttccaaaaaagaaaaagaaaaaaaaatgaataatttcagtgtactgaattaacagaattccacagattgtaccctgctatctctgccttttctgccttatctcactgtaaattatttgcttgagaaatgtgtttatgcatagttttctggaacaaagctgcccgatggcattccacaagcatagaaaaaataatgattatggtgactcacttct

SEQ ID NO: 44401 - DNA, 1364 bp, Homo sapiens
agccaacataataaaaaacagatttctgggaggattctaaatattagaaagggtaggatgaggaaagggcaagatcccaggcagcagttggagctcctagactcttccatgtcactggcattagatgcctcaactctgcccatcttctgtgtattctattcaaattctgattagcccaatctgggtcaatgtcttctactcttggacacctggccctggccaggcttgaatgcacagccaggatgatgctgagtcagaagccagcccagtgtgtgtccactacaaagaccatgtttcagaaagatgcataagtacaggttttttgctcaaacagccttcgtagatgtccactacttgactacggtggatcctaaacaaagttaatacaatgttgggcacctcaaacttgcttcaaggaaaaaatggagaagggagcctgacttagaaaggagcaagttatttttggaggagaacagtatatttaccctatgaaatcattgaaaacaactgctagcgtatttggggtgtgcacttagcagaggcttcatttggaaagtttaataatacagagatcctttgtttgagggggtgttagcttcctttaaaaatacaatctttagaggaacaggtagctcctggatctggaaaataaagcctgaatttcccagagggccataggtgcatagttgagaactgagtttagaatttgaactatggtcatctgagggaaaagataagattatctcgtcacctttatcgaacctattgtttaatctttgacaaatatatgcatgttgataaaatcccaaccacccggaactcaggtcaggaaaaagagacatgtttttgctccaagtcagccactccattaataggaatatcatagccacatctttgaaagtaatgacaccactgttctctggagtgtgttcaggtgggtgtgctgcattctaaggagggcattgaaaactgtagggattccaggtaaagagcatcaggggaatgaagaaaagttctggaaaccatgttacacaaagaaccatatgatatagaaccagaaaccaggtggccatgtggaatcgactgcagacattctcttctgctcctgagggccaaactaaggccatcaagtggaaattatggagagtaggattttggatgaatataaacatcacttaaaaatctctgacgtagaatttgttatggataacatggtttgtgattggggaaaatgccttgataactctaatttgtgttggagagattgctggagcaggaatgttgtcagactttataagattagaggaggtcagggaaattcctatcaagaggcaaggaggggaatttgttgtgttcctgagagg

SEQ ID NO: 44402 - DNA, 997 bp, Homo sapiens
aagaactgtgcagtctgctcgccacgcctcagttaagcactcttcagctgatggcaaacttcctctgtgtatggtttctagtcacaggcagggtacaggtcacataatccctgaaggtcacctcgcaggtgggctgtcttcttgagagcttgttatgtaacaggggactttggaaccagcttttcaacaaatagctatcagtaccatgtagatatcaacccaacaagtaccatgttgaatagttctgagccaccgcctgaatgtgccccttttccctccccttgctgcctgaccccattcctcttctttctgccccacactggaccccctccatgttaccttcctgctttacttctgtgtacatcatacaggtttagaatttaaagccaatggttctgaactgaagtcctgagtctgctgctaataatgtcattaatctagtagccttctgcctcctcatctgtgaaagaggaacaagggcactgactcaaacggttactgcgatgactaaatgagctaatgcactgggcacattttggcaggaaaaccagcctggcacagggctggatgatggtaagggatcaaaagcatttgaagcagcccagtgtcattgaccagtggccattctgtaaacaaggactgggcttcagcttcagcgtgctgcatgcactcccgcacccagacaccatctccaaaggcaacagccacggatttctgcggggtagactggtacagaaaccacatcaaaggcctccacgcttctcatggtgaaggaagaatcagacaagggcccacttgtactatttttacaatttttcttcaggtttgacattttttcaaaataaaaaattgattttttaaaaaaagaatcatagggataatggggagagggcagaatgaaagagctctaagtctctgccccatattaggattcaggcaacacagttttagtagcacagttttgaatattttttaggtctagtgtcattgctgtctt

SEQ ID NO: 44403 - DNA, 868 bp, Homo sapiens
ctcctctggtctcagcacacaccattcccggggatgggaatactcccctttctcacctctcccctcccccatggctgcttagtttacacagctcccactcatccttgagcccaccttcagtctccccagcaaggcctcctgcctcagcacagatgcagtgagctgcagcacatctgcgcctcacagcagccaatgcgctgttcacattgggacagttcacagcctggttcacagccagtgctcaacacaggtggcctgaagaactcacttttcagccttgctttgctcatttttactgtctcactgctttcttcccgccttgtagcctaagaaggaaatcccctgaagctgactccgttttacctctcctatgtggtgctgtgataagccccaggtcaccaggtcatgctcccagcacccgtgggtcaaggatgaggcagaaacagcaccgtcaggtacagggccctctacctgctctctctccctctcccttcctagaaaacaaccataggtcattcaaagtcagtttgggaagcacctgtatttatggcctgcttatcttgaaggcacttggccaggtgccataaagtgctaactctgactgcccgactatgccattcaccccacctacctctgtgcaggagatgtgacatttagcaaatcagtataaactttttcccccaaagaaaagagtataaaccttctcatcccaccaccaccccgcagcaggaaactcctttcagtctccccatagaaaattcagcggccacacagttccttggctattgtttctctcctgataccagaaagagataaatcaacaacacatcttaactggtcatttctcacacaaaattggatccttaga

SEQ ID NO: 44404 - DNA, 2738 bp, Homo sapiens
gttgttcttccatttttaaagacaaaaaaaaaaaaaaaaagaaaaagaaaaaaatgaatttaaaaagtgccccaaggccaatatcgcctctctgcctgcccaacgaggggacaatacactgtttcccagactacgtgactcggaaaacttccccgtcagggaaagctgagtctttaaatttacaaaacacccactcgccccgtttacctagcaccgtttcctacgtgaagactgcaaatggactcgagcgtcccgtttctcggctcggatcccagaagctcccgacccgctgtggtaggcaccgccacctcgcaggcagacgatcccggcccgctctgcggcacaaaaaacttgaccttaaaaagcccagaaactggtctctgggaagggcgcggcctgggaggcgcggcccgcagcttccgcccccaaagaacaactcggaggccccctccagccccggttgccctggcgcagaagccgcggtagcagtcctttcaggcgccccgcgtccctgtcccgaagcccaggggcgggggctcgggcagcatcgcttgtcccctctggtccagggctgcggagaagcggcaagcggctccgaaaggcaagcgtcacgaagccgggctcagtagctcccccgggccccctgcgcctcgcagcggcgcgggccaggctgggcggcgctgggctctgaagggccaggacggcgggatgcccctgctcccggcaagggcgcgcccacgagccgcttcttggcacttggggagagtcccgggaaagcccggcgccggcgcgctcgcgactccagcctggcggctccactccgcccgcgagcccaggaagccggctccgcggcccgcgcccgttatccaggacacgctccgcgcccgccgcccgctgccctttccccccgctggcctcggggaacttccccgcgtctggccgcaggcggcggctgccgcggggagccccgaagttgcggcgtctgctaggcgcgcgccgggtcgcccacccggcccgtgacgctgtgtccgtccgccgcgcgctctggtggccccggggctcctgcaggcgcggagagaggccggggttcagcccggttccccgcgcggctccgagagggcgcccccgcctgccgcctggagatggacgcggcgccgaagttttccccggcgggaaaacgaaagtcgtgaggagcagagggtcggggcgtcccggcggagacgaggctgagaccgggttaacatctccagccccgggcgaccctcgctcccccgcgtggccaagtcgacttacgagagggagcgggccagccccgaacgcggggtccgtgcggctgcggaggccgccccggcgggggccgagggttgcgctctgggttcccaggctctccgcggcggctcgctctcgccgcgctcctccgtcgccctgctggggagccgctctcgcccggcccggggtgggagagcgctgagcggcccccgtgacgtgcggagaaagtaggagcgcctccgcgctcccgcagagggagctccctgccctgcgctcccagtccccgggccgcgcttcggacaaagttctcaggcgcgcgcggtgatctcggctctccgccgctgcccggagcgtcatccacgttcggttccctcccacattagacaagaaatctgaggtcaggagagctaagtaacttgcccaaagtcgctcacaaggcagtgacgaagcaaactcacatccgcggctccttttttctccttgaacgccgggctctgcggaggctcaggccctgcaggaatcgcccaaccagacagaaggcagctcgctctcatgggtgagacgaggagtgtcccacgcagccgcgagaaatattatcagcagcgtgggaaggtggagctttttgccgaataactagagtgcaaagttgtttttcaaacagtgcctacatgccaaatcggcttgctttttatcctcaagcgagagtgagggtggcggctgtgcggacgccaatcgggatcaccgaataagtgcagtggaaagaaagcacacagccacttaaccaattggccgacatcaaggacttggccttccgagcgggttcttgtgaatatgctaactttgtaaagcgggcgcaccacgctgtgcttgctattcacgcacttccaggagtctcccgcgaggctccacgtcctttcggggccgggggctcccagggcttgcctttcagggcagggagtggcaccagacaagtcaatcccagtcggtttgttcctttatcccttgcgtcaatcagtgttgactgagggcctgcaatgtgcatggctgttgggtggggagctgggtaggacctaggacctaggacccagtgaatctcaaagagggagggtcacatgggtccccatatgcttcactcccagaatctggaatctgcccaaagcagtagagagactttaagtctaccccagcccccacgcctttttaaaaactccctgtgttcggagagcaagtgttttaatattcgttttacagacgtactttcaagcaaatggccagctttgccttcattttctccccatgggaccgcctctttctggaataataatttacacttcctgggtctccctcatttgcacatgatgatggcgatagtcatgatggtaaaaacaattaaggcttctattatccaccctgggcactgttctaagcaatttatgcggattaactctttcaatcctcacaactttatg

SEQ ID NO: 44405 - DNA, 308 bp, Homo sapiens
atgaacccggcaggcagagcttgcagtgagtggagatcagactactgcactccagtctgggccacagagcgagactccgtctcaaaaaaaaaaaagtcctgaaataaacaattcacaagttttaaattgcacaatgttctgaggagtgtgatgaaatctcacactgtcccactctatcctgcccaggatgtgaatcatccttttgtcaagagtaatcacactgcatatgctacctgcccatcagtcacttggtagaaatctaggttatcagattgcaaggcttgggtttgagtaatctttatttaata

SEQ ID NO: 44406 - DNA, 1568 bp, Homo sapiens
ggtatgatgaggaaagggggcaggagaatcctggagaagagagagagggaaaggagaatgacctaattctgtgtacgatccaacttaagtcccagacacagccctgagcacatatgaagcagacctagtggcctcatccctgccctcttttccctgtgtctagcacagagaatatgttagagaaaggtttcgataacctgaaataccgacttttttggattcgtataaaactattcgtttccagtttggcagggaccagtttccccatcacacattcttttcttgagagaaactgttacccattttcctagaactgagctacgagtctcttgaagcaaaatgaagtctcctgaaacaaaatgcagttaagttcagacccaagatcttttttgcttgtgcaaaaagacttaaagcccccaaaaggaaagccttttgaaaaatgctataaagccacctagtacaaacctcattttatccctagctggttgggggtaggtgggaacagactgtgtttgcttatttacaagctctcagctcaggcacggctgccccacaaggctctgatcctgcccacaagcacatgttctggtcacgatctccactcaaaactctgaccccctcagagggcacctgggccgccctggcgcgagggttcaggcactgtggccctaatgatggtcaccttctccagggcagctccttttcttccaggtcgctctccgtcactgaaccctctatcacagtttcatcactgtcccagtctggggcctggacgccttcctccatctttgcctcacattcaaagtcttttttaccctcctctaactccctcttgcccgcaaacaaaaaaacgctttgagggccaggggaaattgtgaattaaaaataaaaataatataatcgcagcaggagccgggacttgtcgcagggctgctgaggaggacgcaggcggccgcgagcgcggcggggtagcagtctgcgaggcggcccgcgggtcccgccgctcgtcgcagacagggggcagccgctcgccacacgacggagccctgcgcagcgctcggccccgcccccagctcccgtggccggaagtgggaggccgcgcgcgcgcgcgcaggcctactctgggcgtggcctgccgctgcgtgtttttttcacggtttctcattctcggtcgctaggctttgagggtgctggggttgctgctgcagagaccagaaaggcaggcgtggcgcacccagaactcagaccgagcctgcttaacacccttggccgggagggtgacctgccatgcacctgatgcttgtgagccccagatacgggaagagctgtcagctcctgcccgccccagcagccctggcattctggagccagaatgcgaccttagacctaaagagagtttttgcagcccaccaagtgcttcctttccctttaatcccttgacagcctctcctcaagtgtcctctgaggtagacaaaacagatacgtttatcagaagttttagctcatcaactaatctcagtgatgtattttgcattttttttttctctcaacaacgctttggttacctg

SEQ ID NO: 44407 - DNA, 653 bp, Homo sapiens
agagggaaaaaatgtttgagccactgtgagttaggttctccattctccattgcctgctgctgaaatgaagagttcaaaagcaattcctccattaagactgattgccctcgtgcaaagaaatacttcctgctatgtaagcagtaactcaaaaagtaaaattcactaattctatgctgcctgcaattatttcttaatcactccacatgcacttccacaaattgaacttcttaatcatgggaactaaatcatctaccttatttaaaatttccacaatccctgagcaggctggacaattggaaaaatgcttttaaaattctttccatagccactagggctccaaataaagtacatccccagagtcagtaaacagttttagaaagtagtacctttggaactaaacaaaccaaaaaaaaacccctgtgattcactacaggcagaagagtttcacgctgagagagaccttataaatgtgtggttgcagataatagtgtttcatgtataaaagcaaggataaagccacttggcaaaagataaaattgtatttacacctcataccacaagaatagactacaaagggatcagaaatgttaatgtaaagaatgaaatcaaacaagaactaaaagaaaacacagataaattttgtataacttagg

SEQ ID NO: 44408 - DNA, 2702 bp, Homo sapiens
tttactgtgcaaggttcataaaggcaggcactatgtctgtcatgtttgtcactatatctcccatgccaaccacagtgtgtacttcacataatgagcatttcaaaggcaacatttggtaaagagatatgaatgaaggtcttacactgaagcagtggggaacagtagaaccagcctaagcattagatctgggttcaaattccagttttgctcattatctatgtgatctacagcaagttgcttgacaaactttaatttttacttttttgtaaaatgggaataatacctattatataaggattataagaatctataatcatttattaaaactaaggagtgtttagtgttttcttcgtaatgtgtttcaaaatatgggctttaaaaattgagtgaaatacaattcctgtccttaataaatttccacatacgatagtaagacaaataaaaaaatactacggaaattttatgggttttcaaggtcgggagtgatgatgtgtttgagggaattaggaaaggaggtggcatatgaaaaagtccttaagggatatttaggatctcagcagttaaaatgggtaggcatatccaaggtaaacaaagagaacataagcagggaggtaaaaaggtactgagtgtgactgaagaagggccagttactcctggctgaactgtaaggttcgcacaggaaagtagagatacgtcagaaatgtgtggtggggccatattagtggtgacaggttctttctttaatccagtagacaatgagaaacgctgatttgggtctatggcataataggaagtagtatgccacatactgcatgtgggagttctgcaggacagattgggaagtgcatgcgtgtaagactgggaagaccagttaggagaggctattgcactgttttaagtaagacataataaagccctgcaccaggcggagagcagaaggaacgcacagaagacgcaggagaggcacatttcagagagaatccagtatgcaatggatgtcgcacacaagagagagagacgcaggtgaccggagccatttacactaatgggtaaatctcgggaaagcgctggtttcggctaccggccagttacaggtttgaggtgcccgtcgccgccaccttccctttttttatattcctctttttctcatggccgcctccgcttccctccatctctcccgcgctagtaactgagctttcagtcatcgacctgaccctgcgttttccctcacgctccgattctgcttcctatcactgcctcctactgtactatcacagccaggacgagcacgggtcaggcactgaggctgtgggacactccacccgcctggtcccctatcgcctccgcctaggcagctgccatgcgtgcgcccccacagctctaggaccaataggcaggccctagtgctgggactcgaacggctattggttggccgagccgtggtgagagatggtgcggtgcctgttcttggccctgcagagagctgtgggcggttgttaaggcgaccgttcgtgacgtagcgccgtcaggccgagcagcccccaggcgattggctagacaatcgaacgatcctctcttattggtcgaaggctcgtccagctccgagcgtgcgtaaggtgagggctccttccgctccgcgactgcgttaactggagccaggctgagcgtcggcgccggggttcggtggcctctagtgagatctggaggtgaggcgggcggtgaccgagaagaggggcaggggcggcggggagcggggcggagatgggtgggagcggggtttgggctgtgttggtggcaattctggagcttccctcggccctgggaagtggctaccggcagctcctgcggacctggagggggctgcggttgcgctttgtcggtgtggcagctcggacccgcggggactgcaaggaatgtccttgaggcccggcaggccgagcggcggccggcatcagtgccggagtaacccggggtcccggggtgggcttgagaggcgggcggcggtctggcctcttcgtgactgcggtcatcatcggtggacccgcggggcgtagctgcgttcatcgtccctgttcagtcagagtaggcagtgctggctgcacggtcacgaaaatcggggcggaaagggtgtcaggcagggtgacctcggaggcccctggattcgagaaatgctaggggtctatggggctgtcgggccggcagctcgcagggcagacgggagaagcgcctgcatcccgggatccgggcattcacgcccaggaactgctgttcgttagcacctttcttttaggtgacgggaaagatctctgtaaatactgctgactaacttagaaccatgaaagaaccgtggattggtgtagatgtgtctggttatttacaggagaacggcttgagaggatgcggagcccaacgtggggattcgcacaatgactcaaaagattcttctccctctttttttttttttttttttggtaaggggtgtagtctccttggtgctgatattcttttaggaaaaatgtaccttggagatacaaatatagaacagttaatttctgcagtaggaggaggtcgatgtactccattcttaagtagtcgtttgaaatatttcaggatttgaggatattccttcttagacatggtcctgcagagtcgtaggaagcatttgtttctgggctatactaaatgtgcatgatttcggcgtc

SEQ ID NO: 44409 - DNA, 563 bp, Homo sapiens
cctgtggagtgactgccccagagagaggcatttgccatcacctattccgtttaccctcctgtttgttccctgcactctgctgcaaagggccaaatagggggaaaaattgagctcctgttaagggtatgtatcactgtccactccccatcctcaccccacctgccctatgaagtttgactcctttgaactttaatgtcccaggattgtagtgctggagcaggattagacccaggcaacagcattccagttggctaattctgaagccagttggcagggagcataaaagtaggagggccttgtgccagctgctaagcatacaaggtgtgtatgtgtgtgcgcgccagctaactaagcatacggggtgtgtgtgtgtgtgtgtgtgtgtgtgtctgtgtgtgtgtgtgttggaaggaaagcatcgggaagtaatccaaactagaagggctatggtcatctaccctgtgttgattatggaagtcctttgctttcatgtcacttgcaaatttgaagtgggctggagtggaggtgggggggttgcagttggggcaattctgtctccactc

SEQ ID NO: 44410 - DNA, 2188 bp, Homo sapiens
taaaaaaaaaatccccacaactatgtaatatcaagagatcatccacctgcagtcctataatgactgctttgctaaaattttgatacagggattttaaaaaatatataaaagataaaacatcttttccttaccctcgaccccttaccgcaaaaatattttattattaagtaatgctcttcctggactaaagatcagtctccattctcacatgttccaagttactatgaatatttcctgtacccatcatgtgccgattcaatatctctattctgaactaaggtacagggtgagggagaaagtcctccacattcatctgtctcactacatctaacctagcagaattcaacacctcaaatttcaacaccaagctgagtcgctccagcttctgtcgaaagagttgcgtccgcagtgccccccaacctactcggcttggcatcctcagagagaccaacctcttttaagaggtccgacttgaaccgctcccatgcccagtcgttcggacaccgctgaagcccaacccggattccttacacccgggacagctgccgccctaagtcccaagtcacggcgcgcatctggcctcccaaactggatctcaggtttatacaccctttccctggtcctcggctgcccccgacgagcccccgggcaacaaggacagtgcccctatatccccgcctcatccctagtcgctgcagcaacactcagcctcgcaccccggcacgttccgcgcctcccgccagccccaccccaccgcctcagcggattgcctcgctgcaggtgagtctggccaggggtcccttggcaccaggggttgctcaccttactgaggaccccgcagcgctccacaggcggcccagactccgtctctggatcctcctccgagcccgacgagttccagctctgattatccgacatggaggctcgacaaccgagcaggagaccggcccccgctccctcagctgcgccggaggaggcgcccagtcctcggggtgaagggtcgggggatggcgaagcgaagagtgcccgctccggtgtgggggggagcaggaggagggacgaagtccgcccgccgcgccgccgccgcgcctgacaccgagcggagcgaggaaggaggacgagcggtgaaggaagcctacccttccagccgtcagccgccgccgccgtcgccgtgacccctgcgttgcgcccggcgctgccacccgaacttagccccctcgatgccaatttcaaatagggaaggaaaagggaaaagaagggaagagaaaatccggccgctgagtcccgcgtccactcacacctccgctaccgccgccatcttcctgcctggcccactatttaccctcccctcccctgtcctttcccctccccttcgtcctcccattctcccccactactccccgccccgtccccctcccggcgtctgacgcgacacgccgagccttcgggatcctcctcccgaaccctacctccggctctcccgggtgacgacgggtagaaaagcaggaggagcggagaaaggagagggcggggtagggatgcagctgtgctgcattctgggaagggcgttggtccgtcgctcgcgcagcctcctgggagttgtagtcgcgatcctgaggtaacgggtgagtatcccgcgcggggatcgcttgtccccttggggccttgtcagtcggtgggtgggcttcgtttgacagttgcgtgaccagcccctcggcctcgcttctatccttgccttgtgtgtttatgacgaaccctccgggcttgcgggcccagacgtgagagagctttccgctgaagatgacgggcctgctttccagggcggcttgtcgaaagcccgggagcatctggccgcttccgcctcaaccatgggctggggttttgtgagctactagtgccaagggttttctttccaccagaccaccgctgtaaatctcgagggtcttactcattagaagttagaattcacatttgacgtttaaaggaagaatttccttagtaccttctcacaagcacgcacttcgcatttttagatttctagagtttgctttgtagaaagtaattttgaggttgtcagagaataaatgacgttagaaaggtttttaaagtaaaacaagaatgtgagatgatagcctgggattttctcttggttgtaaatgaatatcttactgagaaccacgttaaccat

SEQ ID NO: 44411 - DNA, 1051 bp, Homo sapiens
gagagaacggggttgggggtaaggttatagattaacagcatcccaaggcggaagaatttttcttagtacagaacaatatggagtctcctatttctacttctttctacacagacacggtaacaatctgatctctctctcttttccccacatttcccccttttctattcgacaaaaccgccattgtcatcatggcccgttctcgatggtcgctggatgttttattttccagagaaccaaaccttagcactgtgcacgccacacctgagggcggattatcccaggccagcccaagtcagggcagggctggaaactaggggcttgttgcccagcgaaccgccacaacagagagcggactcgatcctgcgctccggccgggctgacctgcctgcgtccagcccccgcgccctgggcctgcctgggtctggatctgtgtccgagtctgggtctggatctgggtccgagtctgggtctggccctgcgctcagggcccgcggaggagactatggaccccgccgggcgcgcccggggccaaggggccacggcaggggggctgctgctccgggctgctgcggccgccaagggtctcagggaagacctgtggggcgcggccgccctgccttggaggagcctgtcccggatcccgaagcgggagggtcttggagaggaggacacagcagttgccggacacgagctccgtgagtcccgggacgaggtctcagaaaatcaggctgcggggcgggctgggtcgaagggacttgagaaggtacccagagcagcacctccggacgctgcaggagggaaactggcgaggcgactcagccctgggaccccgagtcccagcctgcaccgctgcactccctgttggctggttttcagctttggaatccacccccaccatgtactgtgggtggaaggacagtattattcttccgaattaaggaggaggcttttaaaaataatgattaagtccttttgcaaataagagtttcatgtgctcttatctcctatatcgtgactcatgctccgatttattgtctgactttaaataagt

SEQ ID NO: 44412 - DNA, 826 bp, Homo sapiens
ccaatgtacagggagaatctgatcattccagttagacatcttttcttcacatacacacaaaatattttaattggcagtgttcgttttggaaaggtctcttcatagagaatatacatatatgtgctctttgaatttggggactaaattgtttcccctttacctatgggacctgggtttttgcttattttctcatattgactttatggccaatagcatgcatttgtaaaagcaagatcattgtccagagtataatctggaatgtggaagacagaagctaactggccccagagacatcaaatattgactttgctctatgaactctgataataaataggtgtattaaacagctcaggggtaagcccaggagcacacacacaactttatgccatcactttctcaggctccatcgtctccatgatcagctcccctacattttctagctcctcaccctcttttcctggtcctctgtctggaaagccaaggctgtggtctccccgctctgctgtgtacttcccacaaataggtctgcctccaggaccaagtaggggagggtaacaagagaacatttggattctccctccacgctgctttatgaccgcagttcctctggtcagagagaaagattcccctatgtcagagtttagggtgcttgcccagccactgctgctacccctaccactgtcaagttgtagctttgggagtggggcttggcttgggggagggggcagggccagtagagaaaaatgaagcagagaatttcccctaccttctctgttctataggagctcccttctcctctttagaccagaatgagagagcttctctt

SEQ ID NO: 44413 - DNA, 890 bp, Homo sapiens
ccccaggccttaatcagaatctgcatttttaaaaaattcctaggtgattgtttttgggaagcactggtatgaaatagagtcatggctttgcagggcctacagtctatctggggagcaaggacagagactgtaccagctgagtaccattcaaggcactgcatgctagggaccaaagtgagcagcaaccccgagtcctgggaagaggcagactggataaatggaggctcttactccagacaggtgtaaagaatcccaggtgggtgcaagtggtgctcagaggataaaaacatctgctgacaaagcttcttacctctgggaagctcctaacatggaagtgttccccagaggaaattattggcctcacctatgacgagactggcaatgaggacaggttatcagtgactattgagcaatgtacactttacagagcttcgtgagccaactgtgagtgtaatttgtgacacatggtcttaagtagtctcaggcatgccagttttatatcagaagaatttcttttatggaggttcttctcggggagtttacacctgtgagcggtgattcattgcctctgaggaacaatggctccactctgagtttgtggttttagagactcaagttgattgcagcttgaattcccagcttttagattttatgatcggagcttcgaattttaaaatgtaggctgctttgaaattaggaattaccttttagggaaaaatagatctcctatcaaagagtgatttgtcacctgtctcaaatatttctggtggtttttttttctttttgaggtggagtttcactcttgttgctcaggctagagtacaacggcgcaatcttggcttgccgcaacctcctcttcccaggttcaagcgatccttccaagtagctgg

SEQ ID NO: 44414 - DNA, 917 bp, Homo sapiens
gagtgatagctgaaatataaatttgataggatatgcacattaagagtggggtttctcaacagtggtgctattgacattttgggcctgataattctttgtcgttggggctgccctgtgtattgtaggatgtttagcagtgtccctggcctctatccactaggtgccaatattaacctccccccacccacggcatgacagtaaaaaatatctccatacatttttccaaatgtttcctgggggcaaaatcacccccagttgagaatcaccagtttagagttatgcctcaataatttgggacttgctgttttactctcccaacatgaattctactgagaataagagaatacattaatgcaacttgggggcagccaaaataaatgccaaaaggcttatgtactttacaaatagaagtgtactgcaggccctcattccttagtcatttactcatactgtgtacatctaacaaacagtttccagatcacaaacacaactgattagaaaaggcaaataaaatgtagtgtgagagcttcctttgggtaggcacttgtactgaggaaatggattactttttcatggagctaaaggaaacagaaaaacagacacttgagtttgcagataaggaagctgaagctgagagttagaactaagttcaccaagatccccgtacttgaaagtgatagaaagtgaccagaatttgagattagttctgcttgatcctgaagatcaggctcatagtgtctgccctatcctgcttctgtaacttagggcccggggtgcagatgcatttttttgcttatttccctcgaatctcacctccctaaaataaccagtgttaactgctggctatgcttccttccacacttttctccttatttggtagacaagtcagcatacaactgcccacagcatccctacag

SEQ ID NO: 44415 - DNA, 1066 bp, Homo sapiens
gctcagagtggggaatatggagcagcagtggcagcagcacccgggagtttgttagatgcatggattcttaccccagacctactgaatccaaacttgcattttagtaagatacccaggtgaaataagcactgtgagtttgaagagcactggtctatgagaagttgcatatttcattaaaattgttccccctgggcaggcaccacagctgtcctctctcttgtacactcctttgggtgtgtgccaagcatagcaggtgcatagcacaggctggagggaaagcaaatgctggtcatcataaagcagcacagcgagggcaactggaagggcttttttcgaagaggaacaggcaagcaaacagtcattcagaaagtttagttggaactgagatcacaatggaaagagatagcagctcgtggtgttttacctcggacctcttgtgcttggcacaggaaatgaaagcttccgtgaacatggccacagggctctgcttatctggctacacgggaccctgatgactcagggtgacccggccaagcaactgtatgaagagctggtacacgcaggtttcccaaaactagctggtaagtgacagtttcaacaacagaaattctttctcccttaaaatttcaggaagcagtctacagaaatatcatcctgaccagctacagccccagcgtggtgttagctgtggctcacacggagtatggaactatggaaggggcttgtaagctgtcagcagcttctcctttggggaatgacccagtcaatactggttactcattagcctggcagttctgtgtcatccccctactcagcatttgaaaaagtgtgggagtgtttttgtttatgtgtatgtgtggtgggggcaggtggggtggggcagaagtgctaaactatcccatacagttataggattgttctccacgactaagagttgtcttgctcaaaatgccattttacccctgttgataaactgcaggttagtgtatttgaaaatgttatctctaggtagaacaaaaagagcagacaggctattactttgccacctgaggttattgctaaaaat

SEQ ID NO: 44416 - DNA, 1045 bp, Homo sapiens
tagaaaaaagttgctactaatcagggggaggaaagaaaaacctagaaggattctctaatcagattgtttggaaagttttgttaggttcatgctttacagaaactgaaattggagatcatagaaaatatattgggtgtggtttatattaaaaagatgacaattacaatctttgaccccacattcagtttggctccacatttaaaaccagcaaattaatacatatttatgttttaggataaaataatgcattaggtatgtatcattctctgcaaattaaatgaccacttactggtaccaatcatgttggagttcattaaatttatcagcttagctgactttaaaaaatgctataaaaataaaaattctagcattttaagccacatcaacataagcaacaaaattgaaaggagtaagaaaaaaaatgaaatgacattaaaaacagtatttgtagcttaatatttgacagagagacagtacagatcattggttaagagtaagaggtctaaatcagattttcaaagtctgaattccaaatcagttactaatcgtgtccttaggcaagttgcatactctctaagcctcaatttcttcatttataaaatggagaacgcagtaccaactccctaatgataccctttcactttctattcaaatgaagaggaaaattagaagagaaactttactaaaggtctttaccaaatagctttaaaattcagtgaaaaatatttcccctcaattattccaattgaagttagaaaaagaataaaatgccatctactgttcaactttatgaactgcaatatgcttgcttgtataactgtccagccttttttgaaaaatggtttccaccatgaaattctgatattgtctttaacatactgaggatgtctgcattaaagaaaatcattttaatattattattttttaaataattttatttaaatttaaataattttttaaaataataatattttaaaataagatattattttattagcatggtaatcttccattctccagttatttgtttgctaattctctgtac

SEQ ID NO: 44417 - DNA, 1264 bp, Homo sapiens
taagtatggtcagatctcaaaaattgtttcttaatatggacacactgcagacacaaaaaaacccaccgcactcttggaaaatatgctatcttccatctgccctgctttatgtcaacaaggtatgagttatttgaaactctagaacagtagcattttccttactgtttctaggttcagaaacaaaggagaaaaatgaaaactgctttaatgggtggcggacgcacattagttcactacattttcagtagtctctaatccaaggtatcagaaaacaagatcaaaacttttgtgtgcttctctgttgccagaaacataaaataacatcttggtaattatctggctgacagcaaaacaggggtctgggaattcaaatggaacccccaagaggcaaaggaagagcgaattaacatgcaaactagcagcagggtgatgtcgcctgtgcctttcaccaggcctagctgcactcaaggaaaggggcgcgccagcccctccccaaagcagggactagaagcagaggagaaaagccattgcagtaagcaaaaggccataagttttcttccatcaccttccgacccagcctgttttaagaaaaatcttacttaagcacaacagagctttatacatggttattttttctcaacgttttaagtgaccggaacctctgatgacagtaatcgctcagcatccctcactcctgctcacttcctcttcctgcacgcctcggaggggaaactttgggaccttccggcacaacagctgaatcactcgcggtctggggaagagcccagggggaggaaacacgcgccaaggaactttaaatctccctccactactttcgccagggatgcagggacgcaggatctgcccggagcgctgctacccaccgtcgccgctcgcgaccaaatcccgactcctcgctctgcgcctcttagccgcgtcgcagctgcagtgtcagcaagtgcagcctcagcaagcacaaccgctacctagacggcaacctgacagtttcaaactgcagggaggaattaaggaccgccctgggcattggtcctttgtttcagcaatctgccgtttgattggtccgagagctgggggcggggatttgggccgctgccgggagaagccggaattactttggagagccccgccccctggctccgcaggttggtagggggcggggtcctagggagccccacccagcgcccgtggggattaaatattgcgcgtgctcagttctgttcagcggctgcaggctgctaagcgg

SEQ ID NO: 44418 - DNA, 979 bp, Homo sapiens
ctggagatacccaaatggagtatccatcagaccactgaacttacatgtctagggctcagaaaagaggtcactgcctagatatataaactgggtggcttttgcatatagattttgtggaggattgcaaaaatggctccaattctacatctctccaggtattgatgtcctgtgccatgcaatttcacttggagtgcttctctactaatgaccaacggaatgttaacaaatatgatgcaagcggaagtttcaaaatacttacgtgcttggcttagcttgctcttgccctctgttacaacgatgaaatacgcctgggctagcctgctggaagatgaaagacacatgtagtagagccaagttgccccagtcatcctagccaaggccatcctaggtcagcctatagccatttgactccccaacaggtgtgtgaatctaagaaccacccagacaacctacagagtcatgaactcaattattattgactgtttaaagtcactgtgtttagggtggtttgttatgtaagcttattatgacaatagataactgatacagatgcactttaaagccaaagaactagatgagacaatctagtgggggagagcaaaatgagtagagaagaggatttggaactgaaccctgatgtcctctaatgtttagaggttgggtagcaatggaggagccagcaaaggagactgagaaggaggtgctggagaagtgggaggaaaaccagcagaggcttcagtaaaatgctagtgaagtgactattgtgtttgacaatatggagttcccccatgtcttggcccttccatgggccccaagttctgaacctcctctagtacctgtcttctttccatctctcatgtttttggttaagccactgctgaatttggcttggactgtttcttgattgtatgccttcatttcttctttctacaattcactcttcacactgctgataaactatcttcttagaatatcactg

SEQ ID NO: 44419 - DNA, 651 bp, Homo sapiens
gaacttatttctgagccaagatgaatgacccaaatagcctttccagagagcagaggtgaaatttaactctgggtagttgcctgacattttgagacaaaggagaaaggggatggggaatgaagaaaaatagcatttgaatgtctcctgcagggtcataaatctggatgggcaaaagtggattgcatctctgccaacaatttaattaatttgggcttcttttaatctctatgattcatataacctgaaggaaacatgctttaaagctgtattgtaggaagagcctcctttgagttacatatcagtatattaactcttggatgttttatttttccagaaggaagtctaagttgtgtgtgggggaagtactaggtttgttcacaaaaaaatgcattcattgctttgggggaaagccccgttcctgtctgactgtagtgagatgaatcattagaagtgtaatcacagcccaggggaggaaaaacaagagtaaaggattctgatggctcccagcaaagcctgagagtgggctggagatttgcatttgcttattcttgctggtgagcctttgctgatcatctccaacttataaaaagttgcaagtctatgggaaactgttttgaaacaaggtaatacaaaatggcagctatgacacta

SEQ ID NO: 44420 - DNA, 688 bp, Homo sapiens
gagtttgggaagcaccatgcttgagtcagtcttacatgttggccccaggaaccctttctgaaaagttcccctcattcactctttgcatatttggggcactcacagaagatattccagaaaaaaaaatgaccctaaaaaaataagcccatgaatttgtgagtttcaaaagccaccagaaaatgtgcttcttcgaaagcacggttagggtcataagtcaaattcaggaagcagaggcataatgtgacttccttccaccgctggctgctcctctgcgcattccaaagggcaagaccagagcttggaaacagaaatagaaaaactcgcaggaaaggttggcttgttgctcgggcctgctcttaaagacagatgactattggagtttgttggaatttaacccctggactctctccctgggatgtataattggctctcacttcctgaatgcatgattatgtgctgcaggcagatcgctgccaattatttttattgtgattgctttgtgcatctctgttggcaatagcgttcacaggatttcagctcaaggggaacggccacagccccaagggtccaagattagaatatgactgcggttataggtcaaaagattaaaggtctgtgaatattgttctctttttcacccagagataccaggatagaatctggcactttcgccttggtatccataagt

SEQ ID NO: 44421 - DNA, 1767 bp, Homo sapiens
ctctgtctttgtgaacgaggtcctgccagagttggtgcggccaaaagcaagattaagactctgcagcttcattgagctttctttcatcaacctctcattctgcaaacagagcttagatgtggattacactatacgtttaaaatgaacccctcaattgcttgagcccattgtgccactgcactccagcctgagcagcagagagaacctgtctcaaaaaataaataataaaataaaataacctcctcaatgttaaagcaaggctaggtcatagcctccttcctttttcttgtatactataagagtgtgatactgttttaggagaatcagctgcttatccctctgccataaggaatagaaggatgagtattcacctaggacaaaaatctggcttaaaaaaaaaagaccctcataaattgaaattggtcaggtccttcctgtgagaagtacagacctacggtgtttctgttgtcagaaaggttaaatatcaattgaaataaaaacaaatgttgcttatttgtattaattcaggtcctccatgaagcagatgtcaggatgggattaaacatgcaaaaatgttattagaggaaatgactgtgagagaagatggagagggagtgaagtatgggagagctgcaatgcaactctaagcctgagcgaaggagggaggaaggagtatttgggtggaatctcccagactatccagtaatctaaggaaggtttggcaaggctgttggagacccagggatcatgacaacatcagcctcagaggagtcctgtgtgactcaggaagcagcctgcagtaatagtcctgtcaggtccagtcattgtctgggagcagcatgtgggaaaacacctctgtgcacaccagcacgataacacaaaggtctgccaggtgcattctcaccgcggtcacgctgttgctggcagacgctctccagcacttaagtagatgtcatcagataatcacaggaagtcatttcctttggtgatctagaagatgacttgtgctccagagcagcgtgaccatggccatggtaaattcgctagtatgagctaattagtgagtatctgaaaatatttcaggctaaaacctcttccaccatttccatgtttctctgggttgcattaggaggtctccactgatctctaactcagctattagaggaaaatcccaaccagttgagacactctatagcttcatctccccatggaggcaggatagaatacaagaatacaggaatagaacacaaaaattctggctagaggctttacttcattctcttgtgttgctctaacaaagtacctgagactaagtaatttataaagaagagaaattcattttctcacagttctggaggctggcaagttcaagatcaaggcaggtttggtgtcttgggtgagagctactgtctgcttccagatgttgctgagtccttcagaggagacgaacactgtgtcctcacatggtggaaggcagaagggcaggaagggccaaacactgtgtgaagcctcttttatgagggccttaatcccattcaccagggagaagccctcatgacctaatcatctcctaaaggcccccctctcttaatactgggatttgtattggtttgttcttgcattcctataaagaaatacctgagactgggtaatttataagaaaagaggtttaattggctcatggttctgcagactatacaggaagcataggaagcatagtggcatctgcttctggggaggcctcaggaagcttccaatcatggcaga

SEQ ID NO: 44422 - DNA, 1455 bp, Homo sapiens
tctgagagccccattgccatttttgcccaccagttctcttcttacctcctcagggcagtgcccactcatttcctttatttcccttttgttttttttcttttcctcctctggtcgacaacctcttaattctagcagtgtacaaaagcaaggccaagctttcctggggcacttgggatgaaaggcccatccatgcctgttgtggaggcacagaggaggagaaggtgaagaacaggaatgggtgcagggggagtgtgaacgcaaggctgctggctttggcacagctccctgtgcagggctggatttccaattgcttttcagtgcctgtgccctgataggatgggcacagctggtatggaatcagagcagcccatctccagagcagaagtctgagagctcagcgtttgactcctgaaagaccaggatgttcctacctgggttcttgagattcattggctagtggaggtagatggtactctccatgtctgcagaagattccccacttggtgctgaaggctaggtgccttccagtcaggtctgaatgctgaaattgctgagattgtccactctctgcctactttattgcattcatgctccccttagatccaagagtgcccaggactaggagcagaaagcagttttcaaccctttgttcagactcagacgggtttcaactcaagcgggtaatctaccccagcagcaggggtgcaaagtccaaaacagctttgtggtgcctggggagtgactaggcagcctgctcacaggggctggagtcatctaaagctagtgatgagctggaatagctttgaaccggttcatccgaactgattgttaaactttcagaacttttgagagtcagttgagaaacatagctattactaaaaaattaaataagattagataaattatagctaaaagcaaaggcaacatatagtcaaagctcatcactttctacttattttactacattttaccattatctgtgcccatgaggtaatgtatgcctattatgtctgtatggtagaaatactgtatacaggtatactactacacacaccttcccaagtgacagtatttttgtagtttgagatcagctatagtggtggtatttataccatggaaagcaacaaagccatggaaagcaacaaagccatgcaaatcagactcctcctaacccctaagacagttgttaaacatttgccagcataccaccatctaaagccctaaagaatgcttggcctcccactgcatagacacaggccacatcacattgagtatcatggatttatgggtcagcattgcccctaagtccaaggaaggggaaagacttagcaagctcaacctcatgtgattcacaaagggtttctttctgcatttgtattgactcagaataggacccagtacagagaatccactgttatctatgggtgtcattccttcagaaagaatgtacagtaa

SEQ ID NO: 44423 - DNA, 1594 bp, Homo sapiens
cctgatttgtgccactgccctccagcctggacaatagagcaagactctatttcaaaaaacaaaatgaaacaaacaaatgaagaaaaaatatacatttataaatataaaatataaaaaaaaaacgtacatataatagcacaactagcatattgaaaaattgtatctggacaggtgggaagctttccaagtatgttcttgggaaatgactcaggacagtaaatgactggcaggcaggtaggaagggggccaggccctgtggtagaccaagtaacaaacaggtcccagagcagggaggacaggggcaatgttcctctctctgcacacactccaccttctgactcccccacctcaccccagcagcctcaaaggagcctctccagggccacgctggaatggcaaacatgggattttttttgctgacttggcttagcaacaaggcctcactctgaccttttctctgcacagcattaaagagaaagggtacgttgaaagtgggattgcatagatttcccatgaccactgccacgctttgaagggaaactgctcagctgagcactgcttcctggaatgagcaaggccatctgccctagcctgacctgataacttccacccctgtgcaggtgccttccccacgggaggtgagggccagcacagcccagtccctgggagcccctgccaggcaagggccacgctggtcctcgggctcatgctgtcagggactttgttgaaggggccagaggcccctcagtctatcttggttaatggcaagctgcttttaggatatgcagagaagtaagagcgagcaaaccagccaccaggccgggctttgttgacatgcaggacatcgtttgagatgtaagagcagctctagtagccctgcagcagcccttgcatctcaaccggtttctgagtcattctctgggattatcaggctggagttctctgtcattaggatgactcatcatttttctatctctgcttccattgcttctgtccctgctgactaaagtctctgctatccgcctctgtgccgcagcttctgtggctttttctctgtggcccctttcttcaatcccatcctactcatggtcttccctctcaaggtctcacaaactccctaccagtagggtttatgggttccacctgtcaccatgacagagctctcacgccagacaccctcacaggacatgggccaaccagtgggaagctgccttggagtaagggcgctaattcctggcttaatcaattaatttacctgaagccacacatgcagagtcacatgatataaaccattcattcatctgacaaatagggcacctcacgtatgtcacactctgtcctggcgtggagaatacaatggtgaaatagaaacaacacaagtctttgcctcacattctcctgggggctgggatggctgacaagaaataaaatcggccaggtgcagtggctcatgcctgtaatcccagcacttcaggaggccgaggcagacggatcacctgaggtcaggagttcaagaccagcctggccaacacggcaaaaccccatctctactaaaaatacaaaagttagccagatgtggtggtgagtgcccata

SEQ ID NO: 44424 - DNA, 1161 bp, Homo sapiens
ggacttttttttccaaattctgttctctctctctcttttccctctcttgcagtctctcagatcatagtcagatttttctaaattcagacagtatcttctgggctgtgaagaaaaactaggagactctgaggaaggttgctgacctctgcctatcattccttaaggttctcagggttcttgtttaaacacaagtcttgttaagcactttctaaaaccagacagctctataagtttggagagagagaaaaggaaaagctaggaacaaaatcatctgtcaggctgatgatcacagtgcagaatgaatatagggccagttatggggaaggggaatggcacaggcagaattataagtaaacaggttttctccctttctgggctgcaggatctcatgccaacgtcctggccttggctgccctccagtcttgtttgaccttggagctgtacctgcaaggcgagggaggagccacatctttccctaagcaatgcctggcactttgccggaaggcctggcgccccattggcatcaggtggctgtgatgcacttcttcgtgtgctccagccccagtcatggctgggctggccccagaaagaggcctgtggaagctccaggccctgagggaatttccttgagggaaaccactggaggtggatatgggggtgggagagctttctctttttctggaatagctctggtgaggggtgtaactgctccaccaccctaccacctaactacaggctcaaatatctggctcaccccactctcaaaaaggctagcacatctcccaggctgacacaataggcagattcacctgtaccaaaatctctctccaccaggcctgtcttccggtctaaaatttgcactaccatacgctttccagtaggtccaaaaaacccctgtgaaaatgaacaagtgccaactgagggtataagattccagctctggcttaacagacctataagactgtccagtttgctggatgccacctagaagaaatcagggcttcgagagatagagccagactctgcagagctaagtctaatagcagaggtgagttaggaaaccccaaagcactagtgctccataggctttgggtgggaaaagcaaggcagagacaggcagggcacacaaccctaggcagcaggtcctggggctttgactga

SEQ ID NO: 44425 - DNA, 573 bp, Homo sapiens
ctcaaaaaaaaaaaaaaaaaaaaattcagaaactgctaaatagtgaaatgacatggcacagtgaattctgtcaaagctcgcttcttctcagcgagtgagtagaagccagcattcagctgtgccccgcgatgatgttttgttgaccatagactcagctcaactacactatgacccttgagatatttctttttctattcttaggcataacctgtcattcttctccctttatttatgcagcttgtgtttttcctaaccactctctttctcccgggtccctagacagtggagctaccagaacatgttgacataacttttgccccctgtcagagttcctggcgctggagccactgcggtatgacctgctgttgccacagggtttttctctagctggaatcattctcaccatgggagcctgtccacaatgggtggcacctaggaaagttaaattcatgttgcattttgtttcatgagactctttcttgaagttgaactttctggctctctggaatgaacatgcttgcactgaaagcctgtgagagactttccaagaggttacacagtgtttttccttct

SEQ ID NO: 44426 - DNA, 3334 bp, Homo sapiens
ataaaaaatgattagtgtcactatgccaccatttcctcagcgaaataatttccatccccccaccgcctccgagggtcttgcactctcacccaggctggagtgcactggtgcaatcacaacccacagcagccttgtcctctcgggctcaagcaatcctcccacctcagcttcctgagtagcttgggactgcaggcgcaaccaccacgcccggctaatacggctaatattattttttcattttttggagagacggggtctcgctatgttgcccaggctggtctggaactcttgggctcaagggatccttgtgcctcggcttcacaaagtgctgggattacaggcgtgagccgccgcgcccggctctaaataatttcttatcgccctccctcagtttgtttttcctgttatcgggtcacccacacattccacaattgtcaaataggtgagggcacaggtacggaagcgtcccgcattccctccagattttatcacgctgagacacaaagagaaaaatagctcctggcgaccgcatgaaaaccccgatttcaaaacagccacatgcagtttaatttccttaaaagcttagccggaaaaggtttctgtggcttgcgaccccagctgggcttgagagaaggctctgcacactggggcgggggcgggcacaaggtgatcggagggagggggatgactcgcagttgtgttttgagtggttgccttgggttatcttgttcctccagcacacacacactcagtttcttgtcataaggggaaccctgttattttgtagacaaaaagtgacagaagcaactttcgaagcaaaaaaaaaaaaaaaacaaaaaaaaacaaaaccaaaaagacgaagaagaagaacaaaagtcaacgtgaaatctccccagaggaaaaggaaccgcgctgtttgtccctcagtaactgagcaacaccccggacacgaagggctccctgtgacttctgcggtttttcttgcacttctccgcgttggttcacttccaccctcgaaactctccagaagcgagaaataaggcggggtggccgccacccccaggccaccagctgtgcgggggccccagctgcagggggtcccggcccagcgtccctctcggccccttccctctcccccgggggagaaggggcgggtccacgcggcctgggcgctgcgcccgacacgcggtaggggtcgctgcgtctcggcgcgcgctcccaccgcggtgaataacggggcctggctggaggagaaaggaaacctgctgcgggaggcggcggcgaccggccagggagcgagggaggagagttcacttttacttcagtgtcagcgcgcggcggccgtggctggctctggcgagagagcaccgagggagtgggtcgcagatcttcgggcggctaggggaaatcggcgagaggcgggatccgagcgcgccggcggggcgcagagcccgcgagcctggccagcgagggtagccgcggggggcgcgccccgggcgggcccccggagacgcgcaggatgccacacgaagagctgccgtcgctgcagagaccccgctatggctgtaagtgcgccgggcgcgcggggttcctgctggccttggggagctccctccccgaggacggcgttggagaagccgagggagccggttgcgcggcgcagaggaaattggaaggcagcaactgcgcggctggcaaagttgggagctggagttgcaaagggcagtgaatcgcgtccccccgctcctcccgccccccaattcctaatatccagctggcaacccagaccctccactccgcatacccaaacggggtgcgcgggcagtgcggggattgcgctctgggacagaccaggttgggattttaggggtatcaggtgaggagtccgcggagctccgggtcgccgccggcttgggccagggggtggcgtaaggcaccggattcttccaacccagaaggggaggaaagtttgtttgctgtggctacaggtgggcaccgcaagtagggcgccggcgcactctgctagtgcaaagccggcttgactggaagggcgggagtctcctcctgtcccgcgccctcgaacttcacctgacccgctagagccattggcctcacaggtgtaagtccctcccctctgaaaccccccaacccctttcccccccgctcccctcgcgcgggaggattgctgtgtggagaggacgcggcactaggctccggggaatccggcgggagcccgcgtgacttgaacgagatggtgtcgattacccagccaggggctgccctcggaaataggttgctttggccgatcgtgagtggatggagccagattaacaccaaccacgtggcttcatgtgcagagttcagagtcctaaacatgtgccaggaagcatttcctttaaaacaaacagaaagttggcctgctgtctctccaaggtggccctgtcagtgaacccaaggccgaagaccacaggttaatctttgcccaggctggccttggtggcagaggtaccaggtttgggttaaggtggtgataccttcagcagggtgttttgtttgtgtgtgtgtgtggttttggatggtgcgtaaggccactgacttgcttaactgaaaaagggctcctcaacttgtgtaggttctttcccctcctccccgctggcgtgtcaaagatgggaggttatctttcctgtgttacccttgcagtgagggggaggcctgaggactacagcctctgtactctaatgcattcagcagttgactgagacccagctttttgccttttggtaaaccacacagacagcagagcctcttgggttcaagagggaacgctgtgctcattcagtgtttgcagtgccaacctcaggtgggacccagctttttgccttttggtaaaccacagatacagcagagcccgttgggttcaaggaggaatgctgtgctcattcagtgtttgcagtgccaacctcaggttggtggaagtactttaatgtgaccagctctcagaatatatggtggcttcactgtgtcaaatgataagataaccacaaacttctgcaaactaggtgaatctacatgaacaaatgatttcttgctatcacatgattgatgtcggccctcatgagcaataaatagtgcaaaatttccgtgaatgtggtacatgaatgcagcatttctgtcagtccctgcatgtgcatctgtgatgctgcttgattttcacggaataaatctgtgttttaagtgcactccagaagaagctatcaagggagtccagatctggcaagcctgaagcccactccacagggccgctttctttggaaatcttcatccagctttcttc

SEQ ID NO: 44427 - DNA, 1235 bp, Homo sapiens
aagctgagatgggaggatcacttgagccccggaagttaaggctgcagtgagccatgatagtgtcactgcactccagcctgggtgacagagtgagaccctgtctcataaaaaaaataggtgtggcaaaatttacttctttgtgacttcaggtgtgacctcagatatgcaggacaagggtcacagtttttcatttacattaatcatgactttttagaatttttaaagtttttgattggtgacttaaatagtgcatagacaacaagttgcctttgacctctataaatagtgtaaaacaaagtaacaggctgcctcttggggcatatgggattttcaaaatagaatattgttttgttaacctggctcatccaaatactgtgcgatcttgaacaaggtcttaacttccctagctcatgttgtttagctataaaatggggataataatggtaatcagaatgaaataagctaatctatgtgcttggtgcctgacacatagaaagcattcattcagtgcaagctattaatataatatttcccattgattttaaaggtgtttagacaattccaatacaccagaaactgatatttttaaatgagttattactcttttacaggaggtggcatctatttgactgtcttgagatgagactggcctgggggctctagaatggtggtgcttaactggagcaaaaggtggcaggagcatgtgagagctctagcataactgtggccttaaagtaagcagacgctatgtatttcctaagggtgagtgttgataatttttatagattgctgaggccacagggtccagattaagcaagtgtgttccgaggagtctgacttcactgtgctttgactgaggtagatccaggactcagttggcggctgtttttgaaggctgatcattcttccactccttcattggaaattagccaagaattataaaaacaacagtttaactccatgcaaccaagtggttgtctcataatgattagtttggagcttgtgctaagtactctgtgtggagttcccaggattatttaacaagagaaaatgttggctctgcaggagagcctagtaaattttgaaacgcagacaatcctacttcagtggaaaaatcctgatcttaaccccgagtctctggtctgtctctggctcccttgtgcaatctggggggattgtgcttcatgtctggtagaagaggacaggtctatgagaaggaggcatgtacacacagc

SEQ ID NO: 44428 - DNA, 572 bp, Homo sapiens
tttttggatctctgagaaaaaagcctataattttactttttatactttcaagatagtaacattaattttatgtggttttcagggaaaaacaaattcacacaaatctatctgctgattaacaagatatctataataatagcgacactctcagaaaagcaacaccctcagaaaagcctaatggctgctgatgtcatcaagcatttacatgcagggagatagtggcacttcagtttagtagaaagatcatgaactttggaaccagttgttttgaatcccaattctgccatttacctgtttttatgatcttagaattaccaaagactaaattagctaacctctctgagtttgtttcctattcgaaaaatgtattttccaatcaattcctatctttttttttttttttttttttttgagatggagtctcgctctgtagcccaggctggagtgcagtggcgcaatcttggctcactgcaacctccgcctcccaggtcccagttaagcaattctcctgcctcagcctcctgagtagctgggattacaggcttgcgccaccatgcctagctagtttttat

SEQ ID NO: 44429 - DNA, 1206 bp, Homo sapiens
cctaaaggaccctttcatttctaatttatacttctatttcaaaatactctctaacaacttgctttcattctgctccttgaatctgtgaataagccttattgtgtaattttcatagaatgcaattgctttgaactgtcatctgatgctgcaagtggtattttgtgagttgctaatacatcagaaagctgtgttcttcacaatgtcctcatgttttttgtggttcacggcagcaagtaaagatgaactgtggaggttgcagttaatcaagttactttaaaatgaaaagaattttgaagccacttaaatgacctgcttcttgggcttggcagtgacaagtcccttcctgggcccacttagatttaacagcaggaggtactgggcaaagaataagggctgcaatgttgacagaccttagttccggccctggctttaccattgacccagcaaatagctgtgggcagtccctttcccttgcttgactttggtttcctcatttataggaaagagataatgcctatctctgagggtgatcatgagaaccacagaaccacacagtaacatatggaaacgtcctttataggcagtaaagccacatcttaagtgaattattttattagctccatgatggatctttaaatgacagtgttattatccatgccagtggttcttatcaaaagccactacttagtaaatattgagtaatgcagaaatatttgcaggcagtctctgtggcccagaaggacttgcttttgctgttaagattttctcaaattccctaaccttcctagacttacaatttgacagtagattatgaaaggtgttctctcccattcaaggaaggtgaggccaaagtgtgtgtagttagaaagtcagtgggccaggcagaaggtcagaaggcaaggaatgggtatgtacaaggaagtcccatgagggtacacattttttatacttattaccctgtgtctggtgctttgactcacatgtggcacatagaacctacgaattgaacattagttgagtaaagtccacagaatggtgctatctttgctccattaatgatcatactcttattgagtgtaaataaataaaattacctcacagagatattttggagccctttgggagcctttcccgataagatattttattttttcatcatatatttttacagagcatgcagcctgtgcagggaggtgtgctgggcac

SEQ ID NO: 44430 - DNA, 2533 bp, Homo sapiens
tattaatctgcctaaaatttattcaaataatgaaaatgaatctgttttaagaaattcagtcttttagtttttaggacaactatgcaaaaatgtacgatggagaattctttttggataaactctaggttgaggaacttaatccaaccggagctattgtgaaggtcagaaaacaggagagggaatcttggcaaggaatggagacggagtttgcaaattgcagcttgagtaaatagttatgaatgggactgctattgtgtctcccaaggaaagttcctgtgatattatattccttttttaaggaaagagaaaatgcacagaaaacttttgctgtgcttcctttttctgtcctacctctgaaaataaactaagcaaaaaaaaaaaaaaaaaaaaaacacccttcccttggtgataggcttgtttagaaatattatcttcaaaggtctctttaggtaagccaagccattggctatattggtgagtctgggacagttatatatgtgccctggaaagaaaacaaaacacgggtgtgattccttttgtgtcagtgtttacaactcagataccaaaagaacaccttgttgattaaatcaagtctcaagctctggccttatctagtggtgagttagagaatcagatttgaaaggagaagtgcttcaaatgtttaagcaagtgaaagccatgagttgcttaacagtcaatattcatgattagtttaaaaaaaaaaagagaatcttctgactggggaatactttagagaatccagtggatttcctctgcatgcttggacctcactatccttattcctaggacatacccatggataagcaatgctaataagaacttggaatttccagggaaatatttttctttgttgctctacacacaaaatagtaatgaaatttttaagaattcctaattgcattttcaaaacataaatagttttcatgtttccactgtaactctccatttctcccttccctcccttgttctctccctggctctgacctcacctctgctttccacggggagcaagatgaactgcttggttgttccatgcggcagctggtggggcagagggtgcagtgagctgagagcagggaccccctcgcaagtctggcacctggttgaggggaaggcctgcttggggctgctttccaaccagcttgcctcaggagccctgtgccagcgaggctgagatcagggcctggcacatcccaatggcagggagagagtaacttgtgaggagcccagacttgtccagggtagcttggcagagttggagaggtggtcttaacagggtgatctccgtggcacaggaatagacgtgatcccagccagccctacctgccaacaagtagtgcttgtagttggggcctcagagaggtgttggtgctgagggccagctggcggtgaccagggattatgctgtggagctagaatggaaggaacacttattaaggatataaaggaaaaagctacaggacttggcgggggtctggatttgggcagcagaggaggacactgggaggtcagatgccctggggcagatcaaagcattgcttatctgactcagcaggacacatttcgtgttctctgtctgccaagcctaggcttgggcatatagtaggtggaaaaagttctttgtttttagtttcacatattgtactagctttggatgtatgttggacaggtgccaatcgggtatgttctgacagatgaaagtataacttttcagagtgctggtattttaaaatacaaataatcggtattaatcatctccagccaaagacaagttgagcaactgatatttgatcccaaagtttatatttgtttctcaggatcttcaaagttggaaacctgggagaggtttggaattttccatggttgcaaatgtactttactcacaaggattatcacacaagtgtctactcaccaggcacggtgctttaagcattcaacccacatggtctcgattctcacaaccactctgtgggaaggagcattatccccatttgatagatggaaaaaccaagtcttggaaaaacttaagtaatttattcagtgtcgcagccaacaggcgacagcaacagtattacaacctaggtctttctgacttcaaagactgtgcttaaaaactataacatactgtcccatttctttatttcttaatgtgttttgatcatgtcttccttgtaagtccaaaacatggtcttggtttttaggttctatatgggctagttctagttctagctcttgatcaataaattctcacttaagctttggtggaattagcacaatatagctatccattggctatatatggctatatattgttttattttcctttctctttttttttcctgtgaactgtttctattttgttttaactggtactattataagtagtttgttctgggaataatttatcttgtatttactttgtgttcttcctccctctttctccttctctcttttgctcattttaggctagctctttcttgctctctcttttttcaattaaaataaaatagag

SEQ ID NO: 44431 - DNA, 1900 bp, Homo sapiens
gagaaaggggcatgaaaacaaaatcaccttagttgtcacgtttctagtgagaagattccaacctgaaggaaaatccataggaggtgataaggatgctggttgactgatatgcgtaccagcatagtcacaggatgtgcagatcgtggattgcagatctgggctttgttcacagtgaaacaaacaatgctgcctgtgctgctctagtcacttaaccggacatctccctgatgctgtcaacttcagtcccttttaactggtctcctgctgcttcccttgtccccacttgctctgttctcaacatggcagccagggtgatccatttaaatcttaagtcagatcgcgtcacttctcttccccacactcacggtggctctcgtcgcacccagagtaaaagccaaagtcctcatgaagatccacagggccccgcccgcccctcaccacccctctggcctcatctcctgctcagcccagccactctgagcacactggcctccttgctgttcctctcacccctataaagctccccaaggcccctccttccctgtgtgtctccatgtctgatttctcacctctttgaagtctgctgaagtgtcactgaccaccctatttacaattgtaacctgtcccccagccctaaccctggcccttctgacccctctgaccctgtcctaccttttgttgtcatgactgattaccttctgccatgatgtgtcatttgctgttgtttcttgtcagatcctccacactgctccccccaccccataggtggctctttttttggaattaattaatttagtgattttttttctttttatttggtaggctctttaaggcaggaatcagcttctgttttgtttaacgatgtgtctcaaatgtctagaacagtgcctggtacaaagaagaagctcagtcaatatttgtcgaatgatttgtaatttatttgctcttactagtacggcctagttaacttttccccactaccaagtggattttgtttatgagaaagaaaggttgatcctgtcacagcctaaattccaaatatagttgccccttggtatcctcggggaattggctccaggagcccccacagatgctccagtccatgctataatgtgatgtagtatttgcatataacctatgcacatcttcccatatatgctagatcatctctagattatttataatacctaatgtaatgtaaatgttatgtaaatagttgttctactgtgttgttctttaaatttgtattttttttattgttgtcttgttagttttgatctgcagttggttgaatccacagatgcagaacccacagatacgaagggccaggtgtatattttacctgttatttgttttcttcaaatgacgtattttctctttgaaattcttagagcagagttctataaaatgggcacaataattagaaaagaaaatttgaaagcgacttttcaaataaaagaaatgtggcaaaagggttcagtcacatattagaaacgatttgtaatctgcaaggctaaagtggaggataaaaatgttgtaaccagaggataaggtccactggttctctggcttgcatggtctgggtgcattccacttattcctaacaacagtgacaagttctccatcattattatcttgggggaatttcagatacccccacaattgtacatgccctcagcattctgttgcctcttaattcgagaactaaacacacacagcacaaaatgctaaataaaagcacatgatagaatacaagatggaaaagaataattcctaaaaggaccacaccgcagaaggtttttagttttttgttgttgttgttttttgttttgttttgttttgttttgttttggtcttgtcacctagcctgtttttttcctgtgcacacatgcatcattga

SEQ ID NO: 44432 - DNA, 471 bp, Homo sapiens
tgctgtttagcagtatctacctagaatcttgtgtctcacaagacttgaccagattgataggcacttttcaaatgccctgctaaagctgctgaatccctgaatgatcaaagctggcactgactttggcagcggccttgacttttagagcatagcgtgctaacaaagaggagcttgcttcctccaaacagtaatagggtaatgtccagggatcagtgagcgtgttcctttcacccagtactctgcaccttgcatctcttcagcctcctgccaccttctactgttcgacacctcttgtcctggtggtgagggagcaggcagagtctttggatacagctcagctaagtggcttcaaagtcaggcaggggaactggtagctgagcctccattgcctggggttatctacttgtaaggtttttctgccttcctaattcttattactactattttactgccactctccctccatttgtg

SEQ ID NO: 44433 - DNA, 1208 bp, Homo sapiens
ctataattgtcgtattaatctctgaaggtatcaggactttacaaggttcctgtgccttggccatcattgtgatcatttatagtgactaatcaatttgacaactatgtggcatatgaatggtaagcattcttggcaagcaaagggaagaaatgtcttatctgcatttaccagatctcatgtcttggctgtttgcagttatttacccctttcttccattaatctaaacttccaagaccctaagctcacattgtatcctgtattaacttgctaactaacctcctgtttttgtggttttctttctctgatctaatcagtccaatcagaagaaagattacacttacagatgcacatgctgatgtcatgacatcatcctcttatttaaggatctccctttgcttccctatcaagtctcaacttctctggccatctagacctcaggtgaggtccttttatcttagcgaccttgttctttgattcactgacatggatcttgggcgccattaagatggtttatttgttgtcagacaccctttgttcttttctgtcctttcactgtggaatttttctcttggccaaattctatccattcttggcccacactgccttcctagcattcttgtatccctctctcactgtctcgcctgcacaatttggtatatttggtttactattggtcttctgttatttcacatattacttgtttttccagcaagtcagagttccttaatagaaagtattctgctctattttatatattataattcttagcaaagcaccagcacacagtaagtgttcaataaatatttagaggaagcaggtaaaaggtgtcatgagttagatatttcaaataggaggagatggacccttgatggggtcaaccagcatcaagtgtgcctcttttacaaaaccaggaacccaatcttctccttttttcaaagttgatccaggcttatggaattcagttcataaaaaccaagctcaagggagtgaatgccaattcaataacaatgaaaagtctaacctctaggtaacagaaatatctgtgtcagccattcattgcatcctttttcttgtagcaaggcttccagcaggcgactctagggtcattcgtggccaatatgattcatttgcaccagctctgaagcctagtgcatgccatttagactctagggacaccttgcaaagttcttgctttttactttcacccc

SEQ ID NO: 44434 - DNA, 1227 bp, Homo sapiens
aaggtgaaggttgtagtgagccaagattgtgccattgcactccagcttgggcaacaagagtgaaactccgtctccaaaaaaaaaaaaaaaaatttggtaagacatggcttttggctttttatctccttctccacttattttttacctgtggaaaatgattcagaaaccggacagagctttgcataagaggtgtaaattgtgaagttccttaactctgaaaattgaagacataaatatatagaattttcccttctagtatcactgagggaagaatagtggctgtgggaatttggtagtttgggatattctgaaattgtttgctgtcattttcatttgtaataagtttacttggcaagttctgtaccaaagctatcttgagggcaaagtttgtgaacaccttttaaaacacagtttacgtttctagaaaaaagatcttatgcttactaaacaaaattcctttcagcagttttcaatgactcagagccctgatatttgcatagtgattcggccaatggaagttgactttgagataattttggttaagataagtctcctggtttatgcttttaaaaggttaggttaataaaggcctgtccggaatagtataatgtgcagtggtttccagccacttttgattatctcaaatgccacctatagagctgggtagtaatagtgatattaaggtattatttcagagggacccacaaggccaactttggactcttgacattaaacactgcaaaattccaaagtgcagacagcttggcaagtttgagttctggtgcattctgttcacaactatttttttttttttttcaatagtgcttttgtctttctgctaaaggtcagactgtagttgtcgagtactggtattgttcctgaattattcgggaagagggtggaaatattgacttagtttttctattataatatcctatcacaatgctggattttaatgatttaaaaatgtaaataaaagtatttgcatttttagactacttgtgagcagctgccaattctaaaatcactatgggtgtttgcagctcttttctgggctcattttacccatctttgatcttctatcaacatgcaggtctgtgtgatgggctagaaccagcatgtattttgtttagagtcagactttgttggaatcctggtgtcacaatttggaccctcggggcagcacccagattaagtaacctctgtaatatgggggtgccaccactg

SEQ ID NO: 44435 - DNA, 522 bp, Homo sapiens
gatgatcttcaaacaaaccagtaagtgtgacctggaatctgcatagaacacgcatgccatttgatttcttgtggccttggagagagctccatttggtctagcaaggcttaacctcaattactgatgggtgacaagggaagaatacacaaattgttatggctactcttcccttggcctcagcatctggtgctgtcagtcatatgtagtgttgatcagtggttgtctttcccgtggcttgtgcaatatgtttggattggtgaacctccagaactgagtcatagcaatgagagtaaaaggctgtcttttggtcttgatggatgaattatctaccattgcaaaatagcacctttctcatttaaaataggctgtgccaacccctggatcagagccatttccaaagcatgctgtgagtgtgtgtattcggtgtagtggaaaaaacaaaccctccttcacagccccacatcaggcaccatgtgctgcctccttttaaaggggtcatgagcccagtgttccatcactttc

SEQ ID NO: 44436 - DNA, 751 bp, Homo sapiens
gggtcgagacggccgcgggaagcagcctgcgagccgtgcggccccattccaaggaccccgccagtgtgagtcactgacagcttcgcgaatcaacggtgcccagaggaaaaaacttctcatttggacttctaggcccggcagtggccggcggccagggccccccagtagggcagggcggggcggggcggggcgcacagagccagaggggcttgcgagcggcggctgagggaccgcggggagggggcgccgagcggctccagcgcagagactctcactgcacgccggagggcgcccttcctcgctcgcgcccgcgcgaccgcgcgccccagtcccgccccgccccgctaaccgccccagacacagcgctcgccgagggtcgcttggaccctgatcttacccgtgggcaccctgcgctctgcctgccgcgaagaccggctccccgacccgcagaagtcaggagagagggtgaagcggagcagcccgaggcggggcagcctcccggagcagcgccgcgcagagcccgggacaatggggccgcggcggctgctgctggtggccgcctgcttcagtctgtgcggcccgctgttgtctgcccgcacccgggcccgcaggccaggtgagagatgcacgggaatggggtgcgcgggcggagggacgccgaggggagactgcgggggtcactgttgcgccttctcctcacccctgcctcagtttcctccgaaagccaaactggcatttgggctgagatctg

SEQ ID NO: 44437 - DNA, 1172 bp, Homo sapiens
cacacatacacacacgtgtgcaaacacacacatgcacagttaggagaaagagagatcctggtagtgtgatagaaaaaagaggttcagccaggtgtggtggctcaagcctgtaatccccgcactttgggaggccgaggcgggcggatcacgaggtcaggacaacgagaccgttctggctaacacggtgaaaccccatctctactaaaaatacaaaaaactagccgggcgtggtggcaggtgcctgtagtcccagctacttgggaggctgaggcagaagaatggcgtgaacccgggaagcggagcttgcagtgagcagagatcacgccactgcacttcaacctgggcgacagagcaagactccgtctcaaaaaaaaaaaaaaaagaagaaggttcacatttgtggagtgtgattaaaaaaaaaacaatcctcaacccctagaagatgggaagaaagcaggtttgaggaggaagaagaattagaaagcagtatagtatgactcacccaagaacaatgacaaccagcactgccctttgtcacttggactttgaacaaacagttggtaaaattattttgaggtgtgggtgagtaagggggtgtgccctggggcattacttgctcaaattggtttctgccctgtatgagatcaacacatagatcacacattaactactcccatcccacttgaaaatggcccgtataccatcaggagaaagacctcgaccatttcccatgattattcttgttattctaacatccttcagattgagtgttaagtccatatattatgaaattaatgaatctttccagaatctcaagcagcagttctattataatgtaaatcagaaatctttgagacgctcctttttttttgagacagagtctcgctctgtcgccaggctgcagtgcagtggcacagtctcagctcactgcaacctctgcctcctgggttcaagcgattctcctgcctcagccttccgagtagctgggattacaggtgcccaccaccaagcctggctagtttttgtatttttagtaaagacacggttttgtcatgttgactaggttggtctcgaactcctgacctcaggtgatccacctgcctcagcctcccaaagtgctgggattacaggcatgagccatcgcacctggcctgagaaacttgttaaaaaca

SEQ ID NO: 44438 - DNA, 704 bp, Homo sapiens
atttggttaaacattattctgagtgtaacgctgagggtgtttctggatgaaatgaacatttctataggttgactgagttaagcaaattgccctcccccatgtctgtgggcctcattcaatcgttgaaggcctgaatacaacaaaaaggctgaatataacaacatttgttctctctggctgactgtttttgcgctgggaacattaggcttctgcctttgggcttggacttggactggaatttacatcatttgttcccctgggtctccagcttggcaactgcagatcttgggatttctcaacctccataactacatgagccaattcatttgtatatgtgtatatattggctcaggacagcacacctgacaactctggttcccagctgcagggggaggctacccaagtatctggcagatctccaactatgcatgcacagggtagactccaagcagttcagataaggctaaaataacagaggcttcagctgttcactcaccacgggggaggcaaaattcagaatttgagttcagccaagttaactgcctactaaactaaaaatttgggataagccaggtgcagtggctcacacctgtaatctcagcactttgggaggtcgagacaggcagatgacttgagccgaggagttcaagaccagcctaggcaacatgacaaaacctcatctctacaaaaaaaataagaattag

SEQ ID NO: 44439 - DNA, 2232 bp, Homo sapiens
cttcccgagtagctgggactacaggcgcacgccgtcacatctggctatttttttgtcttttagtagagatgaggtttcactgggttgcccaggttggtctcggacacctgagctcaggaaatccaccctcctgggcctcccaaagcgctaggattacaaaaaaatcctctttgactatcctctatttcctttcttttgctctttcttcccttatcttcctcaccaactttttaatctacatacaaaatattctgtgcattgtggagagcagggaattgaaagtgtggttggctgaataatggtcatccagagatagcagtccctaatccctagcacttgtaaatgttgctgtataaggaaaaacgggctttgtgtatgtgactaatttaaggatcttgccatggggagattatcctggattatctgggtggaccatcacaagtgtccttgcacaagccaggcaaagggagattagacgcacagcaagagaggaggcaacgtggccaccaaggcagaaattagaataatacggccacatgtcaaggagagccagcagccaccaggagccggaagggacaagaagcagattctccctagagccttccaaaggcccacagccctgctgacagctcgcttccaccagtgatacagatttcagacttctggcttccagaacagtgagagaatatatttctgttgttttaaactatctagtttatggtaatttgttactgcagtcacaggaaacaaatacgcaatatgaagaagatgtgaaaatattatacctttaaaacaaggcagaaagaaggaagcaaggatgctgagctcatgagtgcaatgttagtcacctagcacacaaaggagtgaaagccagataaaataatccagaaaaccatgtgtctttcgaaaataaatctaggattagaataggacagactgagtaacacagggaaaagtaataactctgttgatccatctaaaccagatatataatctcctgacaaatagagcaggaggtatgaataggaggacattttagttgtttaactggtgaaatgttagggggtggaagggggaaagagtggcacaggctaaatcggctagatgactcagaaaatgaatttgttttcagataattgcttcctaacgtagcaatgatgcagctcttagtcattccaatagcaaacagccattctgatagcaattccacagagacagcaaaccagctagaacaaaagactgctccacccacaacaaggactctggtgggaaaaagttcctagtgaatgaatccaacataattgactctgagctgctcttgtgtcaaagacaggctatgagaaactggcatggatgggaacagcttcagacattggcttcctgttgtgtcttcttgctgctgtgaaatgaggctctaagataaacagagcagaggcacatctggagaggaaggttaccagaagggtgatgtcactagcagcaaatcagaaccccatctttcagcctagcagggatttgaaggatttgtatcatagtatgcaaggggcttccagcactgcatggcctctatctttaatcaaagtcagaagcctacaggcaggagtgggctgagcttctcatgtgtgctcacatcgtgctggtgagccactgaaggcctgataggaggagagtaagactcaaaaactctgcttaaaatccagatgtgtaaatgagacgtactctattaaagaggacaagaatcaaacataggaaaactattataccactaagatgacacaaggcccaagctgaagtgcttagaagtttgtggatatgaattaacatattttttttcttgagttagcatgtgattcctactctttgagaaaggtggctttagccatgagcttgtactgttggtgggacttgctgtttaatcagtcaacaaatcaccaatgggcacagctgtgtgctaaacgccaacaggaatataaaagcacagcatccctgatcttaaagggtttttgcagttctgctgggaaaattaaacaagcaggaaacatcagcattccaatgcagtaaaagcatattgtgtactcttgcctgttgctgctacaggagtttattaattcatccactcaactaatagttattgaatgtctgcttggtgccaagcatgcttctgggatacagcagtgaacaaaccaacaccaaatctctgcctcatagagcttacatagggttggggaaggt

SEQ ID NO: 44440 - DNA, 2303 bp, Homo sapiens
agttgcccacctgcctctacaataaaaaacgcatccctcctcctgcagggtccaccgcaccgggaagccctgtctgtatcagttaccaaccacaattgcagtgagtacgaatcgtggctttcccacagtcaggaaaggcaagggagaccgacgacccgcttctctaggagtaagtaaagattaaaggtagttcgcggtatagcctaggcagggattaacccgtggtcccagcgctcctgctatttgcattccaaagcagacacctcatgcgctcaaccccgcccgcaggcggctcccgcagtctaagggacctggcgcgagtccgggaagcggagggcgcagctgcgcagggaagggggccgggggcgggaccagggcgcgcgttccggtcccggggcgtggcctcccgcaggtgagtacgctgctccttcggtttccctgaaacctaacccgccctggggaggcgcgcagcagaggctccgattcggggcaggtgagaggctgactttctctcggtgcgtccagtggagctctgagtttcgaatcggcggcggcggattccccgcgcgcccggcgtcggggcttccaggaggatgcggagccccagcgcggcgtggctgctgggggccgccatcctgctagcagcctctctctcctgcagtggcaccatccaaggtgagaaacctggccaaggagggctcttatctctgaggagctggggtcctgggcacgctgggcagacggtgggatccgggcaggtgtgcgaaggctgttctgctgccggcacccatctctacgaatcccttagcctccccttggtggctttgatgtgaggtctctgcgccaaggaggcacccaggtgggacatgcgggagcagctgaagtcagcggagccgggcagaggcagagatttccccaaagaccccacttcccgtagaggctgtcatgctgggcacctccaggccccagcgtgggttcggggaaagggagggaaggaaggagtagctgtgtctaaagggtacgcagaggacctagtcccctccccgggcttggttgctttgtaaacactaagtcattaagagctttttgccaactccggagacttcctccgctggccccgcggggccggtggggttagcgagctgattgcgcagggcagggcggagtgggtgggaacccgcggcccgggagccttctaggttgttttttgcgtccctctccaactgctggaagcctttcttcgggttctggcccctgcgttcgagacccacccgggtcccgctgctcctggcacccacagtggaaggcccggggtatgaaagtcagggccggtccctgatgggttctggtggtaatgagcgctcaggcccgttgggcgccacgaggatttacgagcggaactttttggaccctgccttatatttgaccagttgaccctctgggcctggggttccgggactttcctagtgtgccacccggagcggccactggctgccacccaggtctgcaggccagaggctggctggcctgggaacagagcagcacttgcgcccggccgtcgcgttccttggatgtgctgctccgggtgtgctcgaacttgtattgctgggagtgtgttcttccgggcccagcaggcctcgctgtggccgtgggggatgtttgacctgcgatcgcgccactgtgatcctaaccgaggcccctctgtttggggcagcctgggtagcaaagggagcttttaatttccctcagaaatgcgcatttctcacttttatcctcctcttcataaagacgaagtaaaagagcaagtcacagtgggttggaattagatggaagaatgtgattcttttccctctgcagttagggaaaagggtgttaatggtgtaagcttgaaaactgtgcaccgctggtatatttttttttcttaatcagcatcagaataaaggcatttagttccaggaagtattgaaaactgtaatggacacctctcctctatgtcctttaaagttggaaacttaaaattcaggagcaaaggttagtatgtgcaaactttaaaaaaatacatgttggtatagctgattcaacatctttatgattcagagatccctgtaggaagcatgccccgattatttgtcttgttcttgtttactactcttgggggattgggagatccctggattataaggcgaacttgatttaacaataaggaaaaatcaggttacttgttaactatagccacttaatattgcaccttgttcctcatcctccccccaccatacttttattcccttgcaaagtaactttcc

SEQ ID NO: 44441 - DNA, 640 bp, Homo sapiens
tatgagataagagcatgagtaggtttaatatccccctggtatacggcagtgcaagtattgccctgtcttctctgcttggtgaggcctacttttccccagaattagagtaaaattattcagtatccttatattgtccttacttactcctgcaggttcatgaatacttaggggcagaatgtagggaggacatgccattcatttctttgtggtttttaggtcaacttcataatataagagagggataataagttagcttgtcatgctacatgcttgaaagtctgtcatcagtacagccacctatccaggccagacggtttccctgccagttggcctccatgggacattctccaggaaaccagcacatgagcagggaaaatccctgccattgttgaggctatcgttgtgggtgaaaagggaatgtcccttgtggtcctggaatctccctgtggcaagctctgaatagggtatgatgaattgaataggccaggaaggatcctggctcagggctagagtgggatagaaggccattatgaagtgagaaattagaaaactggtgtcaggatggggatcgctattttacacacttgagaatttagaaaggaattactgcacattcctaaactgattttttttttttttt

SEQ ID NO: 44442 - DNA, 825 bp, Homo sapiens
ggtttctctcttttgcctgctgacctccatgtaagatgtgacttgctcctccttgcctcctcccatgattgtgaggctttcccagccacgtggaactgtaagtccaattaaacctctttctattgtaaattgcccagtctctgctatgtctttatcagcagtgagaaaacggactaatacaacaggaaactacagcttttccagaaaccttgcctgtagtctactacttatacctcattggccaaaactttgacatatggtcacctagctgcaaacaagagtgagaaatgtagactttagctaggtgtattgctacccaaaacgaaattcaggttctcttgtcagaaagaggaaaatatggctgttgggttgacaactagcagtgcctaccacaaaaacactttttaaaattgcagccagaaagggcttaactcccaggaaccttggagactgtgagaaaatgaaataatttaatattttgaacataattatttacagccccaggctcatgttcaggttcaggctgagggcaaagatatgacctttgctcccaccagcaggcaattagacatagttgagcaagggctagcttgagtgatttttaaagaactaggcaggcaccttcctgcttatgctgtaggatacctgaaaggcaccagcaagcaacgaacaacctcagaagaatttaacaatgattgctgatttttgtatttggtatccaattttaacactaaaaaattcctgttggaatgggccagttgcattcaaaaaagcacagttcaaatagccaaaaaaactttttaaaataaaaaatccaaactgact

SEQ ID NO: 44443 - DNA, 1517 bp, Homo sapiens
tccttccttccaagtgtctgttctcagcttctgaccagaggctatgcttccaagcctgtcagaaaggccaccctgcaggctgtaacccttcatgagaaataaagcccttttctaaatttattaacctcctcattcttcagttgacataagtagagcatcatagtccccacaaatcatttctgggatactctgttcttatttgtaaaacaaggagataggaaatgcatgctatactaaaagtttgttcaaagaacatccgcacgtgcaaatgtctgagaccagaggctgcaagcctccctgtcgctcttagggcttcggtagccacattgccacagctctccacgccctcaggtaacgcccctccgcaggccgagacgtcggcacgtacactgtcaggtcttcccgctttccgtcgcttcctgttccgtcttggtcccgcctgccgctggcgccgttgtttccggctcaactggggagctgctggagctcttctggcctctggttttccgactgcttatccgacgctcctccctctgtctctgtagctggagaaggtagtttccaggaaagttttccggtttgcaggccgcgcacatcgggcaggggccatcctcggtccccttgctcgttgctcgcagccccgttcggctacaagtgagtttcagggcgtcatggccaggggccaccgcggccagccgggtgtgaggctgcctttcgctgcccgcgcgctccagtggtctctgggtccgccggcgtccgtttcggcctgaacgcagcccctccgcggcgacgagcagtctcgcgccggagctcatggcctcggaggcgccgtccccgccgcggtcgccgccgccgcccacctcccccgagcctgagctggcccagctaaggcggaaggtggagaagttggaacgtgaactgcggagctgcaagcggcaggtgcgggagatcgagaagctgctgcatcacacagaacggctgtaccagaacgcagaaagcaacaaccaggagctccgcacgcaggtgcgcggtcctcctcagccccgcgccccatccagcccaggcgaggccttcgaagcccgtgatagcctcggaaggggtccctggcaggggctcagaactactgtagagtacttaaagtaaataagtagaagctcagcgcagttacaattccaagtaccttaggagcaaacctgagttcaggttacttgatttaaatcaatgtctcgcggctggcgtgaattgaacttaagtactgtggctacattgtcttcattctcacttgacctaacatcccattggcagtaggcgcatttactgtagatcacatttgagtttattaaaatgctggacttgagtcagaatcccatctctgctattcactgggtgtgtgaacttatataccgagtctcagttccccattaaatgagaatgatagctcacagtagtaaaggtgaagtaaaacaaacaattttacaaacttttgaatgctatacctgtttaaggttgctcttctg

SEQ ID NO: 44444 - DNA, 1955 bp, Homo sapiens
tgccctactttgaaggcctttgtgactcaaagatttttttaatttaatttttaaattgagaattacctggcttgggcttttggtctttttataatacgtattgctgtctacttttttttttattcttggctgcctcaagctattcttgcctccaaaaggtgtcagcatatgaataaaaacagcagaaaataattaccctaattaggtcaatgtattaagctgtttctacaactgtttctcttaaacaccttatctttgtagtcttggctcattagaaattcgactagtggtaagtatttatttttttccttcaagggggtttttgctttgctaagcctcgggcatttggttcgtgcaagaaatcacagaaactgctccagcggactccgaaaggagcggaaaattcttttgtttgggggccatgaggggtgggggaggggtggggattctggtgtaagcttttggcttgcattcgctttctccctccgaaagtgggcgacatcaagcaagtcccagttacagaaagaacccactgcagggcgtccagtcacttgcccagtgaaaagactgtaatcagacaactttaataaagggagagcaggagagtggtgacgaatttccacattccgaacaagcttgtcgaaagaggagtgcagggaaggagcaagaatgaggcactggaagacggtgagcggggccttgccacagaatcccgggcccacctgctttctcacagtcgcgacagccggcccggagaagggcagcccagcgaagggcacgccccgcgcgggtgccagggaggccggcaggggcgtccgcggtcgctgctcacctgcgctccccgctgcccggcccagcccgcctcgccaccgagtctggaagcccacactcacccctttacccgggaaacgcggccggagccggcggcgggtcgggagtccgagatggtagatccccctccaggcgcctcgctgacattttgtcccggacggaaaacctccgcgcgtgccccttaaagacacagcgctgcattcacacgtctgcggggaaaggggggccgtcacgtgtggccttcgcccgaaagcggtaggggagtcgctctgaaaccgccaaggatcgcgagcgacagatttgtgttggccagggttttaagatgacgcaatagctgagtgtggttgaaatgtaactattgttttacaactttgcattaaccttccaagacctgaattcccgggcctgagtctcagagcgcggtttgcatctttgcaggctgtaggcgcatgatgtcacaagttattggaagaaatccctccaacctaggttgggacagatgaaggcggcgcttattggtgttcaccaaaacaccagcatggtgtaccagctttggctagatgatgctcaggtaacgaacaacccctgcaactcagtggcttaaaggtccatttctcaagcgaattactgtggctgcagggagctttggcagtactccaccagttttcttcactccaggctgaaaggtcaacttttctgggccatgctccctgctgggctggtaaaccaactttgagggagaagggggaagtccagatatgtagtgtttgctatttctatgatgtaaatgctcccacaatggccgatttcaagctacaaacagtccaacaagtggcttgccaagttcctggaaatttaacaattagctcctgtacatgactggcacaagctgctttccaaactcacattccgcatgcctcagttctgctcactttctattggtcaaaacttgctgtcagtgggtggggaagtgtacccctctcttaaggaagccttgcaagtcttgtgacaatgaaacaggagagttccctgatttcctcccggcccccgccctcccacagccctttgcaggacgtgcaacagggttgtggctcgtgtgttcggtctctgcctgctgaaacccc

SEQ ID NO: 44445 - DNA, 548 bp, Homo sapiens
cgatgggatatttttttcctttctgcaaatacctctcaattcggatatgacacagagttcccattttccccataaattacatatttatagcacacgggaatagcaggaatgctgtatgtctcttaaaagtacttctgtatttgaattatagagaaaatgacttgatgggagtctgaactttgggcactcttgatgtagctggagcagagaggggaacagaactctgtgttccaggcccaggcactgtctgttctgaacatgagcctgccactgccaactgtgtgcatgtggggaagggtgatgagggaaggatgggcatgagcaaccaggatcaaaggtcatgtggtggtgagaacatagcttggacatcctgcatcttggattctgttctgctgtgtactagctctgaaagcttgagacagcttcttagcctttctggtccttttgctttttcctctgtaagctggcataacagaaggagttacacttagagttatgataaagatttgaataaggtaatgcatggaaagcttccacactagtgtttt

SEQ ID NO: 44446 - DNA, 1047 bp, Homo sapiens
tgctgcaaatgagaatattctacattttatgcttttacaagaggagaaacacaccacactacagagagactgactggcatggggcattgatgccattgaatccccgtccctttgctttgagttagtttgcacatgacaaaaccttttgataagagatactcacacgtccccccaaatttcaaggaaaactgtgtttcagagagatgtcccgcactaatgcagggggtgtttccttgaccccagtttaacaagcccggtcctggcacatcccttctggggcttcactgtaaacagcagcttgacagagcaaatggttttagagccaaagggacacatttgaaattggctctgcatactacctgtgtggcttgggcaagtttcttaacctcttaaacctcagcttccttgcctgttccaagcaatgaggatacctccccttgtgcaagagtgccatcatgattagactgcagatgtcatgctgccagcatgtgggaatacacgtaagagatggctgtggagcaaagttcatccccttggctgcctaccggagagaatgccaaaccacagacccactcattctgtatctattctcccaatgagctcaactaagtattaaggaaataattttagaataatttctactgaaatgactggtaagtgtagggtccacaagaaaattctgattctaggagaattttcatccaagtgaatcattagttgtacagtggggtatctggaagaggtacgtggataatcagagtcagcttcagtgaaaacccagcaccgctggggtgtgacaggggaaggtctgctggcactgctctcggcacagagcatcattaagtcggtcccacaatagggttcctgacggcagatgctgctgcagccaggaagagtctctgcttgtagagcaaggagttatctccatgctgggttgctagccataggcatgcagagagcccagcaaaggcaggtgagccagtctgggggtgtgttcagctcaaaatgccaaattatacttgaagaagaatggcccagagccacctc

SEQ ID NO: 44447 - DNA, 1787 bp, Homo sapiens
taacagacatgtttgatgcttgggatggtaagacagttactgttttgtcacccaaagaaaattgttatactttacgaatattatctttagtgacacagggtgagcctaaaggtaaacaaaatatatttttaaaaatgtggctgtcagctttttgtggccaagtggggtggggtgcattctttgcatccccagcagctggcacagaagcttgtgtgcagaagacttgatggatttttgatagctggataaacgagtctctgcctcttcaaaggacacgctgccaaagcttactgcagtgtttttctgtcgttggaggaaaactctagaaagaatgcaaaatgtatttagtttactctgaatcacaggttcttctgataatgtcactgataagcagcttttcaaaaaggacctgtttgcatttcagaaactagtgtttaatgacttgtcctcatgcttcgcccagggtgtgcctcctctaattctgatcccaaacttgtcccagacacccccaggcttataaatgctcctggggtctaagttcaccggtttcttttgattcttttctgtctttgcagcctttgcacatctgccagccctgatgcaacatttggctgacaactacaaacactggaagacactagatgacctaaagtgcaaaagtttgaggcttccatctgacagctaaagccaagccacagagggggcctcttgaccgacaaaggacactgtgaatcacagtagcgtaaacgagaggccttcctttctaatgacaatgacaggtattggtgaaggagctaatgtttaatatttgaccttgaatcattcaagtccccaaatttcattcttagaaagttatgttccatgaagaaaaatatatgttcttttgaatacttaatgacagaacaaatacttggcaaactcctttgctctgctgtcatcctgtgtacccttgtcaatccatggagctggttcactgtaactagcaggccacaggaagcaaagccttggtgcctgtgagctcatctcccaggatggtgactaagtagcttagctagtgatcagctcatcctttaccataaaagtcatcattgctgtttagcttgactgttttcctcaagaacatcgatctgaaggattcataaggagcttatctgaacagatttatctaagaaaaaaaaaaaacgacataaaataagtgaaacaactaggaccaaattacagataaactagttagcttcacagcctctatggctacatggttcttctggccgatggtatgacacctaagttagaacacagccttggctggtgggtgccctctctagactggtatcagcagcctgtgtaacccctttcctgtaaaaggggttcatcttaacaaagtcatccatgatgagggaaaaagtggcatttcatttttggggaatccatgagcttcctttatttctggctcacagaggcagccacgaggcactacaccaagtattatataaaagccattaaatttgaatgcccttggacaagcttttcttaaaaaaaaaaaaaaaaagtttatatacatgtttaaaatttttattaaaatccaaattttctgggtgtaagcccatgcagtatgttgtgccatgcaccatctatacgtaatattttgggaggggataggggaagtttcaaggttcagatatttttaaccagtctatatttgaaatcatgccattagctttaacaatgttaaaattgtgtggtgtaaatatatcagaaaataggcatatggggaggcagtaaatact

SEQ ID NO: 44448 - DNA, 1685 bp, Homo sapiens
ggtcctcgccttaagtgatgacattaccttgtaaaagtccttttcctggctcatcctggctcaaaaagctcccctgagcaccttgccccactcctgcccgccagagaacaactcccctttgactgtaattttcctttacctacccaaatcctataaaacggccccacccctatctcccttcgctgactctcttttcggactcagcccgcctgcacccaggtgattaaaagcttttattgctcacacaaagcctgtttggtggtctcttcacacggacgcgcatgaaagttcttgtgtggcatacgaaataaatttgggacctcaaaatttccaagactgcaaaaattattttattcacatttcaaatgtaaatttcattacacacggtctattcaattattcgggcccatgaagaaagtgtgactatgaaaccaaaaacagcagttaattagaaaatcatgttcttgaccttgaagcagattactttttaaaaataattatatcctttttcggttgttggataagtaaattaattttatattccctgaccaagtatcagtagacgccaggaagagacaccaattcaaataaaccaaaagtggaaagctgcggtcacaactcgttcgtttctagctaaatcgtatactttttaagtggaaatgaagatagtttcggtagccagaagccctaagttgtcacaggtcccaataggactgctgaccagctgagcgtccctgagccaggatctcacgattcagctagccgtgggacggggccgggggtctgcagctccagggtgcgcctggggtcccgccgggtctgaggagctccggctcccgcgccctccgcccccaccgtcgtgagaacagcgcgtggcacgagctcagcagccagccccgcctccgcccgggtccccgcggtcggaacccaggaaggccgaaccggaacgaagccgcccctccagcaagctcgacggacgcagagcagacccacccggggtttacctcggccagtccctgcggttctcggcctcccccgatcagccatcgcaacatccgggcagcggcggcgtcttgcccggtccagccccagtcagcccaaactccgccccaggctcggcctcctccttcctccccggctgcagcgcaactgagacgctaatacttcccgccccagatcagcccacgggccgaaggaatgcagaccacagttgagggagaatttttgtccccaaagcgctcccgtacccagccacggaggcttagtttgggcagtcgcttggggtgcggcggccgacggcgggggcggctgcggcgattgcggggcgcgcgctgctccgagtgagcacgcgcgggagcgccgccgggtagcgcacggagcttaggtagctcgagcggcccctggtggacgcgcgcggagcagcaacccgaccccggcgagcaagcgcgcacgaagaataatgcccctccctgtgacatggctttagtatcctccacttcctagggtaccaggaaatctcccctgctttcccaagagcttgctgaagaaggtgtaccgcagtagacttctgcatccagacaaatccagtggctcatgtgtacagccgaataaatccggccaacatttactgtgtgctatagtacagctactgtgctaaggctttacataaatcctcatggtaaacc

SEQ ID NO: 44449 - DNA, 893 bp, Homo sapiens
aaaggaaagtacacttggaagagacctgagagggtaacctaaagtacaagtgtggcgtttgaccttttgatttggggttttatatgttggcatgagggaagagagagaccctctcatattgttttatattgttttatactcagtacctgttttaagaaaaaaacaagaaagtgaaatcaaagacaggcggcctggcaccaggcccaaaaccaggcctgggcctgcctggcctaaacctagtagttaaaaatcaactcacgacttagaacctgatgttatccatggattccaggcattgtaaagaagaacattttgaaactccctgttctgttctgtttcactctgacccctgtcacatatcccctagattgcttaatcaatcacgaccctttcatgtgaaatctttagtgttgtgagcccttaaaagggacaggaattgctcactcggagagctcggattttaagacagtagcttgccgatgctcccagctgaataaagcccttccttctacaacacggtgtctgagaggttttgtccacggctcgtcctgctacaggcatacttccagggtcttgtgtccctttccccatgactcttcacttagtgtgggctgccttcatgtgtagtgctctccttacacttgggaggtgagcatgcacagtgtgtttaggaagttgtatgtatgcctgcctgaggcattcttccttcttccagtggaatgcccccaggtcattctctgccattttctcttaatgcacatgcccgggttcacttgctcaattcctaacattttattggagactgactgccaattttaagtattatctgtttgggaaattgctgctccctgctgtctgtgatcaattatcactttagtgtgacaaccggggac

SEQ ID NO: 44450 - DNA, 925 bp, Homo sapiens
cacttggaaacttttttggtgcagataagtcacttagctgaaataccacatttagaaaatatcaattctgcattttctcctactttagtgaaaattattttctaaatcattaataatttaaatacagaacaaaagctactctgtcaaggattcatatttacaccatgcacttaagttttaaattaaggtacaacatacaactcacagttgtactatctgtaaatagcctccaaataaatcacagaacacataaaacagagctatgttagctagttacagaagaggtgaccaatcattccagtttgcctgggactttcccagttttagcagtgaagtgttccacatcctgggaaacccctcagtctcaggcaaactgtgataattgatgccacctagatatcctcccccgctccaaaaaaaaaacagagtgttcaacagttctgtgctgggggaaaaaactgagtattatttggtaactctgctagagctgccagattagttgtgaccctgtcacagatatcaataggtctagcaatctgctggaaacatagatccaaatcttaaaaaaaaaagaaaaaaaacaaagagccagctacacccaaacctgccaactaatacccactaccagtgagtcacatgtgaacaaaggctgctgctcaaagaaacttagtataataacccacctagggccaggcatagtggctcacgcctataattccagcactttgggaggccacggcaggtggatcacctgaggtcaggagttcaagatcagccaggcaaaaccctgtctctactaaaaaatacaaaaattagccagccatggtggcggacacctgtaatcccagctactcaggaggctgaggcagggatgaacccaggaggcagcagctgcagtgagccgagatcacaccagtccactcca

SEQ ID NO: 44451 - DNA, 3629 bp, Homo sapiens
tcaggaccccaaaatcactaagccaaaaagaaaagtcaagctgggaattgcatcgagcaaacctgcctctcattttattcctgaataagatagctacaaagattaaaaaaaaaaaaaaaaaagctacatacctccctgacaatttgcccccaaggaaattccttgtgggcctcaagaccttcactctaaaacagttctgttgtatttcaccctggcaatgtaaattgatagcttatcttcacaggtatgggacaaagaacagaactcaaagtcacccctctacccacctgagacaaatgcgtaactgactgcttcctctgccctactgtgtatgtaaaatcgcagattcatttagccgactaaggcataagtgactattcttctatccctctctcacatgtaaattgtgtattaagtgaaaagctgatcaaagactcaaaagaatgcaaccatttgtctcttatctatgacctggatgccccccaaccttctagttgtcctgcctttctggagggaaccaaggtacaccttacccattgactaatatctgaggtctccctaaaacgtattacaccaagctgtgccccaaccgccttgggcacatgtcatcaggacctcctgaggctgtgtcatgggcacgtccttggcaaaataaacattccaaattaagacctgtctcagatacttctggttcacaagttatttaaacagcatctcacagcctctggggcgagcttcggggaatctgactggagaaagtgaggccacataagtttgctgagtgtgctagaagttcaggcccagttctcaaagcctgccagtcacgccagccatgttaggtcacacggctccactacggtcttttttgacgaggcccagatcctccgcatccccctaaacttcagagcctgctttcaagcccatttgagagcacagctgggatcccgcttccccgggccaagttcagcaaggagaggccggcgcgcgcacacaggaggcacgggatcagggcccggcccgccctcgcaggccgcggcccaccaccttcccaccgcgggcgccgagaaaccgggccaccgccgactcttccggcaaatcagagcggccagtgagcggagagggacgggaagcggcgtgcgaggctggcgggctcgggcgtcagcgcgccccgctgggtccctgccagtcccagccaactgcggagccccgggtgcggcctggagttcggagcccgcctcgggcctcctcgggcctgcgctccgctcagcctcgcgggccgccatgaggtgacgaagaggaggtgcagggcgccgctcccggctccttaccgcttcaccacgccggtcttgatcttgatctgtctcacgcgaggatcggccatggtccctcgagcgccgcgagaaggaggggcggagagccggggtaaccgtggagggcgacgcgcagaggctgcggctatttaggcgtggtcgccggcgcgcatgcgcaggctgcgcggcccgtcgtccccgccacgccccgcggggcgggtttactagagggcggtaccctgctcccgccagtccctttacccctcgtgcgcccctttacccgtagtgaaacgtgccctcctcctctctctcggactgcccctctttttacttcaggcgcaagttacactatcccggtctccacagcctgggcctttggggaaactaacgtctctctgggacgttgctttgcgggattatctgcttaatggacggagtgacctaaaaaatgtattaagggtattttcgatgtcgttatctggtgtcagatgaggcagagtgatgcatgtgtagtgaaacaaactgccatcatgcacgcagtcaagaaaatccttgccctttacctcaaatccctgcaagaaggtttgtagataacgtgcctttcaaaggaaatgactaacagaacttcttcagatgatcacttatagtgtatcctaaatatttaacttacaagaatgtgtgtcgcacacaaaaccttgggcttcctaatcagacaaaccggcttacaatcgaggttccaccctttaatagctagactattagctagacaacactgatacgtatgctgtttagccttgcagctgatcagtctgcaaaatggaaataataatgtccattttacagattaggtataagggttaaaacacctagctcattgtctgacgcatggtagatgctgaacaacatttgactattttatatgttcaaaaatatatttgttgcataaaatgaggcacatctacagtgagctctagcagtcccttcctaagagaatctcctgaggaatacagggcagaatcgccctttttaaaattgcttttctttttctttttcttttttttttttttgagacagattctcactctgtcgtgcagtggcttgatctcggctcactgcaacctccgcctcctgggttcaagtgattctcctgcctcagcccctagagtagctggaattataggcgcgttccactatgcctggctaatttttttttttttttttttttgtatttttagtagaaacggggtttcaccacgttggccaggctggctagaactcctgacctcaggtgaggcccacctcaccctccaaaagtgctgggattacagtcatgagccaccgagcccaccccctttttaaaatttcttggtaccatccttcaaagacacccatatgactgtctttttccttccctagcctgacttactcattctcactttcatgactggtcctggaatccccttctatcccgccagcccaaggccgttactttaaatccaggatcaaaactgagcaaagtctactatgactcaccccacctgttcaatcttccctggatgctttggagtcacccagtagtcatcattatttttagtatatttctttttcaaattattgtttggtccttcgtaagggttttgttcagcttcgtagttataaatcctggttcataaacatgtttagaggcaagattcttgtcttccataaatcttccttccccaacctcctccacctgtgttttgtgcacaatgggcacagaattcaataaatatttttattctgctggctggtatactgatgtgcaattccaagtcacacagcagcgctgtgaaatactggagggaggggtagataaaacacaacagcaaacttaccaaagcaaaatgacatgcacacacacacacaaacacacacacacacacacacaaacagcagctacaagccacaaaccaaaagatggtgcagctagggcttttgctaccgttaaggtctttcctttgattaggtagcaaaaaccatgtaactcgtcatattttccttttttgctttggtttcaagaagctcagagctcagttttgtgctaatttgcaggagtttctctcaaactaggcttcccaatacaaatacctgctatttccccccaatccccaattctgcctccctccttttgccccctttctctttgttttaattgatttgtatctgtgcctttactataaatcaataatcagtaaatgtcagcagccaaaagacctctgctgctactgccattgtgtgtttccaggcccattcccaggctctggaggacactttgtgagt

SEQ ID NO: 44452 - DNA, 792 bp, Homo sapiens
caagtgtctatgtggcgtgtgcgtgtgtggtgtgggtgtgcgcggcgtgcatgtgtgcgtgtgtgcacgcgcgagaagtgcgtgtgtaggcgcgtgtgcaagtgcgcgcgcgtgtgtttacacttccagaagtcaaatcctttctaggactcccccttgcttcacccggaagtgttcggtgacccctccacccaattaatgaaaacaaagcaaagggcccgagcgggcctccgacagcccggggcttgcggagctggacgccgacagggcgtcagcccggtcgctcgcggcgcggaggctgctgcggttcggagctggggttctgcactctcgctcccggctcccggctcccggctccccgccacccgcagcctcctcgcgccgccgccgcgggcaccgccggggcttcagtgacaccaggcacccgccccgggccgcgggaggaggaaattccctgcaaaatagcaatggttccgagaaaaggatcacaacaaaatattgaataaattcccttttaatttatttgatcattccacattacggggctatgaattgctcaaatttgataacaagtactcaattcaactcattatgtaagttaaattagacttcgataaaatttcagtggcgcgcagtggttcctcgaatgaaatgtaatttgtgcaagaatttgttgtatctgtcacaaatatttccaattagcgaccgtaattatttgatagtttctgcaattatggcttaaacgggtgaatttgggactgtggaggaccctaattggcctaaatttgatat

SEQ ID NO: 44453 - DNA, 558 bp, Homo sapiens
gccttggcccccatgagattttaacataattccttcaaaggtggcctgaggggctgagtaaaggctagacaggaattttagggttttctttttctttttctttttcttttttttttatgtctttgggcaggactctgcgtgtgggattaaccaaccaactttcttcccccaacagacatttttgagctatactgtgacctgtgtcagaaaactgacgctgacaacagacctgcaagtacgaacttgttatccctgcttcacagataaaggggctgactcacaggaggattcactgatgcagccaggattgcaccgccagctcagagaggtcagtgagggaaaccccactctctctgactcaaagttcactctgacttgaagttcactctgccaggggctgccctgggggacaggaaagaggtcctgccttttttttttttctttttctttcttttttttttctttgagacagtcttgctctgttgcccaagctggagtaaagtggcatgatctcagctcactgcaacctccacctcccgggttcaagcaatcctcctg

SEQ ID NO: 44454 - DNA, 762 bp, Homo sapiens
agactgctgaaagacatacacagttatggtctaagactgttttatagacactgctctaatgtactcccgtaatggacaatacactgtcttgctggagcactctgggatatgtgtaagaaaaattaaaccaaacatctcatctactggcatcccttactgactaatcagtaaaaaataaaacatataaacataggaaaaaatattttgaaatgtgtcatgtggcattacagcttgataattccaggcagcctcaaactgtggacttcggaacatttgccttccaaccacttggagtgctgcctaaaatagagattcctgggctctttctcagatttactgaagctgagtttttggggtgggttccagaaatctgagttttacacaaactcacacatgatttttttgtacagaaaaaccttagcgatttcggagctacatgttttttgttttctgctttttggccactgcacttactcataagtgctgttatcagaggacatgcaatgtaacaaaagcaaggcacctcagtttccacgacattgaacacaaacctccttcctaaacccttcctggatatttcacagagaatcacatgaaagttttcctggccctgaatgaaactgggatccccacagctaacgcctctaatctcctaccttcgaacacatgaggtcttgccctttcacctttgcagtccattcatatactggtttaatgctgtccattttgcccttgggatacactttatttatgtattagttt

SEQ ID NO: 44455 - DNA, 1245 bp, Homo sapiens
ggacataatccaagaacattaatactggtgtaaaccagtttgtccattcaaacagcctaaatccacctctctgctcctacactccggggtcacaaaataacttcccacaagcaacactcgcactctcaccttcaccaaaacactcctttcaccctaatcagggaatgtattaaagtctgatccggcgaacggtaaataaactagaagacgatgctcaaaattcagactcctgagcccagcccaagtccaattcaatcagtgtcttcaggggtgggatctaagctcaccaagtggtttccttttcactaaagtttgaaaactactagagacccctacacacattcgccccaaactcccacaactcccaccaccgccaaccaaccccacctacccacccgcgggacacgttaccgccctgccctgctcagacctcagggcgaccccgctcctctccaggaagcccaccctggcgcccactcctccgagtccgcagctcctccctcccatccccgcaacccaaacctttctcctcacttcttcaaatcgctgctaaagaggccgaaggcccccgagggggaaatggttgaggtcgcctcctgacccagctccgtcgcctcccctcctccggactgctcattgtaaggaaaactattgctggacattgccgcggtgctggcgggtgcggggttggtcctgccgggggttctctccaaaaggttccagtccagagggcacggaacaaaactagttctcgtacggaggagcgcgcgcaggcgcttccggactcgtcacggctccctgagccgacctggcagtccaccccctgcgcatgcgcagtgtgcaggcctgctagattaccacccgggccatccaggcctgcgcggactttcctgctccgggctttagaggtagctgagcggctgcgagccggactgcggaaggggaggcagcgggtggctaactgcccggctcccggcccgtttgaggtgtgtctttggagaaggatacccattgcatccgttttgatccgttaaggagtttccagagcccggacagctctttgctatacttcagtaaagcaatagttttcagatttctccggaaatgccatttagcacgccagatcacctttcctaaacccatcacgatcgcttttccttttcttgcttgtttcggctactctcttccatccggctttgccttactttcatatcggtcccaaacaacttttctcctagactttaa

SEQ ID NO: 44456 - DNA, 2141 bp, Homo sapiens
gggactacaggcgtacgccaccactcccggctaatttctgtatttttagtagagacgggggtttcaccatattggccaggctggtttcgaactcatgaccttgtgattcgcccgcctcggcctcccaaagtgttgggattacaggcgtaagccaccgcgcccggccggtacaaattaatttaacacatcttttgataatctcatccttggtgttggaaaagacgggaaaatccaaaagtgtctattttgtgcccaaatgctcaagttaatactcgagggccttgatctctggcctcttgccatccctctccccattatttctgaagaagtagccattttgcagattccggaggatgggagccacggccggcccctggtactgaatctcatctccttctcaaggctccttggatcaagttgggaccggcagcgccaaggctgctctccgtgatttagcagcaacctagagtcagagagaccggaagatgggaggccgggattctcaggtggggtcaggggtatgcaaaaatccttagcagcggccgcgcccccgccccggggaggtaatttgcggagggcggtgcagtagcctctccagtgcccgcgtcccacggtctaacggcactgctcccggggtgcgcggcccacgactcaggctgcctcccccaacctgacaagtgtgcgtccttaccacaaaatgccaccacttccctaagtgacgctgggccccgaggacctgatttgaaatcggtgttcagaagaccgagcccggctggacgcagctggcctccggctgagagcggaggggaagggttccatactctccgaggatcccgcgggctcgtggcgtgtggaacgcttttcatcgctttcagttcccgtttccttcgccccgactgcctactcggtcgcagctaaagcccggagcgtgggatccgggcccggaggaacgggatggcgaacgcgagctgcgccgcggccaggagcccgccgcaccgggcatgctcagtggcgcggccggctgggtggcccgcgagctgcacccggatctgctcggcggcggcgacgtgagcgcgcaggggggcggcggcctcgcctcgtctctctctctgcgcctgggtcgggtgggtgacgccgagagccagagagatgtcggatttcgacagtaacccgtttgccgacccggatctcaacaatcccttcaaggtgagcttcggccccagcatctcctgccgccgcgacgcgtcgttgtttgtgaaaacggacgagttccttcgcgcccactgcgtctgcccctcggctccccttagcagcccagagaggggcgcggggccgccgtcctccatttggggtcgcgccccggccccgtgtcactcctttgggttttggggcttgggggtggaacctcctcagctcgtgcccggtcgcccttccacacgtccccgactggtgagggtcgtgtctgcagccgggactgggcccgcgcgcccggaggggtcctggcccgcctctcaggagagaaagccgagggcaggtagagtcgccccttgccaagcaagtgtggctggcagggccgggagtcggcggaggggggcccgccctggggtggggttgtcatggggacccgaggtggcggcggcggagagctgcgtggggtgatggcagaggtgtggaggaggagagaggtgagggcaccgagtatgctgcaattaaaaaaaaaaaggttatgtttttattttttaaacttgtgttgcacccaaataccaccagtggcgctgccatcccccctctttctgttaggttgaggttgaggttattgataccaaagcaaaacttaaaaataaacatatctggaaaacaatagtgcacgtggacgacctcttccctacccagctgcttctagcaaggtaaacgatgggatattttccaagctcctagtgcgtcaccggttctctgggctatgtgaggataccatttcctacttgagctgcttttcttcttggagtcgaccttatcaaccccggcttcggaagggcttggcacagaatcctgcaaaggaaggcggctgagatattcatcgtctgcgtttaaatgaatgcaacatctaaataactctctctttgaaagtattctgaatttcc

SEQ ID NO: 44457 - DNA, 496 bp, Homo sapiens
caagcattcctgagagttaaaaatcctaatgggactagagtaatgagtgagagtgtctcttttgtgatagaattgaatgggattttaaagtgggaaaagctcctgcatttctatggctgaaaaattgaagcttacagaggttgagtgattggcttaatattagatgactacaacctaagtgacttcatctggagctctttttaaaaaaaaacaaaaaacaaaactctagagcttgtttacttatctggtgggttaggtaagagcaaatttaggcatcccagaatgtgtgtgtgtatcctgtttcattaattattaacttatttgatttgtaaagaaatcttaaagtttgagatttaaaaaactagatccaataggttttcccagttgttaattttaattcaagtaatttgttggcatatttttattgatttgataatttacattaaacatcattttagcttatataagaatgtacttactataataaattcagcct

SEQ ID NO: 44458 - DNA, 604 bp, Homo sapiens
gtcctctttcaccctcaatcattgctcacttccaagaaggctgagcctgcatacaccaggcccttcaccgccactgccagcgccattcccacgaccacacacccttcaccccagccctgcagaggcagggttcagccccagggcaatctatctggtcagactggtggggcagcttgctaaggctgtcctgctggactgagacccatgcaggcagagggctggagggagtagagtgtgagagccagcccagcataaagggaagactggaagatagcaggcagctggccggtggctcatgcttatggcagtccctgtggaataggcccagccagcacaagtgagccaaatcctgagctcagtttaatggcttcggtcccaaacctgagtcactggggattccatggacttctaagagagccctacacgcatttccaaaaacaaactgcttgatgttgtcatggaaaacctggatctttgcattctatggtttcacgatggattacatccaggtcacaacctaaggaagacagctggcaaaaagccaaccctgctggctgatcacccggcttttgtaatgaatcccagagggatgcaaactgatgtg

SEQ ID NO: 44459 - DNA, 800 bp, Homo sapiens
aagtgctgcacccctgggttccggatgcagcgggcgtagatgcccagggtggggtggtagggctccggggagcccccgcccgggcccgccggctccacgccgccgcggctcctcgctttcccgatcagccagtctgcactcatgaaggcaatgagctcggcaaaagccaccacaatactcagcaaggtccagagcatcgagcgacaggtgacaatgacatgacacatattgatgttccgggcgaagaaagagtcaggagtccacggagttaatcaaaacaagaaagtcggtggggaaggaggctcgggcggcccgggaaggaagtcgcagctgcagtcattcactcccgccgccggccgcgttcatgctggggacagcgctcccggacccagagcaccgcctgcggcctcacctaggggagagggagggcggttagcagcgccgccaggccccgccccgccttcccgccgcgcagcgacaccgtccaagtccggcccgtgcccgcagaaccctgccagcaagccccgggcctggctagcatgccaggcggttgttgcactggctgcgtttgtttcaagttcttcctgacctcactgcacttagaactctatgtggcagttaaccttatctctagggagcaccatggaaggaggcggccagtgccaggtcctgctcccaacccagggggcactgtcctggttgctgctgcacttttaggacagggctcccgctccctcatcttttactggaaaaagtcaaacagcacagggatccagagaggaggaggcaagactggcaat

SEQ ID NO: 44460 - DNA, 1753 bp, Homo sapiens
agtttataatgaattctgtgatactgggcaaaatataagtcttaaagtgaacctcttgtgtcttctcaggataataagagagttttaactaagaaaagtaacaggctgggtacagtggctcacacctataatcccaacactttgggaggccgaggcgggcagatcacctgcggtcagggatcaaggtacgcagcgttttccaactttccctagtgagaatgccacattcaaaactgtagaaaggtttatactttctccatttattaactagaggaaatccccaaatatttaggattcatattacgctttgaaaacagatgggcttcagtgcagcttccaaagggatgcacactcctcaggggaacgtgagctccacgcgcagctgccagtagccataggtacttttgaatacagaacgatccttcaactctgggcagcagcctggcctgcaggactgagccggtgtaatgactcaggaatgtgccagctgggaggaggtggcccagtgagtgttcctcgctgcagcctagatgaagtcactgcacgctcaaagttcaagatggtcacagaaaaacccctttttaaaaagtctgaactcttgtacttgttcatatgatccagtgtcctctttctgggaagagggacttattattgtagcttctaacaatagtgaggcatagtaaacagagataaagttcagctggatgtcccagaagcagtgaggaaaccaggccacttaaaaacaaagcaaaaggctgaggcagaaatggctttaggttcatttctataagagatgcttcccaactccctgttccccaggtgctcacctgtatgggctgctaagcaacgtggacaggggaagtctgtcccattctatgcccagtgctatggactcccaggagctccagctaccttgctccccaacatgagccaggctggagaagatgaccactgagaacccacacagccctccgtaagagagagacgcgaggcaagagagcctgggggaatccacagaagaaaaactagactggattttggttaggtgataaaaaggagcatgtccctggggtgctgacagatacttctttgaggtggttaggacagacctcatcacagtaaaccatttctcacagccctgatcactgcagagcagttccttttctctgtaccctacaagtgggtggctgataattctgggttccagtataacatggcaacagccagaatctgcctctggggcgggatctgtcaggcttcaggaagggtacacaggacaaaacccctcacctccacccgtccagggcaatgagctcatccagaaaggcaccatgtaagaatgattcagtctggaggcagacacttaatctgaaccctggtcctcagtagtgaccttaggtgaaattgggcccgtgttcctcagttcctgtgtccgtaaaatggagtaatagcctaccgcatagggatgttgtgaggatcaattaagttaaagtaagtatcaagcttagaacagcacttagcacatggccagcactccatccatgtggactatgcccctgcaacaggatccagcctccccgtcccttgacccggcataaatgcgaccacttctggctttgtgtctcaggcactccttttgccacttagatcttccggttctggagcccatctggcatgtaggtaattagcctttccttcaaatactaatttccccatgtaaaaggagttgtgtggtggaaaggatgtaacacag

SEQ ID NO: 44461 - DNA, 1263 bp, Homo sapiens
aagcattacatgacgagacagatgaaagaatttgtgaaacaaatcactgaatttttgcaatattagagagtctcaaggaaggaaatcatctgacagactgaatcataaatttgtgcaatgcaagaatttataaaagcatcagggtgtgaatcatacccacaaaatgttttttaatatctttgcaaaaatcaggctcatgaatgtaccaactcttccaacagcacttgtctttttatttcaggtattaactgatttacaacttattttaaaaattacaataaaatctacctgcaagaccaaatttgtggaaactggaagaagggagagaaaataaactagttcccagaacagaagattgggcaaatgccattttgcccatgccaagttaagccataagatccatcaggcacattatttttagtaaattactcaaggacattccaattcatagctaaacatcatcagtaaaattttttcaaaattgcaaataatttttttaaatttttaattttttaatttaaaaaatgagtttctctgaaataccaagtgactgttaaaaataatgaaaaaattctaacccatgtctctaataatcaaattataccattagtatttaaaaacagaaaattaaccatttttggtttcacatatacatgtggctttagtctactgtttctctaatacttcttgtagaagcataaccactaagaaggttcacatgaaatcaggctgaaccataaacagtcatcccaagagatttgtctacacacggaacagggtgctggggagtgagttctccctagatatgatgtatttattcatttattcccttcctcaaagcgtccatcatggagtgaggtcatttgccctgagttctacagcaactgataaggccttgtgagtcagtggttcttcccagaagttccatgctccatggctgctgactctgtacctattgggtcaggccttattaatcacttttataacatggaacccaaactgatcataagactctgaccacacagactcatccttggtcaccaacaacacctgtacctgccagagaattccatatgcaaatatgaagatatgactgcccatttattctagaaggattaggattgtttcttatcaggtattgggtggcagaaagaatgccccatagcccctgccttgacaacggtgtcccttcaactacaagtttactcatttcatcaccagcaatgcaaggatttgagtaagcagagggtaacatttctttgg

SEQ ID NO: 44462 - DNA, 1283 bp, Homo sapiens
aaaatgaatgcactaatttgtggtggaagagggaaatctgacttcctacttttgtaaaatctcctcaggcttagtccctatctatacagaaagaaactcccaggaagtaaaacgctaatgacttggtgtgtacatgtaagtttacagaaaaaaatgaagacgagggcctaaccccctaatgaccaatgtttgttcccatgaccaaacaacaaatgaaattcaaagaacgggggaagcagttgacctcaagtgccctgcaacatttttccctttgcagcttttgaaaccgtttagtttctttatctttattaggacattttcctcatcaaattaatgagtcactaaacaaaaggcttactaaaatgtttacctctgagaataaactatctggtaagactctaggagaaaagacgagtcataatttgccattgcttttcaatgaaatcatctgggaaaagcaaggcagaaagtgggggtaggaagagaggatgacaacataaaattcaaagcaaatcccgaggccaactctgagaaaatgtttgtgatcctttgtgtcctgtaatccttgacattgtcgcgtctaccctcctgcctttatggaacactttctttctgacaattattaaataagacattcttgtggaacacttagctttgttaaaaccaactctggtacaagggaaaggaggggaggagaagccaggagaccttgtgccatgggggctgcagaaacagaaaggaagcttactagttgaggcagcaagagcaaacacaaggcacatgtagaacacggataggagaaaaataaagggcagcacatataatcaccaggttttcttattgttctttctgggcacacacaactggcatgaacatgtggttgacaggtctgagaactgattcctagagacagagctggcgcaggagggctgggaagtgggcactatctgctccatctggagagtgtctgaaagacgtggttcccttcaactcattttcatttgatggtcttttcccagtgctcaagagcacagtcttcaattaacaggcagtacaatagtcctttaacaagcaacatggacctacaatgaggggtcaaagagaagtcaaatgcgtggcaacagaactccagccaggaaattctggaagacttcagaagtactcagacacggcaaggcattctctcccaaacgctcaggaaggacagagagcacctctctcaaaggagtgcgggatggatgcctcagatttcagaggtagcctctgcagatccacagcaaatt

SEQ ID NO: 44463 - DNA, 1374 bp, Homo sapiens
ttaactctgttcccctatttttagggggagaggcagcatagctttgtatagacatcctccgactcaacttgggcaggatgtcagctaactgtgtggccttggacacattaattaactattagctattcactgtatctgtaatatacgctgtctaatgtatctgtaagggttaaatcaagtttctagcacatacataatagatagaagctattattcacccaggtgaaagctctaaaaacaagcagctgacacacagccaccatctaacaaattaatcaaaatcctgtaataaagtaatagtggctataagcttaaactggcacacagcagtcagttcatagccagagccctacaaatcatgaacagttccttcactacactgtttgggtagggattctataatttttcctaagtgttcccctgggataagaaccaagacacaagaaagagaaaagggacaaacttacaagttagcagaatgttttacttgaaaacacagtgcaaaagttgaaggtaaaaaaacttgacattttataatagtctttgtttgattctagaaagccaaacagtccctaattactaaatcacatatagaatggacatagccgccaacgaccaaagaaagaatataaattgcatgtcacatctcaacttcagagagaaaccatctgatgtggctagccttctgagtgggtgctagcactgtgttctttccttgctcttagaatagagtctggggaccagcctggctggcctagctatctctcagggaccagatagcaaactttgtaccctgtgtgtttcgaattcacactcaagaatgtgaaaataatcagctatgccatctcaacatgcactgatgaacagttttcaggactgcttcaaaccaggaactaaggtaaaataacaagttagacaagccatgtgcagacatcccgcctccagtcaggacgtggggattctccttcctggagacagactatatttttacaacaggcttttctattttccttacagattgcttcaactataacagcacaaaccaaacatctgaaataatgagtcatactggcttgaatccgaagcaccaggtcaaatgcagtttaagccacgtcagtgcttaaaggcaaccctcatgtggtgagtggacagatttctgccaccagaaatctataagccctttccacctaggtgaacaatgtctcagtgtgggaggcaagacaagtgtttctagctgttcaggaccaggctaggagaatcttctttcttcctttcctttttttagacagggtctcactctgtcacccaaggtaagtgcagcagcgtgaccactgcttactgcagccttgaactcctggggtcaagcaattctcc

SEQ ID NO: 44464 - DNA, 1495 bp, Homo sapiens
tgagaagcagctgacgtctgtggccagagtgacccacacgccacggaccagggacagcaggggcgaccacggggcggcccccagggagcggtgccaggcgcgctggaacccggcgcccagctgcgcctgggacccacgcgccgccgtccgaagcccgccagcgacgcccagagagcagggctcgcgccggcttcccgaggagacgctgttcccggcacaacttttttccacttctgcggccgccggcggcgctgagaagcagctgttcccttcccattcccagcacccaacgcccatcccgcagcacctccgaccgctcggcgcggtctcccagggcgccgaagcgaagttcccgcgccagccgcggctcaagcagccagggctcggccggccgcaacggctccccatgcgcccgcgcggggcgcccacctggccgggcccaccggctctcccctcccgcagcgcgcgcgggcccgacgcctgccactcacccggccccagctcggcgtctccggctccgagcccgcagccttccccaagtcagggctttcagtgacgcctcctcgcagccacctcgctcttgcccccgctggccgcgcctggaagaaggaggcgggaggagagcgagaggagagcgggaggaggcggcgggagaggggggcaacgcaagggaggggagagggtccgcggcgcgggggaggaggcagcgaggcgagagagcgccaagctcggcggccgcccgggctagcactcggggagagggaggaggaggaggggcgggggcagcgagagaaagaggcggccgagccgccctgcccaggccccggccccgcgccgctgcccagtcaccatcgccgcctccgtcccgcgagcgggccgggcgtccgggggaggggtcgggctcggggctcccggcgcggcgcgcggggcgggacgggggcggcgggcgggcggaccaggcccggcctccggaggggagtgtcctgcgggtccgggagggagtcggcgacaggggatccccgagagggggtgtgggggcctgggaaccggtccctgagcccgccgggcagcggcggcggcgtctcccggggtcctgcgaggttcctccgggccgcaccggggaagctcccggagcagcttcgagcagccctgccgggagggccggaggcggagagcggcgctgacggagccgggggagagaggccaggctgctccggcggagagcgggccccggggcgctaggagcagttcccccagacccgggcccaagcggaaagaacggccgtctggtgaccccggagagtccgaaacgggaaaggggccaaggggcgcctggacccccatcctcgccgccctcttccggagaggaggctccggacataagttcccgtgccctctgaatatctaggtgtggaaactcaattccaacagtcacaaagattattcctaaatagaatgcttggtgtcctcagcttccctgccctcaaaattacgg

SEQ ID NO: 44465 - DNA, 1410 bp, Homo sapiens
aacaaaaacaaaaacaaacttggccgggtgtggtggctcacgcctgtaatcccagcactgtgggaggctgcggcaggtggatcacttgaggtcaggagttcgagagcagcctagccaatgtggcgaaaccctgtctctaccaaaaatgtaaaaaattagctgagtgtcgtggcgggctcctgtaatcccagctactcgggaggctgaggcaggagaattgcttgaacctgagaggcggaggttgcagtgagccgagattgagcccctgcactccaacctgggtgacagagtgagactccatctcaaaaacaaacaaacaaacaaacaaacaaacaaaaaaccctctacaaaatggcattttaggactttataatattaatatttttggctgctttaatgagtatgagtagctgttccataagcagatactatgtcacatagggtagatttcaagccactgctttagaagatggtatgcttgaattgattgtacacctgaggactgaagttgaaaccaccagctagaagtgaatgctttttgctttgtcatgggccagtggactttgcctgggaatctcccctgagctgaggccagcaaaggttgcactctgaaagagtatgaaagggtggcgatatgtctcattggtgaaccaggtaatggaaaatgcctctcctcatcctgcacaagaatgccaaacatcagccacagtgctcccttttcttttgtaccagtgtggtttatagaaactggacagtatcagtggacattttctctgggcttttaaggggaacacattgtatcttgaggcatttcatctgcagaacctgtacttagaacaaagaaaaacttctgcgtgctcggtaaacaaaagatgcccagtttcccttccccatattgccagctgccatgacacacagtttggcctcagcccactcaaccacaggtgaatttgaccacaaccatacaccctcgcaacctaccaactacagtgacctagagatagcactttctaaatgtaaaatgtcattaatatgagtgtttattgtctagcaataaagttatgcctatcatcaaagtatccaggatccagagggaatggaatagggcagtaattttgaatctggttgtgataaaagcccaaagctagacaggcaagaggagcgtaagtggcatggctttagcctgcgtactctcagggtcttatctgctgtcagccaggtaggagcctgtggctttaattctacctccccaacttcccacctcacccccagaactaaactgccatcggtctcatataccctcctctgtccccagtgactgaagtcacctccaaccaggctgtgactaccagccttcctttttcccttcatgatttttccaagtgaagggactaaatgaaaatataaagc

SEQ ID NO: 44466 - DNA, 549 bp, Homo sapiens
acctacaggggacaaattaaaatgctcataatttttatatatgcactccacatgacgtatttcaaatgaatcttaagtttatgattttcagtttacaaagtcaatttctctgacacctactcactcagttcatatctgatattttaaaagtcctagtgaaaaaagagctttgatgtggcttactcagcctagacagagttcaaatgttaatcattattgcattgtgcatagtaagtattcagagaatgtgctggtgttacagggaacttcaacaattggttaaggtctgacatcagccagcagtgttgattgagcagtgtaaaccaaaaatgacagaaaacaaccattcaatgaatcctcaactcatgaccgttgtagtaaattaagccacctatacctgaaataggttgacaagagctcttctcatgctttggtttaaatttgagtcttgaaaaaataacttatttcatattattcatttacttactaaacaaatacctatgttgttgatcactatatgtgttagacactaaatcttcagaatgaata

SEQ ID NO: 44467 - DNA, 804 bp, Homo sapiens
atttctagttcttgaatttaccagtaactacttaccccatctgctaattagtctcctccattgcctccaacctgtacccagtccctacacatatttcaccatagcatgcacatttaaaatagttcatttgtgagggctgtgaacaattaaatgtctcactataaaaggctgaattaagtaagttcctagcagcagaacaagtagtacacgcaatttgtaagatacactgtgttgggcaagattaatctttctaccagtagatggggttagtatgataggtatgataatgtgcatttgccaagttagaaactcgccctaatggacacaagagccttagagttaaattaatttagagctagacaaagtctagagttcagcccaactcctctgtttcacagatgtggaaatgatggccagcgaggtcacagtctgaccagccaagaccaaaacctacatctcagttcctaaccagtcctctttactcaataaataatttctgaaaccaaaaaaactaaaactcaggatttcatgagagtataaagtccagtcagtctaggcttgtttatcaacttgtgcttttcttttctaaagttaaataattatgggaaaggggtctgtaaatattaacttaaagcatgactgccaagttcatagatatgactcttttttttttttttttttttgagacggagtctcgctctgtcgcccaggccggactgcggactgcagtggcgcaatctcggctcactgcaagctccgcttcccgggttcacgccattctcctgcctcagcctcccgagtagc

SEQ ID NO: 44468 - DNA, 2687 bp, Homo sapiens
cctttacaggcttcctgcctcgtctgtaaaacggggtaaaaacaactacctcatgcactgtttcaataattcactttaaaaacaacaaagtgctatgcaaatgttcttgatattcttagccatctaacatctatgcacgctctacatttatatttccttcgttaactgtggagccgttcctaaagggaagcttttaaagcgataatgaagatgctcagaagagttcaatacaaggttacatgtgaaaggaatgtcagcagcctaagaaaaatcaacctagcatcaggtttcattccaggggtgttgagaacctggaaaaaaataatctttggtgggacactcctaacctatcaccgctgggttcccacgggccagggtcgcacccacggcgagcaccccttcattttacctctcccctcgtctttgctcccagcccacgccctccccagcctcccacctcaggaccgctccgcctgccggccgcggcgcccagcacccggcattcccataaaccccttcgcccggagcttcagaaaacgaaagacaaagccacccgcccaacccggcggccggggcgcgggtccgcggggcgccagagccgggcatgcgcagaggccgcggcgggctgccggcctggaagagcgaggttggggcgagaagccgccgggacccataactgggtcggcggtccgagccccgcctgccagcgcccgcggcctcaagggccgggtaggagcggcagggcgccggcgaaaggcggggcgggggcggcgcgggcggcgggggcgccgcgtacctggtagcggccagtgagcagctggctccgcgacggcgtgcacagcggctgcgtgtagtagttgtccaggagcaccccgccggccgccagcgcgtccaggtgcggcgtgcggatgcgggagccgtggaagccgacgtcgttccagcctaggtcgtctgccagcaagaagaccaggtggggcggccggctggccccggcgcccgagcccggcggcgccaacaacagcagcagcagcagcgggaggacgacggggaggagcagccgccgaggtccggggcctcggggcaagctcgccgcgccgcgcggacccatccttgtccgcccgcggtcccagcgcctgtggcgccaccagccccttgtaccgctgatagaatgaggaactgggctgccggggcctgctccgccccggcgcgggacggcacccccagcgggccgtgggcttgcgaggccgggcgctcggcccccgccgcctccgacccgggcccccggctgctgtggcggaggaggagccagagacgaacccgcgggcgcccgctgcccggcttcttggaaactcagctgacgcttggagggcaccaaggcccgttatcttccccggcaattaaatttgcactgtggtttcctaaaaaaaaaagatgtgttctttaataacgcttcacaatttacaaagcatcttcacagcccgcgtctcctgtaaagcctgcaacaactctgacagttagacattataattagtgccaatttttcataagaaaaaagcttataaatggttaaacctctgactcagatcctgaaccatgatgtctagctagcaagtcatttctagcacaagagcccagcctgtggcaggtgggaggacggtgaaaaggcagaggtctaaatagcctttcacattcatttatgcgtagtgtacacccatgaagccgcttcctccccactagcaaacaggaggccaaacacacagtctgattgcacggtgccctttggaaggtgcggttactttcaagttgccctgggaggatttggagtgttgcgtggtcattgaataaatagctcattcgcttgtccggatatgaccccactcagagctggctcccccactaagcagtgacactaagaagcacacagtatctagttagcctgaaatatctgagtggaaggaaaaaatcctttagtcacgtgcttattgaattaggaagttagccgtatgaccagtagattcccgttgccatccagactttctgtctactctgtctggagatattatagttgttaacaggtgtaggggaaaatttttgcattgcctagagaccatacccttccaggttgagtctgattccgtggaagttgtttacaactttataagttatagataaataacaatggaaaataattcttatttatatatacacaaatgaactttatccagcggagtagcaatccttcccctccaccactaccaaggaaaacagtttcacctccgcttgcatatttattttagtattcctgatctgttctttggattgtcctttgaattggttttaacaccttaccaatttccttattaatgagttaaataaaatcatgtattcacttttatatttgtatgagggtcatgattttacctttttttccccaagaatcctttaacacatgaaatgtttgcctcttacatacactttttttctttgcatgaagtagattagtttatgttgtatgcactttaatctctagtggaatcaatgaaatttagcagaaaaaagtgaaaattttagcattaaattcaaagaataacttttgagagaactgtttgactcattatgtcaagggttgaacttttcatttaaacaccctgtagaagaccttgaaggactgagaatttccgctgtgg

SEQ ID NO: 44469 - DNA, 2436 bp, Homo sapiens
cactgcactccagcctgggtgacaaagcaagactctgtctctcaaaaaaaaaaaaaaaaaaagaaaagaaaaaaagaaagtaaataagcttgtatacttgtatacttttggtcagttgaagagttctagtgttcatccagaaatcattaggtgaactaaaataacatatgggatgaagaattaaataggtcagaatcctggaccttgtatccctacaaggctatttacctttggaatgacatttgcaaagagatggtccagtagtctaatggaatcttggcctttgatgttaaacttgccaaatggtgataggtcagttaccgctactctttgcataacctgtttatactccgagcccacaggctcaaaccagtttgtgcggcgaaaacttggcctgaaacacaacatttagtgtcataaaacaactcccgttcatttttcaaaaattacagaatacgatattttaataagccctactcatctagaaaatcctacgggcagcggggagtgggactatgggaggcgagaccatgcaacctgaaattctgttctgcaaatcattcatgtatgttggaatctgaccctttaaagttactcatttatccctttgacctatttctcagtgagtaaagtgctgattaactggaaaataagatataattcatgggctctcagatctggaagagagtttataagtcaaccagtctggtggttttcaactctagacgcatattagaatcatctggagagcattttaaaatggccctaattaaatcagagtgtctgggttgggaggcggggtggagctgtctggtccagtgcttctcaaacattaatgggaatacaaatcacttgcacttgttaaattccacattctgaagcagcaggtatggggtgggaccccatagtctgcattctgccaggctcgcaggagatgcctatgctgttggtccacacctggggtacataaggatctggtcccaaatcttcatttttcagagaaaaggcacaaaatgatctccaaggccttcacattaatgacagagccagacctggaacaaaggtctcttgactcattactaaaggtcctttctgctttatgaagtggacttctaatgtggtattttaacttcagagcaggatgctatgtctgtaacatgaattttcaatagtttaattattaaatggtagaaaaaacttaggccagatccaatcagcactaagtgaagagtaaaagtgatgtgttagagtaatttaggaaaaaccaaatcagtatttggccaccaaataatctagattggctgcttataaagcccaaattcattcatcaacaacgggttctctgctatactttgtatgaattagatctagtcttaaaatagcaaaacctattgtaaaaagcaaaatgacagcataaaaataaggataatgtaacttctaaatttgcaacttgttttcccttgatctgtggattctcttgagaaaaaaatatataatcactattaatccaaagtacaacaatggcaggtagcactttacccaaattcagagaactgtttcagtggcatactttatgttttcgcttaacctggaatgctatgcaaatgaccttatcaactgcacatataatttgcatgactcagtgcacacactctagaaagcagttgctttgagcaatttcaggatgaacagaaaatccaaaactccaggtacattttgtggttatacacgatgtgattccactgagcaccctaaagtacagcaaacctttaggagccaactgaagccaggtgggaatttggagggcggtcgcaagtttcttccgagcatctggtaaatgccaagaggcttcaccaaggctggctataggactctcagggtcacgtgagtcctagatgtgggccagtgtctcgtgggctagactaatgccaccactgccagagagtaatttttgtaggacaaagctcagtgctccttggaacagggtggagcaatggagtgtaaggcagaatcagcgctttttgctgtcccgttgtttcacccctcggtcagaaccacaggcaggtaaagtccttctcccacctgtactgagtgtcctggcctggtttgtagaaccagtgcggctgctcccagccagcatggaaccccatggaacacttagactccagcctttgatagagcccactgactcgttgagtcggcctcccagcaaaccgttcttctttaggataaccaactgaaaaggaaaaattggtactttaaatcacatatagccaaaacaacaagatacttacatgggattccaaatatggaaatacagtacttaaaatccagatgcataaacatacatacatacatatatatgaatgattcatgtagaaaacagagctgtcatttatatgactcatcaaagagtaaagtaaaaatatatttaaa

SEQ ID NO: 44470 - DNA, 611 bp, Homo sapiens
atttaagcaagagctcaaagaaaatcagtcactgcctcatgcttattttaggttttaaaggaaacattataaaccataggaaaatatagactattatcccagtttagactgcacaagcattttcactgtaatttattttgcatgtgtgatacttgaaaatgacttgacatgcaatccacctattagaaagtgtattaactcaagaatcaaaaggccagatcccagtcctggctctgacataacgatcagtggccgcttggccaagtaacatgacccttttggaccttgcctctgcaaatgaaaatgagtgtgttgttggattatcccaaatatcccttttggcttcactactctgagtccaaacgtaacagaacaacaaaaagagaagattatgaaatatgtttaataatgttctagaaggaaaagcatttaaaaactttttcaactagagtcaaaagtcatcagaaatggatgagagagaacccaaatgatcaaatctgccctaaaaagcaaattggacacaaagaggatgcttatgaacttcaacactagaatctggttattcatatagagaaacagtgaatacaggaaggaaaaataaacataatttg

SEQ ID NO: 44471 - DNA, 3220 bp, Homo sapiens
tatttgttgaatggatagatggaactcaaaagcaggtcttctgattccagaatttcaggtcataggacataaaataaaattcgaatcaactcataataatgttgagtgatgctgataaacaagcctttcctggcaaccaggaataatctacaaatataagaagtcgaaagatgttcagcattgctcatatttaaatacagaccaatcaaaacaaggacatgccatttttacctatcagatttagcaaagataacaaaatgggctattctgggaaccagggaagatgtgggaaacagacacacactggtgtgccgcatgcaaactcttgccacccacttggagaatgtgttgctgtctttcaatctttcagatgcacgtaaccttttccctaacaagttcacctttaaaaactgttgctaccgactcccatatgtactcaaagatagatgcctaagaattttcacatgcacgttatttgcagtaataaacaaccaaaaaccatttaaatgttaatgaatagactaacgatagtgtagaatattgacaggatggaaaactatgcagccattaaaaggaacaaggcaagtcagtgtgtgctgatatggaacaatctccaagatatattgataattgtaaaaagcaagatgtcaaaaagccaaaggaaaacctatactgacctgtgtttgcctatgcgtagactgtctctggttagattcagaagacactattaacaattgttcactggccaaggggattggggcaggagagactttacacggggaacctttggatactgtttcactttataattaaaagataattcgagaagatatatcaaggcctatttcttggaggccagagcgctcctaacccctgagcctgcctcagcctctggctcccacccccgcagccgccccgtcgcctctgagcaggacggggccccactcacccttcccggccgcagacagagcgcgggcgcccgggggagccctgcagcgggcagctccgcagcaggaggccccgcagcagctgcgcgccgggacggagcatgactaggccgaggccgagggcgcaggcgcctgctccgaggccagcgggcagcctgaggccgcggggccggcggggcgggggtcggatcctccccccgggctgggggcgggctcctagacggccgcgcgcccgggaacccggcgcccacagagccgcggcaccatggcacctgctggacgcccgggggccaagaaggtgagtttcgtcccctcgatcctcgcggagctcctggccgctgggctgcgagcgactccgttcacacccggcgtccatccctagccaagccctggggcctcggcaaaacacttggacgggatggccctgagcctcaattttcccctgtcacgggttggttagcgtttatggagcccttactcggtgcctggcgctgcacagagtgctgtgctcaagttatctcctcatcttcacaattatccccatttcacaggtgaggaaactgaggctcggcgagtcaggcgactagctcagggtcacgggtccagccccgcggggagcgaggatcagaagtctagctttcggacgcatgtcgcgcacacattttcttccctcaaccgaccctcgcccgcagctctttgggctaatccgtccgggaactcttcggactgtcccctcgcgttttggaaaagtcagcagcctggccaagcagcctggccttgcgagtcgccggctggtctgaaactagtcctgggcaaggacgcccccagagctgcggtgcagggtggagggtaggtgggattcgctagcacccctcaacctcctctcacccggtggtccccagctcctggcccctttcctggtctggtcaccagatgttggctttatgcccagccatttctacgtcgagtatgtgtgggggtgggatgaaggagtgactaagcaaaattaggaagggcatgagcttggacgaaagacatccccaggacccttcagagacccccacccgctccagccctgtcattcagaatgggaggaagggaggaggggcagtttatgcgtggaaatgtgcaccaccgagctatttatactaaaaagttagaaacgaccaagatactctgcaatacgggattctaaataaattaaggttcatctacttaagttattagacagttaaataacttagtatgagaaccagctaagtgccttggcaatgttaagttgcaaaaggaaatatatcacaaactgatcccaaccatatacaaatatttatatacacactgtaaggaaggacacaataatggtaatagttacacaagatgtggaatattggtttaaaaagcatgttttaggatattttttcaggttataaaagcaaaatgtgagcattgaaagaatacagttaataaaaataatcaaagaacattgtgcttttttctctcaactttctctaatgctatgttcatctttacagttcatatttttaaacgtttttaaaatgccctgtttttgttcagtgtctttggggcctctactgttacaacaccaagattatcacacactaatccatgtgaatgtgtacctgggagttaaggtgttaatgggaaggaactaatctcacctctctcctcagctagcaggtacattttaagaattcatttaattgccacagacaagacctccaattaggtcttaaatccaaaagagcagttctgctggcaaatctaggaaaaggggaagttattttagacagactgggtttttctgatcacctcctactacacagtgaagttgatccccactgagtatgaatagagatgtcttgaagccagatcttaaacccagaggtcttacgtagtgatatctgcaaaaagggggcataaatgcaccctagagctcgctgtcagatgcaaggcaggttcactgccaaactgatggggaggagggaatgaaaatataaatgtactgcaaaattaatttacagggttccttattttacatgttcctgtctttataattttacagttgactttagatcgtactagtataatggtgaggaacaacacacactggggcctatcgaagggtggagggtggaaggagggagaggatcaggaaaaataactaatggatactaggcttaatacctgggtgaggaaataacccatatagcaaacctccaatgatgcacatttacctgtgtaacaaacctgca

SEQ ID NO: 44472 - DNA, 4422 bp, Homo sapiens
cagatgcaccagtatgagtctgggaaggtggaagcatagcaaatgtggccatagtgcagcattccagggtcacgtgaggggcagctgaggtcgctggagcagcctccttctccctatatgacagctgtgtcctgaagccaacagttcaatagtggcttctcttagttgtggcagagggtgcagccccagccggccaattcagtcatgtttttctaggggtcatttctggaagcccagtgtaaattttttatgtacccatttctcaatattaaactcctttctgcttagtcagagtggtttgtacttctgcagctaaactgaacatggggagaaagctagaataagccccctctctagtcatgccattcgatggagattaagagattattcaagccatatttgacctctcatgtttggttccatactgttaacaggactgtcctgggaggctctgtgggaagatcctcacgtctgctttaatttctggttgcttttattagatccaggattgacccagctaaggacaaagactcctgtaaccaagatcaaattagcttccctcttattctttattgcctttatggccttccagcctcctgggaaaagattgaagaaaatagtatatcaagcaatatggccaaaatgtgtttgggatctctttgttccttggtatccaaggaagctcgctcctgacacctgggtgggtcactttgtgtggggagtaagcaaaggagaaatagcagatgccagacactagaacagaagcagtttctctccaaaatctgttccccctccttccgaaggattagcgttggagctggacacatggacattcactgatgatacttcctggcttcccttgcagcaaggtagagccatgtggctaaactctcacgcaggaaatgtaaatgtcaatgagatgagtcacttctaggtctgagctaaaaactttaggatgagctttgccacactgtttcctcatcgtttgagacagagtatgaacgtgactctgatccagtttcccccatgctgaggaggacagtaccctagggctgggttggcaaacgctttctgtaaagggtcagatagtaattatttttagccttgggggccatacagtctcagtggtaactactcaactctgctactgtagtggaaaagtggccattagacaatatgtaaatcaatgggcagggttttacctaagactgtttttacaaaaacaggtgatgtgccagatttggtctgtgggctgtcatgtgctgacccctgccgtagggaatggcaaagcaataagataaaaggactgtgcaatttggtgcacactctgtaaaaaagagtcccccacaaacagtggctttcctcttacagaggaaaaagaaactacttttatttaaagccactgttgtgggggcctcttttttacacagcttagttttaccctacacccaacacgtaggccagtaagctgcctatgtaccctgcttgatgtctcccttggattcaggaactgagggggtttatgttgatttcatagaacagataagactagttaaaagaggcatctgaggcttttctccctgatccattcattgctttgtgtccagctatgggcaggcctgaaatgaactggcctattatcaataaaaggttgcatcttccactgatgcagcctacaaaagagggatcaggattgctgtggggagttgggaggagtgggtggtttgcattgctcagggaaggcatctctgaaaaggtgacacttgaccaaagaccagaaagcagtgaggggatgaccctgcaggcacctggggagatgtgctttagaccaagtgaaatgggaaaagttcccttatgccccttgcagggtgtgtgatggaggcgtggatcacttcttcagcaccccacagcttaaacccctagggggagcatgcaggtaccccatggcagcatctaggggtgaatgtttacagctcctgaagccccagtgggtgtgtgttacagtgtgctctttcagcttagctgtccactggcagcttgtgttaatcagctcaattagaccctccgccttatcgaaaggacagagggctttctgtatcctggggttcttgccagtgtactggaaaaattggatcacacatgggcttggagaatgagtgcaaggttttatcgaatggtggaagtagctctcagcagatggatggggagccagaagggggatggagtgggaaggcggtcttcccctggagtcaggccgctcagcagccagactctcctctgattacccctggctgaattccacttcgtctgtgtcattctgccaccgatggcctgccagagtctgtgtgttcttctgccagtgtgttcctctcaacgtccagctgcttgtgtttgtgtttgctagggtcttgaggtttttataggcacaggatggaggtgtggcgggccagggtggtcttggaaaatgcaacatttgggcgcaaaaacaggagtgcctatcctcaccagggtctgtgggcacaggcctgaggcctttctgtatcaaaaggaaactgcaccccatggctaactgctctgaatggaaccttttaaataagttatgagtgggctaaataggaaggtggtaaaatagaaggaaaagagagtaggaatttagaagctagtctgattttttacttacttagctctgtgatcttgggcaagtcaaccattctgagcctcagtttcctcatctacacctgagaataaaaactgtgtcctgcctcactggcagagttgctgggagtgccaaatgataagacacgtgtgaacacactgcatgactacaaagcgttgtgtccactaccgttctgttcagtggctgacacgaagaaaaattatttttctcacctaacaagaggtccaggggtaacagcccatggctgccgcagccacccaaggatgtcttaagaaatctgcctcatatggctgtcagatgactgctgtattcccaggcattatgttggcattccagccaggaaggaggaaaatagacaaaagggaagggagtgggcgtctatgtcaggaaagcaaaacttttccagaaatcctccaccagcttccgtatgtgtctcactggccagcactgtgtcacagggctgctcccagaggcaaaggaacctgggaattttttgaaagttaggggcattgtccccccacacaaaaacaggggagagaatgcacactaggtagacaactagctgtgttgtcacaaacatgttgaaaagccaaaataactatcgtggaatcagtgctataatttgactcagattaaatgttatttaagaataaatagtctcagccctttcattgtacaaaataggaacctggatcggccaagaaatatggtatgctcaatctttctgaaatattattagagcacatgattttaacaaaactacagctctaagaacgtaataccacttcacctaaaattagaaaatgcttttaggaaaaaaaaaaaaagtagagcggagcttaggtgctttttttctcttcttcaggggattttggagcgcctggagagtggggaggttgtgattggagatggcagctttctcattactctggagaagagaggctatgtgaaggctgggctctggactccagaggcagtgatagaacacccagacgcaggttggtgtccacatccccaagagtgtctacctgagtggtattttatttaaatctgattgagagaagatcaagaaaaaaataacaactgtttcaaaggggtgttttgcttgctaagattgccaagatgtggagataatggcagtatacaggcggaagtatatggaagaaaatgacctctctctctctcatacacacacctacccacatcacacacccacccatccacacgcccacacacactcccacacacacacatccatgcactcacaccccaaccccacatccacacacaccccacatccacacccacatacaccacaaacacacatacacacccacacaacacactctcacacacacacacactctcatacacacacacatctgcatcttaatgtacaggcagtgctaaaatagacatcttaatatttgttccatgaatatttaccttgtagatatacagagtttccttaaaacagcaaaactgttcctgcttctgattcaccctgctgacaatgtgcatggttaagtgtaacagcgtttatagtgagggtgattaatggtagtcacagtgtaacagagcacagacagccaggttccagggttgggagggcaaggaagtcaacacagttttatatcatcctcctggctgggaaaaaaaaaaaaaaaaaagagctagaggtaaagaactatgatgggattagatagttacctgaaatgaaaactttaattctcttctaactcttt

SEQ ID NO: 44473 - DNA, 2550 bp, Homo sapiens
tacttgtttattgtccctttagttatcttttatattttaccttcaaactgctaggctcactatctgaactcttgctctctaacctcagtgggaagatgtaaatgctgctgcctgtgacctcgccagggaagtggctggcaaaggtgatgctttggtagcaggggggatctgccagacatcaatatacaaataccagaaggatgaagctagaattaaaaaactttttcgacaacagctagaagtttttgcctggaaaaatgtggacttcttgattgcagaggtgaggctagtattggaggaaaaggattgaacctattttgcaagcataactgcagagtcttcacatttcatgagggtattggacaacattctgccctcatttcttccatgtggatggtcaaaggtttatttaaatgcatggtagtcaaggccaacattccctcattggtatgctaggttctcttagagccaaaggacagacccaagagaggcctgaccatagccttttatcttctaaggtctgggtggctgcagaagctgacttgggggactctacaacctataaggaagcatagggcacagtgcctccgggagcaccctctccagagggagaatccacacaggagggcactgcatgtgtgggctggggactgagagagcaaggcctggaaggtggtggctatccaggctcgtctaggccccaccaataatgctcagcacccagtagtttccatagccttctccatccatgtcttgctcttcttgcctctctgctttcactcaagctatgacatgtgaattacattttgaagaaagaatcagtaagaattggtcattgattggacatgaaggcccagaacattctctttcctccacttccaaaacgaaagtcctcattccccatttcccaacataactgctactgcctggggtcatgccttcaacccacaactttactccaaacaagagaatatcccctggcttggcgcggtagctcacacctgtaatcccagcactttgggaggccaaggcaggtggatggcatgaggtcaggaatttgagactaccctggtgaacaaggtgaaagcccatctctactaaaaatacaaaaattagctgggcatgttggtgggagcctgtagtcccaactactctggaggctgaggcaggagaatggcttgaacctgggaggcggaggttgcagtgagccaagatagggcaccactgcactccagcctgggcgacagagtgatactctgtctcaaaagagagagagagagaatagccgccaccattattccccctagtgaccccactgaactctactgaaaaccttgcctcatcctcctgcccacgcctggccaaccccactgggaacagtcatctgcagggacaagcacaaattccaccctctgtgctttccagatggatgatgacaccactctgtttgtttaagaacccgtcttttgattctctcataattcctcacactgcttctgcagaatttgtttctaactcaagagggaagaaacaggaagatttctggcttttctttagttgccttaaggtcagcttttcagctgtggcactgaaggggcttcctgggaagcacccaagaaaatgacatgggtttaccagacaagatgtcctgtccaccactggcaaagacagggagtagctatttctcctatgctgtgcctcaatcttctcacccggggaaatggtgcttcccttcctactttatggagcacttatgaatatctaactagaagtgaatataaaagctctttgaactataacacatgataagctactcattgtttcagagattaccccagttttataagagatgaatctaaaatttattagcaaaacttttcctccttcaaaattacaaaattatgattttaaatactcaattactttgaaaacctctgggtgtgttttcttcttttttactaataggcatcatctcactgaatcaatgaaccctgaatgaaaaactatatgttattgttataggaatgaaaatgtttactcagaaaggtattctttagtcagtctgatagacacacattccttagcaagttttattatgcatatgtttatattctatttggtaatttttataactgttttgctatatttacctttaccattcaaaatctgctttatgtttggaccagtagaaaaagtgacatttctcttagtattttgagcacgttgaagaagctgtgtgggctgtggaagtcttaaaagaatcagatagacccgtggcagttaccatgtgcataggcccagagggagacatgcatgatataacccccggagaatgtgctgtgaggctggtgaaggcaggtaatttggacccataccgtgatacacagctcagttgttgcttacgaaatttaacaaagtgtgcttgatattgtgagagcagtttggaaatagaagaatgaactccaatcagttttcttatctgtaaattgtgggaggtggaggggaatggctaacctctaaggtaccttccaactattaaaaaaaaagaat

SEQ ID NO: 44474 - DNA, 778 bp, Homo sapiens
tgggaacaactgggcaaatttgactaaggaatcaggttaattttggcaatgcaggaaaatgttcttaatttctggaaataatgcaattttttaaaatgcatactaaatgttgattactatttataatttatgctaaatattttagaatataaaaaggaggcgtttttaaaaggcaagatttccacaggttttgattttgtagggggaaattaaggagaaggtaattgtctgccaaaaaaaaacagtgcaattaagaaaaactggcttgaactagctctttccagttctacagcagatgtttgctgtactggagttatcaagaagagcagatggccctctgataaaccctgctgtgcatagactcagcaatgcagaccagcaaatagctggcatggaaaccaactgaaagggatcgaagagatttgttgaaactaggggcgagggtcagctggaaaaacaattcctgctttgcaatgatcacagccatgatttgatactttatgcaaaatcataaacaaagttaagcaactcactttggctgtacagtcagctgccttgaaggtgagcacatattttatttaatcagtaatgaaaatcctgaaaagagttgcagaagggtgcaattttgcctcatatcagtgttgttttgtgaaaggattttgagaaaagtagatggggcatgctagtggtgctattgctggcagtcacgtttcatttataacctccattatttatctggagcacagaggtgggaagaggagagaaagagaaataaaag

SEQ ID NO: 44475 - DNA, 803 bp, Homo sapiens
aggggtagaaggtcattttgaacatacccgccaattcagggttagtattggactcctctactaaagccgcatttgtgtcccgttatactggatgtatatcacacaggagatcacactccaggctgaagatcttccaggacttcatcccctgattccataatcttgacgccttggcctttgacaaatatctgagcatcgaatggacttctcagaggcctctctggcagcctaagtgggccatggtgcatgatcccaggtgagcgagaggacggtcagggtcggggcaaaagtgcaagaggcaaaagggacgctaggcaggtttgaaatctgagcgagtggcaacctcgctttttcttatcttacttttcggtggttccacccatttgggtgaacaatctggattacctccttggcaggccaggttcccaacaggaggcgggcctgatgaagggctggtgggcgtgttcccgcccaaggtccgtgttggcccgcgcggtggctgggaggccctccccacgcccaactgcgggtataaagaggcaggctgcggactcggagcagctcggggctgcgcagcgggaaggctcgcctagtcggtccgcatccgtgtcgaccacctgtctggacaccacgaagatgccacccgttgggggcaaaaaggccaagaaggtgagtctccaggggacccgagggcgctctccttcccctcccacctgctctgtatcccagcctctgggagcgcagaggggccctcggaccctgcctggtacccatcatcctcctactccctcccctccctcagc

SEQ ID NO: 44476 - DNA, 772 bp, Homo sapiens
ctcttaacaatagcccaccttcttcctgtccttgttctttcaaccttctgcctccatgtctctccaccacagtcagcaaaagcttgaacacctccttacgaattctatcaaccccagccatcaatcccagagaactccaaacacccacgaaggtgacccagtctgaagctgtcttagcagccactttgtctccctcccagctcacctcaactgcccccactccctgctaagccacacctgaaattcataatgaccttccaccctgaaatcccactctcagaggcagcctccctcctgaatccaggcctcaatgagtcctactacatccgggatccccaatcccttcgcctttcattcttttttcaatctatcagccccaatctaacttcacttcttttcctgatgtactgctttggtttgcaaccttagctaaatattagaatcacctggggagctttcatgactcaggatgactaagctggcttaatcaattacgtcagatgctctgggggaagggctcaatcagcagggcttttaaggctccccccagttgattccaacatgcagtcacggtggagaaccactcagtgccctgcaacctagattccatggttcatcactttaaccaatttccagtgcaccttcacttcctcattcttttcttctctgccacatactccccaaaagcccctcagccttggagcaatcctgctgcatactttctctattcctataaggaagctgctgaattctgatggaggaaaatcaccaa

SEQ ID NO: 44477 - DNA, 492 bp, Homo sapiens
caccagaatcgtatttcattgaatatatatccattttcttgcccacctgtgagcctgatcagtttctgacggcagagacagtcttttgtttgttcagggtgtggtcttatgtcagatagaataacagagcaaaacaggatgcacgtgtgtgacaaaaacaggggaatgctagcaattttatgagttttatacttggtggtgcttcatcttaatttcctgtgatttgatgtcttaatctttaattgctccattttgaaatcagccaccagctgcagctaatacaggtcacagtaacctgatgagtcagcctcacactcctgaggccattctgcacatttgccaacaacattcagagcagacgcgaccaaagtgtcataacaagcagactggtcagttgacaaagttagtttagagctgtagctttctcaaagaaagtgtagaccagcagcatcagcatcacctgggaatgtgttagtaatgcaattattgagc

SEQ ID NO: 44478 - DNA, 3101 bp, Homo sapiens
tgagaggccaaggcggtcggatcacctgaggccagaagttcgagaccagcttggccaacatgaagaaaccccgtctctaataaaaatacaaaaattagtcgggcttggtggtgtgtgcctgtaatcccagctacttgggaggctgaggcaggagaatcgcttgaacccgggaggcagaggctgcagtaagctgacatcgtgccactgtgctccagcctgggccacagagtgagactctgtctcaaaaaaaaaattttttttggctgtttattcaaatatcaggacaatactgaaccaagtgttgaagcttagagtttaagatggacaatactgaactaagtttgaagcttagctagttcagtactgttctgtcatctgaataaacagctgtttttactgaacctaacaatacaaggctaatccaaacggttttgtatatactttagaaatgtgaataaatgtaaaagaactaatttccattgtgctttactatggtgcacaacatctgtgacttgaatactaatcggaaaaagaatgccaataattattataaagtctactaattttaagaatgtgtttcatcatagtttagtaagaatagcagagattgatatgactgtttttgtatatgcattctgggaactcccataattgaatacaacttcaaaagggctaaagcccagtgacctcaaaacgaggttcacagaacagtacataatgatgaaacctgaagcaataaaacaccaatgaactgaaatgtaaacattcatgctgttaggacatggcattttcatttttcattttgttttggactgttactgggctttcctcagacaccttcctttcatatattaaactctgtctttccagaaaagcttctggaattgtttttgttttttgttttggtctcaagggcattaggggagaacctaacaggctgggggcgagccccacatagttcagcacaccgttccccgcggcaacacgctacttctgaacgcaggagcgactctccgtccgggctccctccaggagaatggaggcaaatgtacattcgagggtctcaatacctggaattcgaaacgtctcagttcctccgccttagttcctcttttcccgggttcggaggccacctgtgcagcagggcacacctgccactctcatcgccctcggagccggcaaccagccgacagccggctccagccccggggaactggaggctgcgcggaaggaaggagagtcgggagcgcggccgctcgcgggctggctcaggggacgccgagaggaggcgccggcgcgcgcgggcggggtgcgcgcgccgccgccgccgcgtcaccagcgtgcggcacgtgcccatgtttacgtccctcgtggagccgccgacgtcagcagtcgaatggcaacattgtggcgatgctgaggcgcagagtttaggagacgggttcatcagtcaggccggctccgggctttctgcagcagcaccaggggcgggggcggggatcttgacctgggcgagcgaccgggacgcatacagcgccggcctgaccccgcgggacccgcgcctcaccaccggagcgccgcagacgcagctccacggcctcgcgcggggggcggcgggcggccgcgaggcgctgcggcagcgcggagcttgtaaacagatccggccgcaggtgaccatgtgaactacctgctcccgggacgcttattgtccttctctcgatccgcgccacaaaggagctcggcggtcggggcgcggagggacaggcgaacgagccgggagagccggccggcgcactaagatggctgaaggcgcccggcgagggtgagcggggggcgcggcgcagccagcggggagtcctcgggcgggccgggccggcggcccttccccgcggcgagaagccggagccaccatgtcgttcgcgctggaggagacgctcgagtcggactgggtggctgtgcggccccatgtgttcgacgagcgcgagaaacacaaattcgtctttattgtggcctggaacgagattgagggcaagtttgccataacctgccacaaccggacggcccagaggcagaggagcggctcccgggagcaagcgggggcgcgagggggcgccgaggccggcggagctgcgtccgacgggagccgcgggcccggcagcccggcgggcaggggtcggcccgaggccactgcctctgcaactctggttaggagccccgggccccggcggagctcggcctgggcggagggcggctctcctcggagcactcgcagccttctgggggacccgcggctgcggagtcctggcagcaaaggggcggagagtcgtcttaggagcccagtgcgggccaaacccatcccgggtcagaaaacatctgaagccgacgatgcggcgggggcagccgctgcagcagcccggccggcgcccagagaggcccaggtgtcctctgtacggatagtgagcgcctctgggacggtctccgaggagatagaggtgctggaaatggtgaaggaggacgaggcacctctggcgctctcggacgcggagcagccgccgcccgccaccgagctggagtctccggccgaagagtgcagctgggccggactgttttctttccaggacctgcgcgccgtgcaccagcagctgtgctcggtgaactcgcagttggagccgtgcctgccggtgttccccgaggaaccttcgggcatgtggactgtgctgtttgggggcgcccccgagatgaccgagcaggaaatcgacactctgtgttaccagctccaggtctacctgggccacggcctggacacctgcggctggaagatcctctcccaggtgctcttcaccgagaccgatgatcccgaggagtattacgaaagcctcagcgagctgcggcagaagggctacgaagaagtgcttcagcgggccaggaagcgcatccaggaggtgagtgagtgagctcctagtctgggctctactggtcgcttttggtttactggccaaaccaaaggctggagcctcggtgtcgggtgtgcgcagtaggacggttgtttttctggacaagcggaaaccaagaggggttcctgatctaccttgcccttcatc

SEQ ID NO: 44479 - DNA, 475 bp, Homo sapiens
cttgtgcctaaaactaccatctttgcactgactaattccacagctggaccttcacataaatgtgtgtttagctctttcattacagatggtccacagtggcccattcacagcacaccagcagctgctcaagtcagcctatccttgtctgtctcctcccatcccaccatatcctgcctaaccctagacattgcatcagcattttgtatactcaagtggctgggatgttactcatagcttctggctactaatttagccttagtatcagatgttaacatggtgcatggtgtatacactttgaaaattgcttaaaacttttttcgggggtgtgggagacggctgatggctggaatatgtggtacaatgttgagagagaaacagtgaaacacttagaaaatatatgagcttggaagtttgcagtctccctttactaaatgtgtgctaacccagaagcaaaccatagactagtatggactga

SEQ ID NO: 44480 - DNA, 2108 bp, Homo sapiens
taactcggccttttcggagctaaggctgcgggttcaaatttctccaccacaccaggtctccgggggtggagcgagcaaccaaacgcgacgtgcacgtgaataaaaatcccaaaagcagtaatgccacggcttccctgcgctcacattaggaaaaaaactacacaggaaaatctcctcgaagtgcaaacccggcagctcgcaacctgcacggcactccacattggaatctgtctttttaaatgtttctcctcctaagactcggagcagagaagaggtggggaggacgaagagaaggctaggcaggatcgattcattctcccgaagagaataaacggagccatttccaggctggcagcaggctgggggcgcagcgcacgccggagagctggaggaggggacccgatcccacctccctcagccccttcccgccccccgccgccgagcacaatggagcccggctggtgcccggcccttcattcgcggctgccccctcttccctcctctcttcagagcacagcgggtctgaggctcccgtcggcggagaatgaatgaatcacagagccaagccccacgcttccactggcaccctgcccccagctccagggcgggcgaaaggggccgaagggtcgacgggcgcctgcccgagccaaggcgggaggctaagcccgcgttggggccaggagagctgggctcgaagccgaagcgcagccgccgctccagcgcccccacccctactcctcgtctctcacgctccgcgccgccgccacgcgccgcctcacattccccgggccccgccgccgcctcttcacacttccatcagcgcccgcctccggctaccgccgggcagagcagcgccagccccggcggcctgaagcctgccgctgcctccgcctccgccggccggccggctggcagagaagagggtgctgctttcccggtcagcgccgccggcgtgaagctagcgcggcggcagagtgggctgcggggggcgggaagggggcggagagaacggggagcgagggcggtccctccctctgctcgcgggaagggacgggaggcggtggccgccgcggagccgcggccgggggctggggcgcggactggtcccgggagcccgacgggccttgcgagcagcgggccgcgggagaaagcagcagccgcaaggcggcggagaggctgatggtggggggccgagcggccctcgtggggagctgggccggcggcaggccctcagtccgttcgtccttcttttcccccctcccctagaggctggcggctggctggccgtgcgctctgctcctcctctggctcttggccccgctcccgaccgccacagcctcctccgcgccccacaccaggtgctcgcgctgtgtctccatcctccccgcaggaggacctttaaatagcaacgtcagcgcgcttctctccgcacacacgtcacccgcagctcacgtcaccgaggtgcgggggatgatgtcacgcggccggaagtactgctaaattagggaaggagcagggggaggaggactcggcgagctcctgtgtgcccacctgctctcacttctccttaaaggccaaagcacaggagacagcccgagaggagctcgaacaaggaagcggcgggaggaggagatttccttgcaacaaatgtgccaaacctgagtgaatcattcgtagcaaaagtgcagtgtcaagcgggtaatagcctatctcccactcccaccgctattgcagcagcacccccgggcttctcttgtcctgactagcagggaaatgtgggagggagagcctgatcacactgctggtagatgtgcttccaacaggacttcggaaaaatcacctaaattttcaattatagagtgccattctggacatagtcgacttttaaactttttgttagtggttacctgaaacacgaaagaataaagagcagagcaataagcaaacgaaataatgttataaaggatagtaattttatttgcaaaatagcagttttgacataggaaaatgagtcaatcttagttcacgtatagcaaatgccagtgtgtcctctcagtttctcttcatcaagaatatgagttccatgacacttggctccagccagtaaa

SEQ ID NO: 44481 - DNA, 2011 bp, Homo sapiens
aagaggcgatatcaataaatatttgttgaattagtgaataccagctattactatgggcaaggcgctaagtccaggctttagagagaaagaaagcatttttttttttttttttttttgagacaaagtcttgctctgtcgcccaggctggagtgctgtggcacgatctcggctcactgcaacctccgcctcccgggttcaagcgattcgccagcctcagcctcttgagtagcggggttacaggcgcacgccaccaagctcggctaatttttgtatttttagtaaagatggggtttcaccatgttggccaggctggtctcgaactcctgacctcgtgatccgcccgcctcagcctcccaaagtgctaggattacaggggtgagccaccgcgtccggccaaagaaagcattttccttccaaagaagctctcaggttactggaggggcaaaagaacagataaagtttaatgttgctccgggggagaagattaggggaacactggttaaagaaaggcttctctggggacaagtcactcggccaacacacgaaggacccacagaaaacgtctgttacagctagaacggctgcacgtgagttcaggcaaggggcccagaagtggccctccggcgactgcctgctccacccctcttagtgcagtcctaaccctttcccaacttgtgctggcagcagttaagaaactcctttcaaatccggctgtcttgcgcctgcgcattcaagcaaagcgctcataggcggggtggggggggtggggggggttggggggtggggggggttggggggtgggagggaggcggccaccggaagtgtgacctttcgctccccgctgcctattctcatccggggtcacgtcggtcttccgggtgtctttgacagggttttctacgccgctttttcggcgactttttgctcttccgctttttgccaccgcccccaaccttctatatccttgcagcccctaccttttcttgtgttgctcctcccctggcagccgtgaggggggttagatctcagccggagccggagctgggcctagctgtcccacgggccaccactacctcctttggttcgggagaaagctacgaccaagtacgcccagctcgggccttagaacttctgaacgggcagtgcgggtaggccctgcttagcccttcccggaggacacctgtgagtttagggggtttcggagaggaacgcagcagtgtaggcccaggtcggcggcggggcacgggaaacttttccgaaacggtagcgttttgttttgcgtgggaggttccagcagtatctcttggttattccaaatttatgggcggcatctgggctgctgtacattttgaagaatcttaggaccgcttactttgcttactcgttttctattcctcgcgtactgcctcgtccaccactccaggaccaaaagaggaagatagtcttgggacccttgcatggtgtttcaaagggtggtgaagaactaaggtacgtagctggattaattaaaaaatttaaaaggcatttatcttttaagccttaattaaatggcatgaaattgcttcagcttttcactttataggaaaatgcacaggttaagactgttgtgtgcgtttcttttcttgttcagcctttgtagaaaagctcttcgtctctcaaggtgagaacacgaaaggcttatatgtctcaaaacttatggattctctaaattacttgtcttatctctttcaactctttgtttaaagtagcagatatttttcattagggtgaacagagaagaaacaaagggaaactgtaaaacacaagctaaataacacatgtgcagtgtatgattttgtgaagaaagagattgtaactgattactaaatctgtgtttttatattacaggtaacatagtaacttttgtaaatatcttcatattgtatggttcagtaccaccaggcttctaacacgtactgattaacagccataaggctattaatttatactgattaatagccagtaatagtga

SEQ ID NO: 44482 - DNA, 1353 bp, Homo sapiens
cctgtaatcccaagtgctttgggaggcagaggtgggaggattgcttgaggccaggagtttgagaccagcctgagcaatatagtgagactcctccatctacaaaaataaaaaatgaaaaaaattagttgggcatggtggcacatatcgttagtcctagctactcaggaggctaaggtgggaggattgtttgagcccaggagtttgaggttgcagtaagctatgattatgccactgcatttcagcctgaccagcagagtgactgtgtcttaacaaaacaaaaaaattaaacattgctattttgccagtctgatcaaatcatattaaaatttagtttagactttgccaaacattttatttttgacagagtagtcccatttactgaagtggtttataattaatggcactgcattcagccattcctaggtctttcttgaaggacattagctacccagagctaatgtgtatctctatactggcaaatttaagctactcctccctagaagaaatgagatgattaaaatagttgcttttcttggcagtatcacattactgtgagggaaaagggcaaacaagagtctgcaaggtgtattgagtagttacagctctgccacaaaaaactagtttttgtgactttggtgaagttattgtacctcactggccttaatctcacctgtaacacaaacagttggattaaatgacctttacgttttgtttaacttcttaaatgctttaatatcttttctgccataagcagagaaaggaaataggtcctctgtatgtagaaaaggttaaaaagattaacacatttcctagaataaattccagtagtcaataattgactacagatacttgaaagatgactcatcaaagcatgagggggaattgagaaaggattttaattataatttaagagttaatgaaaaaggaggccgggcacggtggctcacgcctgtaatcccagcagtttgggaggctgaggcgggtggatcacttgaggtcaggaattcgagactagcctgaccaacatggtgaaaccccgtctctactaaaaatacaaaattagctgggcgtggtagtgcacggctgtaatcccagctacttgggaggctgaggcagtagaatcacttgaaaccaggaggcggaggttgcagtgagcctagattgtgccattgcactccagcctgggcaacaagagcgaaactctgtctcaaaaaaaaaaagtaatgaaaaaggtaagatcatcaattggctagaaataataacattaatgaatattcatggaatgtttaccatattcctaggcatacagagctttctggtagacattttaaaattgtctttgcagagcctggc

SEQ ID NO: 44483 - DNA, 1003 bp, Homo sapiens
attgtttgggataaagggtccagaaagtagctcagctcaaaaccgaaaagactcactctggaggaaataagagacggggctaggttgcctttcctcctttgaaccccctggtgcagccggagcccgcgccccttaaagtgatctccagttgtccgaaaggcccgccagggatctggcgaaacgggggcgggggagggctcagggaagaggagaagctgagcccgggccccagaagctcggtggcgaaactttgacgccttctatttaaagtcgcggggctcgcccgcccccggcgccgggaacccgagccgcccccgcaggggcagggctggggagggcaggggccagagcagtcggagggagaacaccaggcgcggcgcgggcggctccggctccggccccggcccaggcccgggagaggcgatggcgagccgcgatagcaaccacgctggcgagagctttctcggctccgacggggacgaggaggcgacccgggagctggagaccgaggaggagtcggagggcgaggaggacgagacggcggcggagtcggaggaggagccggactccaggtagcgcgagcctctctcctcggcccagggcctgcagggcagctagcagcacccttgcttgtttgctttaagtttttaagctctggggttcgtttgcctcgagctaggcactttctctctgggtgcactgtcgtttaaaagaacttgaaggtgaaggtgctcgctgtcagctggagtgacaggcccgcctgcagcagagttcattacccccgcccccagctccttgtgactcgctgctcttgtttattcctgaggatttacttaggtcctgcataactgccgaaatgtgctggaacacgtacatctggcccgaggcacaggaacaatcgcgaaatcctgcgctagaggagaagggggtggggtggaggcggtgaaggcgcactggtaccttccgatgaatggcggtctccccgggggcctagcagtaggct

SEQ ID NO: 44484 - DNA, 3009 bp, Homo sapiens
ttaatttagtaactactaaaaaggctactgtatgtctaaaaagacaaaaacaacacgacaccacacaacacacaaaaacccaaaaccccaccagccctttataaaattaaaaactcaatcattgatcttaatggattttctctagaaatgtctcaaagtgttttcttgtaatgtctttaagagggattagactaggacagtgattgcaaactaagaaagtttgattaacagagctggtcttttgcttttaagggattcattatatgccactgttcatttaggaggatatgcttttcaatacttaatgggcaatgagaggacgtttaatatattttagaggtcacagagttaaaatgtcacaaagtgttaacaattaactcagcaagtgcacatggcggtccctgtggctggaagccttttatggagagactgatctcagagccataaatgttactttgtgcgtctgtttcacaaaattggagcccagggtgttgacttgctgctaagtagtttttgtgcatttggtgacacctctcagaagtcctcacctgtgacctgaaaagttgatctgatgaccccctacctaaactaagcagatacaatgagaaaaggatgtgagttttccaatgagaagtagcagcccatacgatttattccatgcttatacgatggctggcattgtggaaaccgttaagcatatcaaatcatctaatctcaccataacccaaggaggtaggttttgttattcccatttgacaggtgaggaaaggtgaggaaagagaggaacagaaaaatgttctattttcaagaaaacacagccggttggggtgtgtttggcaggggagtttggcttcagagtctgccccacagcgaaaaggcagagtgctgctgagaaagatgagagaaacagatcatgataaacaaacatgaatctaggcttccttgatgctggcacctggggattttttttttaattgtggtaaaatacacataacaaaatttaccatcttgcccatttttaattgtacagtttagtggcattaaggacattcacattgtggtacaaccatcactgccatcctctccagaactcttcatcttgcaaaacagaagctctatatccattaaacactaactctccatattctccccttctcctggctgtggcagccaccattttactttctgtttctgtgaatttgattactctaagtacttcatctaagtggaatcatatggtatttctctttttgtgactggtttgtttaacttagagtaatatcctcaaagcttaccatgttgtaacgtgaaacttttcctcctcttatctattcatccattggtggatacttgggttgcttccactttttggctattgtgaataatgctgctcccctgaggacgttccaaaggccaggttgagtggaaatctgtatctggtcacagattccaaagtccagtttggttaatgcttaactcccccagtgtggtggctctttttgggcacatttcatcaggcagaggggtgattcttctacccaattccttagcctcttataatgaagccctaaactttcattttggtattttttggtatcatacctttttttttttccccacacagagtctcactctgtcgcccaggctgaagtgcagtggcaccatctcggctcactgcaacctccgcctcccgggttcaagccattcttatgcctcagcctccccagtagctgggattacaggcgtgcatcaccatgcccagctaattgttgtatttttagtagacatggggttttgctgtgttggccaggttggtctcctactcctgaactcaagtgatctgccctccttggcctcccaaagtgctgggattacaggcatgagccactgcgcccggccagcatcatacttattcaagtttattactgtaaaagtgtaaacagagttgctaaactccgggtctctgatgttgttctaccacataagaattgtaaatccagccattattattagattatatctatggaatattcttattcccttttcattttagaattctttgaaaagtaaaagtatttcctgtttctgaaaaaaggtgttttacctttaatgcttttgggggaaggagcacattaaaacaaaatttctaacctacatactttgcttcttccttgaaattaagtgattttcttggatcaattaatcagtttttaagtttgttaatttacccgagaaagagagagaaatgtgaaagatgttttcatttttaaaaagcagatacagctccatgtataattcataggataaaagggggagcattttcactgttcatgcctcaagtaattctcaaatactgcttcaaagatgatcgacaatccttgaaacattctgcttggtcctttcatagacctgggtaacatgaaaatttactgaactacatttttctggacagacttatttagaatgtgacatccatttcctgctgggaagacaagcaataaattccaagacagtatcagggtctctgacccgtgatcagttcctggggaggtgctctcaccagcggcctctgccttagcatgcagttcgctcctcaggtcttacctctgtggcctctgtggctttccagatgatgggtccctccttcagccctcatcttcaggagcttcctgccttgcccctctgtttcctgtgctcctgccaaggcccctttgctttctgaatgttagcactggttatctgtcagccactttgctaagcactcgatagatattatttgcttcctataatgacactgggaggtaatactattattattgttttctcattttaaagatggggaaactgaggctgagataacagaggggatggatctggtgtttaaccttgggccagccactctgcattgaagtccatgaacttgacccttctcctcttctgcttctcgtttttcacaactgtgtattttttcagctctttatcgctgttgcatcttctcagtttgtctct

SEQ ID NO: 44485 - DNA, 1574 bp, Homo sapiens
cgcctataatcaaaaaacagtttacatacaaggacacagtgtgatttcctctgagagattccaatatcctaaaaactatagcagttgcacatttagaggggaaaaaatgagtaagcttgtcttggtttttttgctgtttcacaaagagcggttctaaagaacattttcgtttctcataatttccagtgatttcgcttgcactttgaggtattactcagaatgatcaaaccataaacaacacagagccaaggtcacggtaagaaactaaatcctcaatattatagctatatacctcacagctttaaatggaagaagaaaaaaaagagtgcagaaaggggagtgtaaaggtttacactatacctcttgaacctctccaggtgttatctatcacattgactttcaagggtgcaccagaaaatttggcataagcctgaaacagagtttgcaatcaaacattttagaccaagtgcgtaatgcaaagctgcagagcagctttacttcacagccccatcccccaaaggcagaaggcgactgatactgaggccgcatccctccccgtgatctcaagtagggacgcgggcgccagccacccggctttcgaggactttgctccccaaaaggtcctggggatgcagagtagggagggcgcgccccttgcttcggggtttcactccaccgcccagacagctttgtgaggcggacaaaactcggagccaagcggagaagccttgatgtcgccgccggccttcggcgggggtatcggccaggttgggactcgtcggtgggagggagcccagggcaatgcagcgtgcagcggctcggccctcctggaccccgcagcgcagcgggaaactggggcaagtcagcctggcgcctccagccccgccccttcctcctgcgccctggcccgcgaggcggcctcaccatcaccaccagggactcgctgtgaaccgatgggagtccccagccgcctccccagcaactgagttccaagggggccgccatcttgcgcgggccgacctttactatcccggaagtacttttcctcctaatttccggcacgtgaaacgcgggggcgtggctaagggagggaagggtaatttgggggctcttgagagatgagagaaacaacgactggagggattaagaagaactcttaggagcagcttggcctaaagggtaagagttgtgtgccttaagtcagacccaccagtaattcttcaaatattaatatttattagatccctagagtgttccaaaccctttgaacattaaatctgtgtgatgcctaaattaacctgtttgtaaaacagggatgacccagtatttacaagattgtggtatttacaatgtcggagagaaagaacttggcacacaggaggcactcagtaattgttcaaccccttctcccatgtatgtggcctctgcctgcctttccagcctcaacctgttctcaccctcatgttcactggcacaaccctgcttaaaagttacagtatttctgaacgtcaggtaaattgtgcccaccttcagtgctggtccttcaatctggaatatctttcttccctatgcag

SEQ ID NO: 44486 - DNA, 970 bp, Homo sapiens
actgcaaccgtcgcctccagggctcaagccatcctcctacctcagcttcctgagtagctaggactacaggcatgcaccaccaagctcagctaattttgtgtgtgtgtgtgtgtgtgtgtgtgtgtacagttggtgtttcaccatgttgaccaaactggtctcgaactcctagactcaagcaatccacctgcctcagcctcccaaagtgctgggattacaggtgtcagccactgtacctggccagctccattttcatgaagacatgtgaaagacttcatgaggaaatagccaacattttgttttcagcaaattcctaaaactgtacattttttatgactttttttttacaccattttgtcacaacagagacaagatgttttgcttgataaagactgcatccaaccagataagtagataaacaagcacagtcttcaactatcagtcctcactggaggactctgtggccataaaaagggtaggtacggttctaactcgtgacaagcacctggcatctgccccgaaggctctgcccacatcaaagactgtttcttgcacaaccaaccagattaaccagcccagaccaggaaattctttttttctttattgctctccctggactacttcattaacccttttcctattccctttctcttaatgttaaatgttattttgtttgttgcacaatgtttaatcagtaacatttatatattgacagagtatacgattgtgtacggtttgcaatactgactggctggtgcagaggctggaacctgtgtgcctgcagatctaatgagtggatgagaagtactaagaagaattggctccctgggaactccacatagctggtggcttttgtaactgaaatagcatcagttaagtccaacattatggaaagacacaaatgttcgtggacctggttacctctgaccttggcgtcactcacaaaaaccaagatatgccaccctaaaac

SEQ ID NO: 44487 - DNA, 2871 bp, Homo sapiens
agagtagctgggattacaggcgcctgccaccacgcctggctaatttttgtatttttagtagagatggggtttcaccatgttggccaggctggtcttgaactcctggcctcaaatgatccgcccacttcagcctcccaaagttctgggattacaggcgtgaaccaccatgcccagcctatctgaccctttttaaaattgctttttctcctgtaattggtcttatgtcaatttaatttgcttccagagaaagaacctagaagagtggaaggaagccatttttcccttctctacaaaggcaaggtcttgctgggaagggccaggtgcatgccagacttagcagtcaggcccccatcctgtaagcaaggggaaaagcactactgaagctagaacacctttggctacaaagtggaagacgtggtgaaagggtacagacttgaggcaaggggacaagtttgaaggccactgggaacaggtgaagaaggtaaccccaggcagagaaaccagagattctgcaggtagagctcacaattggcaggagagcacagatgacaagaatgaagcacaagaatgagacaaagctgttttgttttcttctttttttatggcattgccgtttggggtggagggagggtggagggcagaggacagacagcagaagtgaagaacaaagcaggagtttgctctttaacaccttagggcatcaccaaggggtatcccagcgagaacagtctggtctggaaattgctttagaacagcaattggggctggatacaggaagtgtcaggcctctgagcctaagccaagccatctcatcccctgtgacttgcacgtatcccctgtgacttgcacgtatacgcccagatggcctgaagtaactgaagaatcacaaaagaagtgaaaaggccctgctctgccttaactgatgacattccaccattgtgatttgttcctgccccaccttaactgagtgattaaccctgtgaatttccttctcctggctcagaagctcccccactgagcaccttgtgacccccgcccctgcccaccagagaacaaccccctttgactgtaattttccattaccttcctaaatcctataaaacggccccacccctatctcccttcgctgactctcttttcggactcagcccgcctgcacccaggtgaaataaacagccatgttgctcacacaaagcctgtttggtggtctcttcacaccgacgcgcatgaaaggaagcacccgcaggcgggtaatgagaagtcagtcacacaggtgctttctggaggaacctcaatttttagctgtgtttaaacatgagtgatgaaacagcatggttaaaattttcaggtgctgaaatatggtaggggacacacacaaaaatgaatgtttcagagagtctaacccaaaacaaaagttacacctgtatgagtagtgccagtaacgaggaggtaatattgctttgaatctctaaaagctacattcatggagaagccataccacttcattcattaggctgtttcatttacacaggatttattgctctaaaacattccctaaattattttcttccccaccttctctcttctactccatcagcaactctaattcctgaaccacatcttccccataacacatgcacattagcacctctttcatctataccagcccatctttcacctttagaccttctctgcctccctacctcttttttcttcctccaaaatccatttcaaggagaatgctaacagcagcaggctgagccaccatccccaacaaatcccctcccttgtttgcttactccagaatctggaatgcggccagggccctttaaggctcatcacagggtgagtacattgacactgtatattcatcaaaaacaggtaaacaacccccctgctccaaatcctaatcaagacctcctttatactctgtgggtgacttagcacatttagttttcagtatgtggtaagtatttttgggcaaagaacctccaaggtgaacaagctagcaggattctggcaaggggaatttgctccgattaaatatttgctgttccaaagtccaccccatttttggaaaaagaaaaaatacatcacatacaaattccacaccacagggtgaaaggaatgtgcctgctaagggtgttacctcttaagtctggctctgggcacccaaggacagggcacttaagccaggctcacacactgtatgttgtttcttttttttgatgcagtcttgctctgttgcccaggctggagtgcagtggcgcaatctcggttcactgcaacctctgcctcccaggttcaagcgattctcctgtctcagcctcccaagtagctgggattacaggcatacaccactatgcccagctaatttttgtatttttagtagatggggttttgtcatgttggccaggctggtttcaaactcctaacctcaggtgatctgcctgcctcggcctcccaaagtgcagggattacatgcgtgagccaccgcatgcaggctgtatgttgtttctatacagacccctgagaacaaggcgtttccctccaaccctcaaagcaaccaaactcaaagccacaaactatcaagtaagaataaacagctcataagacttccattcctaactccactgctaacttgagctagctacacacatacacaccctgagcctcagttgtgccatctgtaaaatgaaacaataccgacacccatttcatggagttgcctgagaattacatcagataacacctgtgaagtgcttaccacggttcctaacccatagtagtcattaagttaacttctttaattctaaagcactattatgttatatttcatgcgcgtccgtgtgaagggaccaccaaacaggc

SEQ ID NO: 44488 - DNA, 1011 bp, Homo sapiens
agcttccagcgctcatctctgcggctcagaagccatcaatagctcgaacagaaaacgtcctcacatctgtcacacaaacacaccccatggaaccaaaaataaaccccacactgatgaaagccagcatgtcgaaagataattttagatctatttgaagactgcagagactgtctcgctgaaattttaaaaccacaccaccagaatacccaaccccttatgattatgctcagccctgatgaggaggcaaaaacacttcattccattttataaacctcccaggcacctcagctctgtctctagaatggggagagagcattcctgagttaccacgtgactccgaaggtcagccgagtcacatctgagccaacaccactgtccaatattcactaatggagttcacatatttttagctttcagacatacacagtctagcatcacaggctccttccagacacacttgccaaactgctctcttttcccctacctgagggccagctctatggggacaataactgtgtgttactcagtgtctctgaaatccccagcacctttcagagtgctcgccacttgcatctgaaagaatgacagctaggcaattttttaaacttttgaagaatgagctcggattacagtttaatcaagtcacagaatcatcctattaaatttctatgcagagtaagtatcaagattcagccattcacaatatctatgcattgtttcctgttcccatcgctctgaggctactttttcttccattcttcgttgtgccatttctctgttctctccagccccatgtttatgatggctgacaatgctcatttccaaagcttttgtctgttctatttatctgcaggctactccgaggccctgtctgtggacagttgcttaacagacgctttagatgactacagaaaaaaacgtgttaggaaaactttcattctcacatcttatcattctctctcgtccatagccagaccaatcctaaaagagatccagctgacacctggtgct

SEQ ID NO: 44489 - DNA, 897 bp, Homo sapiens
aaagatttctacaatcagctaagagcaagagaagaagccaagaactagtaaacaaagtgggaagaacatgaaaaacaaaaagttgggcccaagaaagtgagggagaagaaaaggaaaaatcagttaggcagacagttaaggctagtcctcagagaaacagactgaaaaatcacagctacacatacaaataagagttgcctggggaaaaacaaaactgcagctgcactgataagaaagcagggcccagcatagaagccttttgttctttgtgtgattagcaggctcccagggaaaagtttcctctccttctcaggcacatacacggtgggctccgtgggaacttgcacagggagtggggaggtgctgggggaggcttacctaaaacacagttacacaaatgaggagctgcactttgtgtttacccaacacatgcccgtgtctgcactgataaggagagttacacagacagctgcacagataagggaacttaggcaaacagctacagagatgaggggagtttctcataaaagctttcagactcaactgtaaaaacagcgactcactcaggtcctcctttccattgcacagagctttcttcgttcactccaacttcacccttgtgttcatattaatccttacttttcttggtcgtgagacaacggacttggataacacctcggacaacatgaccatcaaccctagacggtttcaaaaggaacctgtcaaaatccatgagcctaaggatgaatgtacaagcacccagggtgctgggatgggaaaggcctgcagccatacacccttgtaggaaataatgagagtatgtaacttgaagctcaaaagaaatgggtgccttttacactgcatttctaccagagtttcatgtcccaaatggtaagc

SEQ ID NO: 44490 - DNA, 926 bp, Homo sapiens
tccaaatattagaatggactagcctttcttactagcccaaaagtgatttatcaaagtaaactatgctaataattaaggttcgagcacattatcttaagctacacattgatatatataccaggtggaaattcaaaacagcatccgtaaaagaaacatttatgttagcatctagggaaatctcacagccctgctgactgaacacgtgtttctggaggagcatacctttgaataaaatgggttcacatccagcccctgccacctacagggttaagacactgagcatgtcactcactttcaaaactggaaaaatcaattcctggctggaactactggtgctttcacaagcttggagagaagtgccagggtttcgttacccctggctccaagagggcataaagcttttactgaaaaagttacagcatataaaaaacaaataaatatagaatatacaacgccaagagggaatgctaatgtaaaccatggactttaggtggtagtgatgtgtcaaggtaggttcatcgattctaacaaatgtaccagtctggtgggaggagctgataatgggggaggccgtgcaagtggggaggggaggtatatgggaactctctgtatcttcctcttaattgtgctgtgaacctaaaactgctctaaaaaaaaaaaaaaacctaagcctattttttaaaaatataaataaataaatgaacaaaacagtgcctgcccccccaaacgactcagtaaatggatgttggctgaataatgtatggtgaagtcacagtggcaacactcctcacgcacagtggctggcaatctcctccatgggaacaagttcacaattgcatgctatactcaatttcccacgcaagcactgaatcacagagaatactaagggtgttaatttgtagatactgcatactctcctcctccaa

SEQ ID NO: 44491 - DNA, 1988 bp, Homo sapiens
aagatggtaaattttatgtatgcattttttaccccgcaagaaaaaaaaaattccttaagccttgtaaaactttatagagtttaactgatgtaaataaaccaatacttggtagaatttgaagcaattaaaaataaaataaaaaaattaaacagctatcgatatggctaggatttgtgtccccacccaaagctcatgttgaattgtaatccctaatgttggagatggggcctggtggcagatgactgcatcatgggggaagatttctgatgaatggtttaccaccatccacttggtactgttctcacaacagggagtgtgttctcatgagatctggtcatctgaagtgtgggatatctcccactctctctctctcttgctcctgctcctgccatgtaagacacctgctcctcccttgtcttccgccatgattggaagcttcctgaggcctccccaaaagcagaacctgctatgcttcctgtacagcttgcagaatggtgagccatttaaaggtcttttctttataaattacctagtctcaggtatttctttatagtaatgcaagaacagattaatacggctacctaaaagttcaagaagttaaacagaagctatatatctgcctagactagaaatatgctcttatagttcctttatctgggtttcttaaattttattttgagttcagagaatcctctaaagcgccaaggctttcatcatcatgcccataactgtggcagcagtattgtggggactgtgagagatgagtttctggcaagtggtttctcaaacaagtttcaacatactagagcggtgttattttccacgttgaacatttccatgaaacaaacagtcaagggtcaacttagtatctccagccaccagaaccaagtctgaaatgggcaagaagaggctatgaacgcatacaaagccatcagtcagctttggggttacagtggagtctgggacaaagatgttccccttttttggagtctctttctcaggaggttagggctactttcagcaccagaagaatgtttatcaagtcctctgttctcagacagcagtgggattatttgaatcattccatcacaggaccctctctctaccttaaaattaaaaatatcatatcacacttgatacattttagcaggttggtgagatctataaggtttgaggttgagggtaaacaacatcccttctgacagctcaacagaaaacaaacgttcctcaggggcaggtccttcagagcagcgtttctatcactcgacactattgactgggggccagaaaattctttcttgtcgggggctgacctgtacactggatgctgatgttcagcagcgcccctccctgcctctacccgctagatgccagtcacaactccccctctcccctgcaaggcgtgatgatcagaaatgtctccagacaatggctccccagttaagagccactgagttaggggtgaaaagcaagagccatctccacagtcagactgtggggttcaccaccttcagtctgaacacaggagagcatgctggcaacttatgtgtgtgagaaaacttgttggaaagctaaagccgtctttacaccttcatttccactgaggaaaaaacaagagctgtgggaacattcactggcacccactgaggcaacaaatacctgtggcagaacagggctgaaaaggtgagttaagtaagttctattaagaaaaaggtataagaaaatgaaaccttgaaactcaaaacggagaagtgtaggagactgggagaaaacaaaagtacccattgggttttaaatatttttttttaattagttttagggctgggcacagtggctcctgcctgtaatcccagcactttgggaggccgaggtgggtagatcgcttgagtccaggagtttgagaccagcctgggtaacatagtgagacactgtctctacaaaaaatacaaaaattagccaggcatggtgacacaagcctgtagtcccgg

SEQ ID NO: 44492 - DNA, 3371 bp, Homo sapiens
agaaaaaggtggaaaacaaaaactatacttaggcttacaacaaatttagtgataaattcagagaatttcttttttctcaaaataccaccaatgttttacatacctttttttttttttttttttttttttttttggggatggagttgcctaggctggagtgcagtggtgcgatctcggctcactgtaacctccacctcctgagttcaagcgattcttgtgcctcagcctccccagtagctaggattacaggcgcatgccaccacgcccggctaatttttgtatttttagtagagatggggtttcaccatgttggccaggctggtctctaactgctgacctcaagtgatccacctgccttggtctcccaaagtgctgggatcacaggggtgagccaccattcctggcattttacatacttacacaattttttttttttttttttttgctaatttaacatctcagaatcctcttttcagagactgcaaaaaacaaaatagttttgcaaccaacctttaaagttattgagtaactaaaagtgatcaatataaacaaactagaatttgaactcacctacattgaacattcattgtttaagtcaacactaggaaagggtaaaagtaaacaacaaaaaattgctccttaatgtagggagaaatctcttggccagtgaagcaatacaaaaacacagacattctgcttacaggaactaattaaaaagaaaaggaaaaaacaaaacacagacctgttcagccatataaagttataatgatgaacatctgtaaagattacatgaaatcacccatgtaaagtgctcagcacatgtgcctggtccgtaagtgtttaatgttagcttgcatgcatgctcatttcattcaatacaaggctacttaaatgctctgtgcctctgctgcctcatacaaaacagagacaacagtagttcctacatcataggattattaggactgagaatgttttcaaggcacttagaacgttaattgtcaatattattctcagtgtgctcgaaaaggaaggccagaggtttacagggctgggatctaaacctagtcactccaaagcactagcatctcatttcctcaaactctgggagatttacctagttgccagctctcctcccactgctcaggaaattcccagggcagaaggaacccaaggactcgctccctcttggaggctcagcctgctccaggagcttgcagctctagcatccccaaccccatcacccaaacctcacacctgaccaaaaacctattggccaggcacggtggttcatacctgcaatcccagcactttgggaggctgaggcaggcagatcacttgaagtcaggagttcaagaccagcctggccaacatggtgaaaccctgactctactaaaaatacagcaaaatgaagtgtggtggcatgcaccagctactcaggaggctgagataggagaaccatttgaacccaggagggtgaggttgcagtgagccaggatcccgccactgcattctagagcaagactgtcacaaaaaaaaaaaaaaaaagaaaccattgctcttcaaatttgtttgccaactactgatttctcttttcaaacggggcttgagggaagttttataaccatgtaaaacaaataataatgcaacaacagccgccactctcatttatgcagcactcccttacaagtgccgtcacagactctgtgacaccagcacaatctctcccaacctgtcaggtattactgttattattatttttctcctctgtaccagttgggaaacttggactctaggaaataaattgcccaaggtcacagctcctttgtggtgagcacagggtccaaacccaggtataatttctctctttctttctttctttctctctctctctctttcctttctttctctctttctttctgacagtattctatcccaggctggatggagtgcagtggcacgatcacagctcactgcagcctcaacctcctgggctcaagcaatccttcctcctcagcctcccgagtagctggaactacaggcgcacactaccaacctggctaatatttgtattttttgtagagactgggttttgcccggctggtctcgaactcctggcttcaagcagtcctcctacctcagcctctcacatggtgggattacaggtgtgagccactgcaacagccccaggtagtttcaaagccagtattcttaactacctcaccaaagtgaatgtggaaaagagaaaaagggaatagtacttttaaaaaacagttaactatagaaaacccaatcaaaattcattttccaattaagttattgcttagtaaatgaaaatattaaataaagaaccggctactgctccacatggcaaggaagtgtacttcagtgctgacaaccccattactcaggagaacagtttaactgtgatatatggatggctccagtgaccactgccactgtatttatagtttgtgatctgtataaacaaaatcatttctcatgcctgtaacagcatctactgcaggcctttgttacttacaattaaatctctataaatgtttaaatctcatggtcacaaaaaaaatgagtcagccatctaagaatgactggtcaccagttcccaaaacacaacctccagcgtcatgaccaccagccccagtaggtctaaattccagatgaataattcttccaacgtacagtcaaattaaaaaaaaaaaaaatcaatagaatcgagaacccagaaataaagcttaacactgacagtcaactaattctgccaagataattcaactgggaaagaatagtcttttcaacaaatgttggtggaactggatattcaaatgcaaaacaatgaagttggaccctttccccataccagacaaaaattaactcattaagaatggccaggtgcagtggctcatgccagtaatcccagcactttgggaggccaagaagggaggattacctgagcccaagagttggagaccagcctgggcaacatagtgagatcccatctctataaaataccaaaaaagttagccaagcatgatggcatgctcctgtggtcccagctacatgagaggctgaggcaggaggatcacttcagcctgagggttcagggctgtagtgagccacgactgtgccaccacactccaccctgagaaacagaccaagattctgtcttaaaaaaaaaaaaaaaaaaaaaggccgggcaaggtggctcacgcctgtaatcccagcattttgggaggccaaggcgggcagatcacgaggtcaggagatcaagaccatcctggctaacaccgtaaaaccctgtctctactaaaaatacaaaaaaaaagccgggcgtggtggcaggcccctgtagtccc

SEQ ID NO: 44493 - DNA, 2295 bp, Homo sapiens
tttcccatcttcgctagttatcttttcataaataagatttaaggggttatgcatgtgtttttcctacttttgttttgactacacagttttcatgagagagtgaaaatgctgtctaatcactatatactgtaaccttacttcaaaaacccacaaattgtttcaaaatttactctctgataaaaacccactaagtctttccacaacagctgctttccttaaacatcagcaattttaatctcacaaggcaaactacggaagaaaagccaaaagtaaaatcctgcttccctttaaaattcaaacagatgttctgtgtaatcacaccaactcagtatttgaatttcctactgccctatactgactctcagattaagttctaaaatgttttgaaatatcattaatatataagctagaagaatatggggatattctcactgtaaatgttttaaaatacattttaagcagggcagcaaaggtttactctgggctacttgggatgcctaatatttgggaacaatcacagtgatttagagaggtaacttgattgatactgttctcaggatccaatcataaccctaaattcaactgcaaacagcaatatgtaaaattcaccaacaatgcggcttgactcagaacactaagaaaacactgggtctttacaattaggcaggtatggccacttaaagtactaaaaatagcttggtcaaagaattacatccaatggctagttctgtagacatatcagcttatatgaagacttcctttttaacatcaagttatcacagatgatctggccacatactgctctgaaataaaagtagacaatgccataattactgcagtgccctttctgaggctctaactggtgactacattaaaatacctggaaaactggaaagtaaagcttccgtgtctcatagtcactcccagatactcagtatctgtgggaaatctacagcctctatacagaaaacgagggcggaaagcaagcaatggggaagggggtgttaccttttatttaattagcacagagagatgagtcagaggctgccttccacgcctacagactggcctctcctcaaccgtgcctacaaagtcagacttgctgcagtccaaagctatttgtcagctggacaggtcagctacagagctgcccaagaaaacatatttgaatgagcaaccatcaagcaactctccaactaagagtgcaaccttcactctccatactgttcaaggtaagtgacagaggattacctgacaacctgaatttagctacactacacaaagacactcctaagccacccttcctgtatcagctcaccagtgagctatacagagtagtccctccttacccaaggaggatgtgttccaagatccccagtggatgcctgaaagtgtggatagtacccaaccccatatatactgtgttttttcctgtatatacatacctatgagaaagttttgttgtttaagacagggtctcactctgtcacccaggctggagtgcagtgacacaaccatggctcactgcagcctcgacctccctgggctcaggtgatcctcccacctcagcctcccaagtagctgggactatataggcacacacaccaccatgccctggctaatttttgttttttgtagagacagggtttctccatgttgcccaggctggtctctaactcctgggctcaagtgatccacccacctcagcctctgaaagtgctgggattacaggcatgagccaccttgcctggcctcatgatgaagtttaatttctaaattaggcacagttaagagattaacaacaataagaaataataaaatcaaactcttatgacactatgccaacatcactactcttgcgctttggggccactaagtcaaatataggtgacttgaacgacttgaacacaaagactgcaattctgcgacagtggatctgataaccgagatggctcctaagtgactaaggggtgaggagcataggtagacagctagacagcatggagatgctggccagaattgattcacatcccggtgggatggagtgaggtttcatcacactattcagaacagggcataatttaaacctgtgaattgtttatttctggaattttccacttaatattttcataccccaatagacctcaggtaactgaaaccacagaaagcaaaactgcaagtaaaggggtactaccgtatttagccaacatcaaccaaaacaccaccttgacagaacaattatagggcactttactgcattgtgcccacatctttataaagatgaacaggaaaata

SEQ ID NO: 44494 - DNA, 621 bp, Homo sapiens
agagtgaatagggccggcgcagtagctcatgcctgtaatcccagcactttgggaggcagaggcgggcgggtcacctgaggtcaggagttcgagaccagcctggccaagatgacaaaaccccatctctactgaaaatgcaaaaattagccagatgtagtggcaagtgcctgtaatcccagctattcaggaggctgaggcaggagaatcgcttggacccgggaggcggaggttgcagggagccaagattgcgccactgcactccagcctgggtgacagaatgagacgctgtctcaaaaaaaaaaaaaaaaagacagagtgaacctttactcagaatggcaaccacaggcttgatcctcctggtgcaatagtcttggctgcccaccaaccagacattagctgagtcttgcctactagaatgttggcgcatctgcctcgggtgaacttttcaggcaagaagcctattaatttcagcattattattgtcataaatgcctatacttgcctgcagcaagccctcccaatccctattgtcaaactgccttggaaaggttgtctagattttccaagcacacacctcacttccgctctgacagtgagcactgtcattttcttttcttttcc

SEQ ID NO: 44495 - DNA, 4858 bp, Homo sapiens
cctcattgtccagatttccaaattgaaacccaggcctgagtccaaagcccaggctcttttatgggttacatattgttcaggatggtccgcagttaaagaaagtcaccaaaatgtctctctccgacctcaaacttctcccgacctaaatacctaattggtgacttgccatttccattaaatttataataggcatctctaatgtaacgaagccaagaaacttgggttttcctcaccaaatgtcctcttcctaacaatttcctacttcacctcagtaatgcgatcatcatctacccagtggctcaggccagaaaccgagcctgtctcattcccacatcccacttctaatccttgctcaaatccagttctacctctgaaatatacccaaagccaatgatgtcccactgtactcactcctacagccatagcctaaattaaggtaccacgctgtctcctcctgggactacagcaacagcagattgccaggattcgagctccatcaggaaaggatttttgttcactgccgaagcctagaacactgcttgcccctaagaggcaaatatccacttaggttttcctcaccaactgcttcatgaccaactcgaactgctttcctcacctccactctagcccgttacagtccagtcttcacgacatcccaattatcttctaagtgcaaatcaaaccacagctcgcccctgctcagaatcctcccacagcctctcactgcaaccagaattaaatccaaagtccaaaggcagctgacaggttctggccatttctggtcctgctcttctctctgacctcatctaagacaccccagccaccctagactcccttgcctctcctcactgagcagtctcaactccacaggcatcttctcagactccctcggcaaccctcctcaaggctgcttaccacacggccttctgacagtaccagtaccatattcattgtttcattgtttacatgtttatgaatgatctcccctgcccagataggccattgagagcagagatgcttgtctgacttatgactatatagcaggctcctggcaaaaggcaggtgcccacagaaacaaacaagaattggtaacttctgacggtgctgtgaggttttgtttgctttcctttcttttgagatggagttttgctctttttgctcattgcccaggcttgagtgcaatggcgtgatctcagctcaccacaacctctgcctctgggttcaagcgattctcctgccttagctgtgtagctgggattacaggcatgcgtcatcacacccggcaattttgtgtttttagtagagatgaggtttctccacgttggtcaggctggtctccaactcctgatctcaggtgatccgcccgcctctgcctcccaaagtgctgggattacaggcatgagccactgcgcccagcctgtttgcttttcttttaacttcctaccgccccatccacaggaaatcacagtgtgatcaccatcacacagcactgaggcccaccacagtgatgcctccagcaggcctgggaaagcaggggttaactttgatttggttctttccaaagtcctaagaggggagactttagaaacctgctaaaacatcaacagcaaaataattcttttacaaaacccatttgaatactggtaattacagagctctaaattaggaacttgggaatggcagaaagagcctcaaggggacttcaagggaccaggacagatgcccctaaagagctgtatcattactacgtaataaaaagtgtcgcatcatattggagaaaaagtatttcaaaacgggaataaaagatttgcagagctttctgaaaacagtctttcctggtccaccttgttctcaaatacctggtaaggtggtgaccattctcattctctttctctctctgcctgacacagggaaaaaaaatcatttcgtctcagtcgtcaaaagcctcaatttcctcaactctgaaaaggccagctttaatgtatgccaagcacagtattagacctcaaaaaccaagacagctccacgtggccactctaaacaggacagattatctgccagtataatcgccggttacagaaacccacagtttaaccactccatcacttacagctggcctcgattgtggaaaggctgagtgtcagcaagaacaccccgaaccaggatgctccctagagtctgattcgttcgtgaaaacactccattaaaactctgtaccgaaacgctgataatccacatgtaaagggagaaaagagctccacatccaagagactcacctacttcgttttttctaactctgcaggaaggagtgaaaccagcattacagggctaagacgtactaattctacactgatgcagtaactggtaggagacataatgttttaagacatcataggtttaaataggcgagagttaaaaaacaggttcgaacaagtttatttgcaaagagaggcaggaaggttccagccctacccaggcagtcgtgctagtaccgagccagggttgggtcgggaaattcaggaagcagggctgagttttcccttcgcccagacctgcgcccggtagtttggaagtcaggcttcgagacattctcaaaggtacagagcccacgctcgactacgagatgccaagcgcaacctgcctgggttgtttgacccgagttttattcagggcatagcaaaggagacggtgcctaaacccacttttcttcctggattcatccgacaagcagagtggagagggctacggagctcagcgctattcaccagtgctcggcgcaagaggcgacacgcccctggagcagtcgggatcctccgcccgagcccggcacgccccgctccacgcggagtcccggaggccggacgggaagaccccggggtagcctctcgggcttccccctgccccttcccgcccgcccagggcacaggatttcccggacggctgagcgccgcggggccagcccgagcgacccacccgggccctacgttcggccgcggagctgggagcgcacccaggcaggtcctccacgcctggactcctggcccggttctccgatctgacaacccccgcgctgcgcccggcctcgctcacctggcccgcacagcactgagctgacatcgcggcggccaatgccgaaggcgcgctcgctggctccccgcgccgcacgggccctcctggctgcctcgcgcctcgagcgctgggctcagccgcagctcacacttgaacgaagatcagcctcggcgaagcgcctaggcgccgaggcctgggtaaaaacaactgcggccaagccccgccccgccgccggccccgcctcgcccgcccccagccccgccccgtgcccgccccttcccgggcgcccggcggcggagcaggctcgacccgggctcgcacttccgctggcgtcaggcgggtgggctgctgcgatcacttcccggttggggcgccgagctccggagtcggccgccagcctttgggccccacgctccgggtctggtgcgcggtctggccgcgctcgggccctcgccaaatgagagcgcagcgcctctccgccttcggatccagagaaagagcttgttgctgcctctaaaaggttggagccttagtaagcggttcctgcctttcctgcacagaccagaccgccgggtgctggtctgcgctctgccgcgcgccgactgggacagcccacccacgagatccttgttcctgaaatccctttccttccctcatctgccaagaaaactttcaacttttgggctctccgcgcctcccaagcttcctcgaatccctgggcccttgactgttctgccctgatggcacttggtgagagatccattgagagccctttccgtgccttcctgaatattgatatgttttccagcctctcctcctgcgctggcccaaggactcattttccgtccctgcttcctcactaaaaagagggtgcccaataattgcttgttccatacagaaggcagggaggccgtctctaggttttctcccactcagatctgctgtcctcacagccacctccccaagaggaatgaaggtatttcttttttttttttcttttttttctctgagacggagcttcactctgtcgcccaggctggagtgcagtgacgcgatctcggctcactgcaacctctgcctcccgagtagctgggattacaggcgcctgccaccacgcccggctaattttttgtatttttagtagagacggggtttcaccatcttggccaggctggtctcgaactcctgacctcaggtgatccgcccgcctcggcctcccaaagtgctgggattacaggcgtgagccaccgcgccctgccggaatgaagatatttctgttagtgcgatttttgcgccaatccctttgctctttcaaataagcattaccgtacccattttagcggtgaggcaactgaagcccagagaggttaaataacttgcccaaagcctcacagcaaagttgaggaagtaaaactgggcctggaatccactcgtctgatcccctggcacatgacgcaaggcttgaccttagagggactcgtttccagacagagctctggcaaaggagtgtcttgggcagcttaggagtagaagaggaaaggtgaatggaaaccaggccttgggttatgagctgcgcaggattttccagcatctcagatgcaggcgtttagagaaagagatataatggagcaggccctactcagagccacgaaaaggaatgaggacagttggctctaactcaaaacaaaaatagggtaaacccaatcagtcaagcgcagcaacctgctccgtggcgatctgtgactcatcagaagctgaggctctcaccaggactttctaatgagcttcg

SEQ ID NO: 44496 - DNA, 2171 bp, Homo sapiens
tacaggcgtgagccactgcgcccggccaattcttgcgatttttgaaagatcagtatgaactgtgagctgtttaacctttgaggaactgctttttccctgtatctgtctgtatctgatcccacatgtatgtctcttcccttgtttttattttttatttttttagagacacggtctggttctgttgctcaggctggaatgcagtgttgccatcagagctcactgcagccttgacctcctgggcttaagtgatcctcccacttcagactcccagccagtagctgggactacaggcacgcgccaacacgcctggctaattttttcattttcatttttagtagagacagggtcttgctatgttgcccaggcctgtctggaactcttgacttcaagcgatcctcccgcctcggcctcccaaagtgctgggatgacaggcgtgagccaccgcgccgggtctcatttaaatttataggaaacttgtggtaaaaatagcaaaactcaacaagcaaatatacatcaagtgagtgacattttatttctacatcagataagtcagcttttgcttttagacagggagacagctgttctaccagctgctttaaaataaaaatgcagaactaacgcagcgaagggaaggaaagtgtggctgggaatgtccagtcagctggaggggcttggagctcggcgttggctgggagcatttttattgctgccgggaggaggaaggggaagcgggggaagcgggggaggcgggggggcagcgtgttgtaaaatcagtttgaagtaaacaaaaagttatgttttccgaggggccagcagcgcggagagcaggcctagcccgctgccgggaaggcgggtctgtccagtagagaccggaacgccgcgcaggctcagcaaagggctaaggctggagccggggaagctgcctctaggttagcgaagggtaaaggaagtcagacactgacgcgagtggcctcccgatcccgcagtcgagtggagaaccgagtcccgacctaaggtcgaatcatcaggcgtccccgtcacccaacaacccactcaggcacttccggtaagaaatctagtgcccttggctcggaacctgcgtcgtagtgcgcaagcgccccgggcctggagacggccgcggatgccgagggagggggcgtgtgagccgaagaggaaagcgtcctctgcgcctgcgctctctgcgctgcccggtggggcggggaaagaagccctgagccgggatctggcactcccaggactcccggccggggtagctcttcactcctcagcgcgacgtcgtgtcgagttcccaaaaagctccgcaggggctgtagggaggtaagagccccccgtgaccggtcgtctcggcctcccctcagccctgctgttcccacaggggggcggggtgaccgctggacccgccgacctgggcgctgggtctggccctcttcctctggggacagagcctgggccccgaccgattccttttccgagcccccggagctggccggggaaccctggccctccaatctgatgtcccctcctggagcctgaagggccagaccggactggaccgggagggcaatcacggcggctgtttgcccggttccccgctcccgggccgccggagtgttcggcgctcctgggggagagaccccagcggacggagggagaagcgccctggcgccgccgtcccgcctggggaggggctgcgactgcggaggggactgtggttcttcaggagtggcagaggctcggtccccgcagaggagtctcatcgccgccggtgctctcgcactgtccattcccgcacccatgcattttctcttggttagagaccagaaggatgcagtggccgtctttcccgctgcctttcctttggtacttttgagaactccaaaagaggaccttatttttaactcttatttgtattatcgtgattgcaaatattatgttccagactaaggatgttctttcttattagtttgacttgtatgaaaaccagtccatacatttgatattaagttaatcttttcaattcaaaaaataggcactttgttgattcaatcagattcctccatttattcacttgagcttgtcgtctcttgagttggcgggagtttaatggtttaatccagtagaactatatataatttttcgcctaatttctt

SEQ ID NO: 44497 - DNA, 1229 bp, Homo sapiens
actgatttttatcagtaatgattccacacccttttaggatattactaacatttaaaagaaaatatacccaactgttgaaattcgtgctccactccagcaactgctttcaatcggagttccatcctccgccgcagtatgccctaacgcagcgttatcttcagagctaccaccagcttccgaaacctttcggaggagcgcttcgccaccacctgcacggcgaagcggcgcgtaaacgaacctcgaacgccagcctttgcgcctgcgtgccgcggctccgtttggttccgcttcgctggcgcccgccgggctcttcccccgccgaggcctgtggtttgtggagtcgaatttccctgccaccagtgcccggttagcaggggcgccagcctgggcgcctgcgcggacggcgggcgtcgtcaccatggcagcatccgctggaggcccaggtaagcgccgagcgcgcggcctctgcctggaggtggggcgctttgagaggctccgccggccgtaccctccctttgcgggctcccgcggtcttccttgctagggacctgggagcgcgccgcgcagaaccgggcggctgggcttggagcccgctctgcactcggggcgcgcccgcgatcgcctggcaaggaccttggtttgccgggtgggctctaagggacaggcgttaggggaggtcgagaatggcagggtcagtgtcttttgaggtctgggttggaaagaaaggaatgtgacgtttccctaatccttaatttcagccgaccgtatgggggcggtctgggtcagtaggttcctctttgaaagctgggggaggtttgggaatgcggactgggccgggcccggcatagtcccgctgctgagcgcgctgcctggaaagctggcagagtgtgcggctcgcttgattccccttggaatcaggtgcttcaactcgcgggacagcagttccgctcttgaaggttacagtatcttttctgtaaacttaagtagtggcatgagacaacgtcagtgacgcgttctttcttcagtttagatttttttccctaattgtaaaaataatacacgctttcaccattctgactagcaggctgtataaatacaggttctcttctgaatcgatgcacagtttacagaatcttggaataaaatgtgtgtgtaagcgaaaaatgtccaggtcctgataaatgccattatagaacatttataaagtatattagtatagggaaatagga

SEQ ID NO: 44498 - DNA, 843 bp, Homo sapiens
gaatccctagtctaagttttgccaattcacatatcaaaagtaaagacaactggcagtgagaagtcaacctgtggacagtgaatcaggtcaactagaagcctcctaactccttgtctctggccttttggaggggaacatgactaggcactgaaaaagaggcagtctaattcaggatccctttccctaattactttagctggtaggtgctgaaaaaaatctctcttccccccaggttttcctgacctccagcaccatgaagtcttttcctccttgcagacaaaactctatccctttaggctttgtcttgtgtttgtctttgttagggctcctaggcaaagtagagaccatctaattttttcttctgattagatttcacatttgattatctactacaaagctatttgaaatatcacacaccaatgtgttttgtctttttttttttttttaagaaaaagtttcaacagaaatgtcactgtatttacagagtaacttcctggtacacatgaggtcagctggggaacagaaaggacaggagcagatgattagaaacggtcattaaagtaattcccccgggtaacaggaacagcacttcatgtggtttataggccttctttcttctgtttggccaggggctttattcccctttatccctgtgacggcgggggcctgtaataatatcttgggccaggtgcagtagctcatgcctgtaattccaacactttgggaggcagaggcaggcagatcacttgaggccaggagttgatcatttgagaccagcagttgatcatttgagaccagcctggccaacatggtgaaaccctgtctctactaaaaatacaaaaa

SEQ ID NO: 44499 - DNA, 2198 bp, Homo sapiens
tgccccatgcctgataatttgctcgtgcgttgacatacataaaatttctaagacaaaaattttttaataatggtaaatgaaccttgggaactgcatacagatcatacagatccataataagagaaaaggtcccagattaacacggaaaactttccatttaactaacatttgcactggtaaacttcatcaagcaagaccctacttaatcccacattaccttctactgaagaggttgtggtcattctctggaaatatctgaattcattcctacaagttagagaaacagcgttactcgaaacattatcccttgggctcgagctctaaggcacctgacaaacggagcgctgtgggtaggggtgaggtgttttctccagggctgggactttgccctgggcgagggcgccgcagggcaaagacctcaccgggcagcagaatccgggcagaaatcagcaactgggcctcccgcgcagcagaaaaggggaatccagtcgggcccacccttcctgccagcgcagaccgcaagtctggccccatcctctcgccgggagtcggccaccccgaccgtgggcagcctgcgcccgtttgggtcccatcgccccggcccggcagatacctgagcggtggccagggcaggtccccgttcttgccgatgcccatgttctgggacacagcgacgatgcagtttagcgaaccaaccatgacagcagcgggaggacctccgagcccgctcgttacagcagaacgcgcggtcaagtttggcgcgaaattgtggccgccccgcccccctcgtccccatttgtgcaggcgaggccccgcccccccgccccggcgcacgcagggtcgcggcgtgctcgcgcccgcagacgcctgggaactgcggccgcgggctcgcgctcctcgccaggccctgccgccgggctgccatccttgccctgccatgtctcgccggaagcctgcgtcgggcggcctcgctgcctccagctcagcccctgcgaggcaagcggttttgagccgattcttccagtctacgggaagcctgaaatccacctcctcctccacaggtgcagccgaccaggtggaccctggcgctgcagcggctgcagcggccgcagcggccgcagcgcccccagcgcccccagctcccgccttcccgccccagctgccgccgcacatagtaggttctgtctgggactgggcagggccatcggggctgggggggcggggcttgtgggtaaggcgggcggaggcggggaccctccgcccgatgatagggctggaggaggaaggggcgggctgaagaaggggaaggtgggaagagcccagccggggctacaaattgggtgaagcgctgaggttttagtacttccgtttgaggagataggcaaaggttatgcaggtttttaatggcaggcctgagacaggaactcaggtctcctgactcccattctgatgagggggcttgtgggcaaggggtgcgtcttttaacctccatcctttttttttttccttggtggtcgaagagttttactgattttttaaaaaagtgctggattgggtgactagaagaaagctgcccttaggtctccagtttttaagactgcaacagcatggctcaatatttgaaatcactacggttaaaagcagtcatattgtgcagttccccagtgaactctttttgtagtttagattataaagtctgaaatacagtttgggtggataaagtttcttaggatggtatagatgtgactaatcatggagtccttcctgttgccatccttcaacgcaataagtacgtttgtttgtttttaaaccagagatactgccacaggaaaagcccaagggtgacccctcacttgggtcacctgcacagtatttttcagattgaggctgtggaagggcattgaagactggtgtttagccacctaccgtgttttaatgtaggtggcagcttgggtgcttcaaaatcttgttcctttcgtatatatttctcccttaaaatgattactcctcttctgttttttttgaggacgagctacgttttcatgaattcaccaaaattttgcacccaccatttaaagggtagctggtgaaggacttatgtatgcttttggcaagttttctgccaagaaaaaattcataatcttgtcacatctttagtgatgaacataaaccttttaaacaggaaacacttaaattgc

SEQ ID NO: 44500 - DNA, 1225 bp, Homo sapiens
gagacccgcagtgggtgcttctttctgcaggcagggcatcccatcaagtgagaagtgatgagccttcagccgagaggggaccctggagtgggtagctcctctccgcaggcaggttgtctgcttgtctcttcaagtttggccgagtctggggatttgtatgggcttgagaggaggaagtgtgtgctgattggttcatgggctgccatgggcgggctcagaaaacaccgtaagttctaattctggttcgtcagcctggcccccaggcttcaggctgttcctggcttgaaggtggggcttcacccggacctgaccctttctgctcaggagcctgtctgcctcctgccgtcatccatggcacccaggctgtttgtgccatggggcacctgcaggacagctctgagctgccctcagccctctccttggcctccttcccatgttcatcagtgtccaaagtccagagggggccgaggcagcagggggctggcatgttagcactgccctgagcatgtgcacacccagccaggttgcaacagttcctaggcttggccttaactttgagatcagagtgggtgctgggagctgggagaggccaggcagtcggagcaggtacttctgagcctgcagagggagggggaattccctttctgggcccttgagattgcagagatgcccgggtccacagccacagcttgggtggctgtggctgcagctgcacccaggagggtggggctcctgcctgctcccagcccccaagagcacagggatgcccaggtttgcagccacaactgggcagccacagctgtgcccagggagcgtgaggctctcaccctgccaactcagaagggggcgaggcttcttccacccatttctggctcctgtcggttctgtggagcatgcagccctggctgcgcctctcctactgcagctggcgttacggcagtggctgctccagatgggctgccattgccatcataatgacctggatttctcttgccaacctctccatgcctcaccgtcttcttattgctgatctttggaggtttgctggactgcactgttcaaataaattgagttttttttgaaaagttagtatctttacctgatgtcccggtgaagctgaattgttttaaacatttgggaactacaaagtgtacatgtttctgggttttcttttggattggggttcccatttctgggccattttgcttctctctcactctcccct

SEQ ID NO: 44501 - DNA, 387 bp, Homo sapiens
gatgcagcattgtggctgctggaaaggctgcctaaacatctactacaattcttactgtgtttttgcttacatgttacagcagaaacagactcactagcagacttttccatgtaaattaaaattcttcatttccaatgttaaatttcctttttttttgtgtacccaggattaatttgagataaatctagtagaccatgttgtctgttgttaggcgccgaatcatgtatctctggggatcctaccttcccagaaaggcagagagaaaatatgccaggcattcaacactgatgttttcaagtatgaacttttcactgacctaacactgatgttagccaaaaacaaacacacgaaccttttctttgcccttttattttaggtcatggtttt

SEQ ID NO: 44502 - DNA, 1335 bp, Homo sapiens
gctttggggtagaaaggattaacttgaattcagtgggttgtcttaggggtgtgtgtgtgtgtgtgtgtgtgtgtgtgtgtgtattttagtcactgagtttcactttactaggaagaggatctaaaggggaaccagaagggccataattttttatgacatctatctttcactgtatttggaggaaagaaaaattcttccccttaggtcatgatttccacccaaagtgaggatatgcaaagagagcactaaccagcctttctttaggctccaaagatactcatcggactgtgactcatctgatcattggttgaaatatgagtgacacagcatatgatatacattcaactgaggcttcatggctcagtacaaacagcacttctagtgctggccctgccacttagtacctttaaaagagttacaaagatttagacagttgtaaaaccttcaagtggttggggttgttttgaacaagttcttagttacagacaacagaacatactccccagtttatgaagacaggaatttattatggggtctatttagctttcagagtttctgaatgagctagaggatcaagcctagatattttatgagaagcagtatggtcaggatcaatgacccactgtactgtgccagtaaaaagttcattgctaccacctctcctttgctgctcacaaagataatgactagacaccaaaacactccactgcaactgttgcagaaaaaccaaactcccagatgatacctgcctgagcagccatggtcttcccttacaaaattcaattctgcttccaagtctctcatagatatgtgtctttggtgaaaggcaggcccttacagaaccttagtctcaagggaatgggaaaaatgcagactttggccttctggctcttgtccacaggaaggaatctgacaaatgagttagagtcctattgattgagctgctctgttatatctgtcaaagaagttattttgtttcctcttttgttattgagttttatttcattgtggtcagaaaatatcatctataccattttgactatcttagaaattctcctgttatatttctttaagtgttccctgagtgcttgagtaaaaggtgcatttcctgtcctcaggatataaagttgtatgcatgtatatgtaaaattttataccattagatcagaggtgggaaaactatagcctatggaccaaatctggcccactgcccattttagtaaataatgtttagtttgattacagctatgaccatttgtttctatagtgtctgtggctgcttttacactacagttgagtcgtacagcagagaccatatggtctgcaaagcctaaa

SEQ ID NO: 44503 - DNA, 2047 bp, Homo sapiens
ctgtgtttatttaactaatatactacagtgtttcttttctttgttaaaaaactgtaaagcaagaaatgagacagaaagttggggaggcctatataagaataatttacagctttagattaaataagttaatcagaattttaattctcataagatctgagaagataaagataaaatgatgtaaaaaaagcaatccttaaaaataaaatttgttggccgggtgtagtggctcacgcctataatcccagcactttgggaggtcgaggcaggtggatcacctgaggtcaggagttagagaccagcctgaccaacatggcgaaaccctgtctgtactaaaaatacaaaattagccaggcgtggtggagcatgcctgtaatcccagctactcaggaggctgaggcaggagaatcacttgaacctgggaggtggaggttgcagttagtcgagatcacgccattacactccagcctgggcaaaataaataaataaacacataacatctcttggtaaagaaataaataaaaataaaataaaatttattgatcctttagtgcttaattaaaaaaaaattcaggtcacaatatctgtttttagctcttatgatacttaccagtatgacattgtgaagacctgtggtgatggaaacagcagggatatgagtggtactttttattattttcagggtactgaagtgtttcattttgtcattgtctgatttaatttagacatgcctgattcatttcctggactgtatttataagcccatgccatttgtgtgactaatgtaaacagtggggtcagttctttcaaatagagggactgttgaaaagctaggaggtttcctgcatttagcaatgtggaaatagggaggtgataacttggtctaaggctcagtagataacattataactgatcacaaaagaagtcatgacgagataatgtcagtgattcataggaataggaggccactcatattaatatgaatttgctttcttttaagaatgtaagaatatcagtttctaggtgaagtgctggtgttgtgtatggttcagttcaggatttaaactgcataggattcagtcttggctctgctacttaccagacacatgatcttgagcaatttctctttctaagcctggctccctgcctggaatatggagatccggatagtacctgctccatcaggttgttgtgaggctcacaggccaagctcttggcataggcctggcacatggtgaatggtcagcacatttgccagctagcatttttattactctctttgatattcctctttttattttcattattaggatgacttagaaagtattttcctttcctttccctttcaaaaatactttaacacacacaaaatagaatatttcagggaatgccaacctactcatcctccagcttcaacatcttcatctttctgccattcttgttttatctgtctccatgtgtacatttttttttttgttagaccactttaaagcaagttccagacattgtattatttcacttgtaaataaggaacttttttcctttttggcatagcacttttttggcactggagattgcactggatatagctctgaaaaggactatcttggaaagagttcataatgagtttctgttaataatgtgtgctattataaaggtagccctcttttttgtttctttcatgttataataaaggaaaaaacttaagacaatagttgtgaagacataaaggagatggaattggcttttaaataagtcctagtatgttaaatcttaaagggaaggaagtttgaatcaattttaaaaattgagacggagtcttgctctgtcacctgggctggagtgaagtggcgcagtcatagcttactgaagccttgaactcctgagctctagcgatcctccttcctcagcctcccaagtagttgggactacaaatgtgtgccaccacacccagctaattatttatttttttttggagatggggtctccctgtgttgcccaggctcgtcttgaactcctggcctcaagcaattctcctaccttggcctcc

SEQ ID NO: 44504 - DNA, 1134 bp, Homo sapiens
ataggatacaagaatatgctttctcctcaagcactgacaagcatttgagtgatctcatcctgtttgcagaagttgtgataagttttaattttgccacaagaaacaagcacattggcaatattacagtcaaaataacaccttttataagatgagtccattggaagagataaagggacttttaattattaattaaaatgctaattgaataccatatcttccagccaagggagtcatatagcatgcaaatagttcctgtttactaaagtctagttcaatcagtattcatcaaacagtcatatgaacagagcatggttctgagtcataggccttttaaaatttgctgcattccttacatcagaggcagatgcaatgagaaagctttgatggctgaaaaatcattctggctctcttccacaggggaagagaaacaggggtgttctccttgacttctgagcttccacagtaagttggcttatggagactgagctactctcccctcaggccaaatatcataaaagagcatgtctgaacgttctgaaagaagccaaaataatttttttttttccttgagacaaagtctcactctgtcacccaggctgatgaagtggcacgatcatggctcaaactcccaagctcaagcgatcctcccacctcagcctcctgagtagctgtgatgacaggcacacaccaccatgcccagctaatttttaatttttttgtggagacagggtcttactatgttgcccaggctggtcttgaactcttggacacaagcaatcctccggccttggcctcccaaagtgctgggataacaggcatgagccactgtgcccagcccaaaaagaagttattttgaggtcaaaaaatttgcatgaaattcaggctcaaccactaaccagctacatgaccaaaggtaaattatttaactcaatagtcttggtttcatttgtaaaatggagagaattcctgccttatgaagtttttatgatgattaaataaggcagtgacttttttttttttccttttactgtaacctatgggaagaaatatattttacattagaacccagtacacaaacaggcaggctgcaggctctgggagacagccagaaaactgtgagtgcccaaggtgtga

SEQ ID NO: 44505 - DNA, 1869 bp, Homo sapiens
ggaagaagaaaaggagtaccatacaaagagactagcaaatgtaaaggcctggagatggcaaggtacacacggcatttgagaaattgaaaaaatgatcctatgcacggagctcaaaggagagactgagcaaggtgaggctagggaagtaggcagggacttcataaggagttcgaatttcatcctaaaacaatgggaagcgaagggagagtttaaagcagtacagcagtactgctttaaatgtaatgatttacattttcaaaagttccgttcctacgacacggaaaatggatttcagggagttggggcagaatgaatccccagaccagttgtagaactacaggtacaatatgggacaagggaggaggtgccaacagagataaaaagaagtggacaaatattcaaaaggttaaatggattgagcaaactgttgagagtagtggtcctggtaaattgcattttttcactaggcacagctggtggtggtatccatttgcaagaagctacagaaaatgagccgtttggaaatccagggttttcctcttaaaaagagaacttgtttggctacaaagtgttaacattttaattgaatgctcaacgagcactgaaggggggacatgaggcactgcctctcacccaagagagcccccaaatgtccttttcagacttttatcacagtgacccactcccaccgcgcctttaccttgcctctgcctggaatgtccttaactccctcttgccggcaatttcaccagatttttgatttcttatccagtctcacgggaagcctttccggcatctcccaccctaccgatcttcccgtctatctcgcctgctacactgtgagttcagacagcacggattgaactcttcatcttttcgtgtcggcgtcctgcacagggccatcccatcactaagcgcgccacaaactcagcccagtattgacgcccacgagtcgcttgtaaagaccgtctgtgacgccggaagtgacgcgctctcgggcactatgtgcttccggtctccaataccgcaggagggcggtcttccccggctcgccaactcggctgctctgggggattcgtgcgcggtaagaagctgcgcggtagcgcggtgaggtgaggttctcagccaccaaagctgcagggtctcgtcgttcgttccctctggcctggcggaacttgcgtgggaagctgggaggacagaaggcttagccgctgggtccctgagctggctggagcgcgggctgtctaggggcggcgacctcagctgttgggctccggctgctgggggctgtgcgtccagccgccctggaatccgcctgtgggtgggccgcttggctctcccacttcaccctcttgataacccagagcctcccccttcccacgtacgtaggggaaggataatctacttccttttgaacagcttcggtccccactatgacagtcgcataaacttcagcgaagagtgcgctggtaaagtggcatggagtttctcacaccaattcattgggtccacccttcagcttctgtggaaggggtctttctgttactaggagctgagacttggggggttgccagggatgctggtcttaaaaggtgataatttaggccgggcgcggtggctcacgcctgtaatcccagcactttgggaggtcgaggcgggcagatctcctgagctcaggagttcgagaccaccctgggcaacatggtgaaaccccttctctactaaaatacaaaaaattagctgggcgtggtggcacgcgcctgtaatcccagctattcgggaggctgaggcccgagaatcgcttgagccctggcggcagaggttgcagtgagccaagatcgcccactgcactccaggttgggctacaga

SEQ ID NO: 44506 - DNA, 1154 bp, Homo sapiens
gtggtgtcttagagttgatgaattatggtatttgcctaaagaatttttataaggattaaaatgtattattcaagtgcttctctttcactatggcatataaagaggccagggcctggaaaatgctcaggtgcatttcagttttgagcttataaaactgggtagataacatgactagtgagcaaaaatggctttcactggtcaaccaaagtgactagctgtaaaaaaaaaaaaaaaaaaaaaaattaatgcagcaaggagagtagatcccatagatgtgaaaatttggccatatttgcctgtgtgtgccttgattttataccttgtaatcttttgtttacaataaggggctttctgcgatttgttttaatttagaacactttagtagcaatagaaacactggatacatttttgtatggtacatttgatgtatatagaattagtactttatttttaagaggtaaagcattatgttgggggaaaagtagggtgggtttccacatttgcatttttatgttaaaaataaagtcaagatttgggggaaaaaaaaaagaaaattcagccagatttgtatctgattaggtcatttttctaagtcacttaacatttcgagcatgatcaagataatgcttgaccattaagcaatagtgtttgatcattaagtgaaacacttattttagaaaccacatgtgttgtaattcacaatcctggaatgttgtttaaagtaggcaggtgggcatttttatagggttagggtgcctggccagtggaaggcactgaaacaaaaattaactttatttctttcataaatgcttacccccatctgatctgtacagtagaacagtagtttctaatctgtttttgggccattgactgtttgagaatctgacatgctattcaggaaagtgcatctgcttacatcttttgtttacaggtccaagggttcacagactcttgattgtctaagcattgttaagatccaggcttctgtgcaatagctcttgaacaagtgccttccatcatatctcatttctttttcctacttctcaaggccaggtgcaagaagcagtgggtgggtacaatttagtgctctgtgaggttaaaaggaatggagaatgaattaataggaatagtggcacctccctatgatcctggtc

SEQ ID NO: 44507 - DNA, 712 bp, Homo sapiens
tgaatctcaagttgctctttacttgacattccctccagtccccatggccagccccccatccctgcttatttccttcaggcatctgctatgaccagcttgagtctttctatgaccatccttataggaaagagcagctccttgcttcctcatcccaatacctaacactatagctctatttgttccctctctaccagattataggttacacgagggcaggaattttgattcttgttcattgctatatccctagaaatgcttggaatgtatgaagcatttgcatttgttgaatgagttaattcaatgagtgatataaaaggaatcaacagagagatgatgcaagtgactgggtagctcttagattggataatcaagaggaggcctctgtggaaattttaaagctgaaatctgaatgacacaaaggaaccagtcttgagttagccaaaacccctaaagagagaatgagtttgccatatgtgagggacagaaaggagtgtagctgaagcctagagaagggccacatcagggctattctgaccaccctatttaaaacagaatctacatctccatcctaacactggcactcctggttccccttactttgctttatgtttttctgtgtcatttatcaccttctaccatattaagttatttattatatgtgtcgtttttgtcccatctctctgctagaatataatctccacggggggtggat

SEQ ID NO: 44508 - DNA, 632 bp, Homo sapiens
atattgcttggatctttttctgtggaaattcttgggagctggctttaaagtcatttcttcacaaaggagctgcatttgcagctgcagatcccctggggtcctacaacacagcaccactttacactaaagtttacttgttctgttttagcccagacaggtcatgtgacttctgaggatccaaatcttcatgaggatgcacttgtgattgaattctgaaagggagagaattttttttcccattccacctaaggctaaggctctctggagggtggaatttttctggttgactcactgagggaatcaccttttggaggttccagcaccaaggaaggttccctgatccaaccttctccctcacatggacgcctggttttgtctcctgagcccaagcaggcccacctgctgggtcctccaggacaaatgccagcccccatgcttccttgcactgcggcatttgtgttttctcaccatttctggacttcaaagttttctcttatttttctgcctgctgagatgtgtttgcaaagatgtttgtaaatatttttccagaaatttttggttttacccaacaatgaatccactatattgctagaatcaaaatggaatcactttctaaagtgatctttgaaaga

SEQ ID NO: 44509 - DNA, 2219 bp, Homo sapiens
acttgaaggagtggataccccattttacatgatgtgattattgcacatttgtatgcttgtatcacagtatttcatgtatcccataaatatatacacctactgtgtacccacagaaattgaagtgtgtgtgatagtgacggtctctgaaggtgggaagtgagacggtaggcagacttactttttaactatatgcctttttatgcgttttgcattttttaccctgtgcatgtactatctctttaaaaatagtttttagataattataaataaaaaattaagagaaggccttatgagagacattgtaaagactcaaatataaagcagctccttcttttctgagggataactttaaagagaaaccacatacttcctatgaagacatatacagtatatactggaacctgtagagggaggtgctaggtgagattatacgtgcaccagcatcagctatgatacgtatgcagaaatatattgagttagatgactttggtgcagaagtttgcttatttggagttaatttacaaccaacgaaaaaaatagggttttcccaggttcagagagcaattcaggctcgcagttctggtttgggttaagtaaacagaactcaccctttctgctggctttgagtgatcaagttcaatacgtgtactttggatgttcttaaagtactgtgtcatcaacctgctttgacaactttacattcactctacatttgtagatcaggaactttgacctgaattgaggtcatgctagccctagttttctttctgcatatccagaaaattaaccatgataatgctcttaagatctgattttcttactcaaaaattaaattaaaatgctttcaaattttaagtttttcccctatatgtcaagcttgcaaataatgatccagtagtatttctgagatgtgcgtgcttatacacattccagaaatatcctgcttttacaaaactaatctcatctcttttcttttcttccgaaaggatatgatctggattcaatgttctcactgttctaataatatgcatttccatcatacaacatcttgaaaaatattccaatcttttatgtttgatatttataaccaacacaaacccctggttttctaaaaacatggtacaagaacagagatgggttggttctcttcttttagaacacacaatgtcctatcaaaaaccaactccatctgatctaaggagcagcaggtggagaaatcacatactacacagcggctttaaatgtcagagtctggctcttgcattctttaagatgaattgcttttaagttctctggcacctttgctggcatggaagttagtaaaatttccaaaaacaaaatcagatcagtggaattaggttaaaagttgttttatgtgaaaggatgtagaataagttagggcagattaaacaaagcagatgataaaagaagactttgagaaaaatctataatttgaaattgaactttgaactagacatgtagatgtagatctaatctggccaactttgtaacacactgaaactcaagtcaattgcaatcgttttatctctatatttgaatgactgtcatgtgtgcctgtcactaatttagactatctccagtattcaaagtactgttagtgttgtgcagacaaattgtctgctgctgatttcacttattagtgcaacttgcacaacaccagaagaagccggtgcagccacccatgtttacctggctcttgttaccttgaggggggtgtgaagacagcttcagtcaccatcctagcaacccttcccaatagacgaaccctcgcaagggagctcagggtagcagagatccccattcctccaagataaaaacatgacaacaatttcccagtgtctaaagtacagatttgacacgaattatctctttcttttataattaacttcttcctcaataattatttttatcaattatgtctttttttttttatttttgagtcagaatctggctctgtggcctaggctggactgcagtggtgcaatcttggttcactgtaaactccgcctcttgggttcaagcaattctcttgcctcagcctcctgagtagctgggattacagtagtgcaccaccacgcctggctaatttttgtatttttagtagagacagggtttcaccatggtctcgaactcctgatctcaagtgatccgcctgcctcagcctcccaaagtgctgagattataggcataagccaccg

SEQ ID NO: 44510 - DNA, 1096 bp, Homo sapiens
caacatgactcctccttgcttcagagtagagctaggagaagccactgtgtctagctctgggatgatccttggagtgaaagactcatattccagattgaattatcacagtgtttagactaaatgggaccctcctccaggcaccctgacactgaaaaaaaaaagccaagaaattgtaaggagcaaatctccagcagcctccagatgagtggatctggatcgtgtccaggcagccggctaggcaagctcatcaggccaaagtatcacttcggagggtgttttcaccccacatgcccagaagcttatttttaaacttcaataactcagcaatgttgacagttttccttcaggtattaacagtggttaatctataacatgcaactgcttgctaaattgctcttgcttttttaaaaaaagattttattttaagtcaattttgagttatatgaccacaaatgaaaagcactaaaccagtaggcagtattttaaagaaaccaatatgaccttcagatcatttaaaacaatgtggatttttttttgtattttacaaactttctatatcgtcttttctctaaggtacttttctgtaaagttcctattcctctgatgttaccacagagtgataacttttgcaataaatattggtgaataacaaatcttggggaagtatatctcatggaaagaagaagtgtcatttttttctataacattctgatgcaattgttactatgtccctgaattacatgctagatacatcttcacatacaaaatttaccttttcttttccaactggtttggctacaaatgtggagaaagccacactaacaagcttctcaatgccagtgagcatatcctgtaccatgaccttgatactgatctaaaatgaaaaaaagataaataaatacactcttggccagttcagatttcagcattcaaaatttagtcatatgtatgcaccattaccttctttcattttaaaaatgaaaccagaattttaatttatttttaagcaatagaattatttcaatgatgttctataacactggacaattagcttttttctgattataaaaattatttatttaccatgtcaaattta

SEQ ID NO: 44511 - DNA, 2424 bp, Homo sapiens
ttccagagactacataagggtgtggtagcagcagggtgaatgcagaagcaggtatgagtagtcagcaatcctccactagccagaccttagagagactcgccaggatgtaacctttatcaccactcctctcgctacacttttgttcttgtggaaaatagttatttcttaattaaaaatgttatgctaacaatgtagtccatttcttttttaaaaataattaaaaattttaaatttccattacggtaaatgtgatataaatagcctacataaacaaaagctgcctgggtgcggtggctcatgcctgtaatcccaacactttgggaggctggggcctcccaacacttcaggatcacttgagtccaggcgtttgagaccagcctgggcaacatagtgagaccccatctctacaaaagcaaaacaaaacaaaactcccaaagtcagctgggcctggtggcgtgcgtctgtggtcctagttactctggaggctgaggtgggaggatcgctttagctcaggaggtcgaggctgcagcgacctctgatggcgccaccgctctccagcccgggagagagctcaacaacaacaacaacaaacaaacaaacaaaaaaccccgcagaagctctctgggctcctcacttgtttaatggaatgaaggagtcccgagagccacacatttgggaaccaccggtctcggccatgcccagcgcgggcgcactgttgcaacacccctatccctggctgcgcagggttcagctctccgcaagtaccttcctcgccttcctaccccccccagcccccagccgccgccgctcccgcagccccggtcccgcgcctccccgcagccccggcgcccgcctacccgccaggcaggcggtggtgtcgatccacttgagcagctgccccgcgctcagctcgccgcgcgcagtggcgtgcgccggctggatggcttggctcatgaccacctcgccgggcgccggccgctccatggccagggcgagagcgctacgcctgcggcccccgacaccccaccatgcccgctccgcccgccccgccctccccgcccagctccagagggcactggcgccgcccgcccgggccgcgaacccctggccgccaggtggtgggagctgcgagtgagggggcccgcactgtcatcccaggactatcgcgagtgggggaaaaccagcgctctcgggtctcaggagaagtctgggaagtgcgcggggagggggctcccgggtagacaggtctggaaggcggctccccgagagccggagcgcgaggaacagcttttgagataaaaaagctgttacactttctagagctgctatcagtgactgtacaaagcagtcctcattagggaaacagtgtctccagaaaacctccagcatctaatggattggtggatgtctgactgtcaggggaggctgctccagggagcacatttacgatggagaactggaaacccggagaagtggagcaagcagctgaggtgataggagccgataagcgacccgatcacctggctggaacccagggctcctgactgtccggaatagcacgaagaagcctagccgactctcacgaattggtggtgccttttcatccttatatttttggcttgccaagcctcagcatggcgacatcagaatggagattctggtatttttctttcctttttaaaagattttttttaaaatgaaagtgaagaaataaggaaatgttgacttgatagcttttaggagcctctgtgtataggtttcaggacaatccaatcataaataggaattgcatgttttcactgaggcaagcatgaagtctgacttatataaaaggcattaaaataacttttaaaagcaaacaaaaacttgtgcatccaagatggtcccattatgtagctatacacttatttcaatgataacgttattacatcgcttttggcactcctccttggaaaatgcctttttaatgacttctgtattgagaaatcataatttaggaattgatagattatcatatattcactccatctaccaataactctgtgagagtcatttattgaccttggacttggccatgtggcttgcttaagaatggaatgtggagagatagcagtgtaccaccagtcttgcctttagaagcaccgtgtttctgttctcaggaacatctgacctctgccatgaggtcaagtagctgcctattagcatctgggtaccagactgaattcacgtattgcagaggcatctcagccagccggaggactcacagcctgaagcagagcaacccagcagacatgaagactcttgagtgagacataactacttattgttgtgtgccactgtgattttgggggttgtctgttatgcagcaatagctgacagttacatgagtgaactgtattaatatttgggaagtttattaaatta

SEQ ID NO: 44512 - DNA, 2396 bp, Homo sapiens
gaatagactgtgacagaaaagttctacagcagcaccatgcaagagaactttcttcaaagacatacttgttctgtggtctgtgctgtccaacttggaggtcactagccatatgtgcctactgagcatatgacatgtgattagtgcaatcaagacactaaatgtttaatgttatttaattttaatttattcatgtatccacatgtagctagtggttaccattttgaacagcacagctctagactatctgagctgtggggagaagcatctaatcccacatggtaatttactctttggatgaagacagtttctaaattaaaatgtaaatgtggaccctgaaattttttaaacgttttattggaaacctatgaggaccagggtaaaaggcaattcctttcaacatgctaataacaattgtgcctcctagaaaaaggcagataaagtcaaagggattggtcccaggttccaggaacctaaccagaagctgtgataatcctgggtaggcgagcacgaacttttcagaaagttggcagaaagagaataaaatgaagtgaattatagacaagctgagaccggctgcagaaatcagaaagacatataggtgtgtactgatgtatggatggattatagtgtgaaagcaggactccccagggaagagcacagaggggcaatggctcagctggcacatgtctgggccagatgtcattagggctcaaaccaaaaacatgcactgttcctgaggaaaggtgggtgattaggcctggaaaagggtcactggaccataggaagaggattgtttaatcctataaacatgcattacatcaaggaaaatctattaatacttgttaatcacttcacagcctacagagtttcagtacaggaaagtgaaattacatacttgaactgatcctgtatgtaggattatagtgagtatatggtgataagaaggggagacttttagacaggtcataggagaaaaaaaaatagagggaaactgccagaaacaagaaaggagattcagtttagacaacctctccccttgatcatagcagcagaaaagcaaagcaaagcaaaacctccagtcatagacaaatgctgatgacatggaactgatccctgaccctgtgtcagaggggaacagagtaccatttcatcacatcacatttcaacccaccatttcatcatcacaaacatgataccatttaatatgtttactcaattgattccatgcacataatgtgattccacgtctcacattataaacaatgacagcatgcttcaactatccagagcctgcggctaaacagaactatactttggtatttaaaagtttagaggcaagaataaataaaaagaaaataagtggttagcaagattttactagagtagaaaaaatcagagaatatggcaaaatgggcacagataaatttaatctatgctttccgcagctactgttatttacaataaatattggtgattccatcagtccaatataactttctgtgatgatgatgttataattctgtgctgtttactgcaacagccactagccagaggttgctactgagttcatgaaatgtagctagtacaatttaggaactgaaattttagtcgtatgtaattttaattaatagggcagctagataatcaatcattcttttaaaacaaagatcttattgagtatactgtgtcaataatataaaccagtaaaagatactaagcatttcagaaaggacctcaaaggaaatgctttttaaaaatgtttctggggctgggtgtggtggctcatgcctgtaattccagcactttgggaggctgaggcgggtggatcacgaggtcaggagtttgagaccagcctggccaagatggtgaaactctgtctctactaaaaaatacaaaaagttagccaggcgaggtggcaggtgcctataatcctagctactcaggaggctgaggcaggagaatcgcttgaacccaggaggcggaggttgcagtgagccaagattgtgccactgcactctagcctgggtgacagagcaagactccgtctcaaaaaaaaaaaaattattccagttcattcatatgtcaggttatgttaggaaatagtgttgaaaatatagaatagccttcattatactatacgttgttaagagtatgtatatatgtcaagctatacatacgcatatactctattatcaaccatttttatttattgctatcatctcaacactggcaactgttaacatttttttatctgtgatatttcaaatgttttaagtcaatcttacagaaaaatgatactttgttactgatttgttgggaagttaaaagagtgaggttggcccagggaggaaactgagtgaaaaaatagagaaaatgagggcccaattcagtcaaaa

SEQ ID NO: 44513 - DNA, 601 bp, Homo sapiens
tagattaaataatttgcctaaagtcacacagtggcagagctgggcttgagccttttaattattacgttattttgtttctaacgtgagtgtggttttaagagttcttaatgcaagactccttattctgattatgggcaggtttctacagttccagcagtctgagcagcatcagctattataagagtgggatggatatctgtaccagataagacagcaagcacattgttagcctacctttgaccccatgcaccaactcatttcctgaatatcctatggcaaccaccccctcaccctacatgcagctgccagggatccgtggatgcctcaatatagacatgactcagaagagaaaacttttgagtcccatttatatacactgcctggaattagccactcacaatgctcaaatgggaaatgtaattaatgacttattaatagtgggacactgaattgagctctgtgattaagaaatatgtgttactgagatgagcactggttacaattcaggaacttgaattctaactctaaatttgaccttgggcaaatagttttttgatttatgtaaaaagagaaaataaatgttatgtattttacagtgttt

SEQ ID NO: 44514 - DNA, 489 bp, Homo sapiens
ctcaggatgaattcataattcttaggctggctttcaagaattagtcattgcttatttctgtagcctctaccacttttccaaaaacatcctactaccctgaaacacacacacacacacacacacacacacacacacacacacacacactctacggcactactgaattttttgcttctagaaactatcacagcctcactggacttcttccaagcacaaaattggcgctatgccaaaagccctgtttgcttttctggcagggtttaccttgcccactgccttatacagtgcctggcacagagcaggatgctgaaaaaagtagttaatgaataaatgaataataagtgaatttaaacttttttttaatcttgtttttgagggaggtatttattggaacttggaaattgatatatgctcacaaatgttatcttttgctgccttttctcctcgaatttaaaagggtgctttttggtcaagtggctttgatgtttt

SEQ ID NO: 44515 - DNA, 2084 bp, Homo sapiens
ggccctaagccccagcgcccaggcccccgccgccgcgctccccgcgctgcccgccccgaccccggccccgaccccggccggcccgccaaacacccacattcccactgcgcgccttcctccacgcagctgcccctcccgccacccccggcggctccccaggtccccggagccccggaccccagctctaaagttactttggaaggtgaacccgcgggttatttccctcaatcacccaaacaagtttccatcctcgccaccagcaccaccgccgcccctcaacacacccggtccctcccgccgacagccccctgcggccgcccgcccagcgcccgcacctcccgggaaagcgcagctccccgcaccacacgcccccatcgcggcacccctccccctgccagcccacccccggcgctccccgggcggagagtgtctgtgtctcccagagtgtgcgagtgcgtgcgtgagtgtgcgcgcgtgtgaaggcggaggtgggtgagaagcggagacacttacttctcccgggcctggctgtcggacgggacggcgctgctgttactcttgcctttgccgtacatgcttgtgccgagagcagctcccactgtcacgcacctgtcaacccatcacagcctccccgggaacagccccgtccccatggcgacccacgcagccacccccactattggccgccccacgccaaagctccgcccccttcgcccaggcaacgcgcgagactgacaggcctccccctccctctggccttccgaagcgcgcggtggcggctaagcctcagcggcagtctcctccctccttccctccctccccgactccctccctcccgccttccctctccgctctcctccctccacccgctctccttccccctcccccctccgaacccgggcgcaaggggggaattagaaactgctctagaaggattttaaacaactggctgttctctccgccgccacccctccccccgcgccgcccgcgctcagctcctcactggagagaaggcgccgggaggaggagaaactgcggcctggagtctccggccggagccggcggagctggagccgtggcggccccagacttcggggcgcccgccgagtccacgacagagccacggcctcagccgccctggggcccccaccagcccctctcccgctcctctcctatgcgtgaccccgcgccggtacccacgattgatttttgcggtcctcagccctactccctggggtgtcgcccccgccctgttcccagagggccggctggcgagggacacccgcgcggttccctcgaccttctggctgagcgaccgacagcgactcgccttctctcctggggaaaggctgcacctccggccctcggcgccgctgcggtggcggcgcccggggccgcgccctgcgccccaggggagcacccggcctggggtcggcctcctctgtaagaggtgagcggacctcccgaggaggcccggtgactcctgcggccgcagcggcccctgccccaaccccttcttgcacggagccccgcggcgccctggacaccccgccagatctgccgcagaagagggccccaggcttccccacccggcctggtttaacagtttgggtcagtgatgcctattcatcctgacccctggagtggaaaaggccagaaaaggtcttgaaagacttccctgtccttgcccgttagaataggccccagcgcgctccaaggtgtacaaagctgtgccagggctgaaaggctgcccgagaatgtttctgtatccaaatccctaatcccatttcagtaaacgcgcaaaagtttcagaaacacacacaatctggttcccagtagaactctgcatcatttatcttattgaagtccttgactgtaaaatcagacgggtgcaaatggggttagaaagaagatgggcttcacacggggaagaaggggacagatggggtgggacagggcgacatctggaaaggatgaatagacaagaagtagctatgggaggagagggaaatcggattcgcgtggaggaaggtaccgttctattccacacacacacagctttaagcatttagtaggaggatcat

SEQ ID NO: 44516 - DNA, 631 bp, Homo sapiens
ccacttttcatttcaaatcgtttaacagatattcattcattattactcaatacatcccagttaattagatttccctaaccagctttttaaactgggtgaactgagttctagatatattcgttagcattagctgatccaaaaagaaaacagaactagttccagaagaagaactccatgttcctggctggcagtccttttcccagaccacgaagccacacctctttctctcagaagtgactattccaccaaggaatgtgagcaagctctgagatgtttgtcattcagattaccttgtgaaacttcactcccaggcagaagagaccagcatgctcagattcacaaaatgctcaaatgccatgtaccaaagtaatgaaatgaatagtcattgcaactatgctactgtgcaatttagtcacttacaccagaataataaatgaaattgggcctcaaattaacattttttgacacactattattggtttaacatcagctaatctgaggcaatgactgtttccataacctattgccctggattttttaaatcccaatttacatattcataaacacttaccaatatgttaggagacatggtgtgcagatctgccagttccaaagagttccagccctagag

SEQ ID NO: 44517 - DNA, 1027 bp, Homo sapiens
acctccctcccaatcctcattggaaatggaaaattcctgttactttattatttaaagcaatttggcttggtttatcttagcttttcctatccaggccaaatcctgggccttccccttcataaccaaaaagatccatcaacatcttctgagacaaattctttgtctgcagtctgttttaattatttttaataggtactcttcttctccgtacatgctatcagagaaggctttaataccaattttagaaagagcattccctttccattacagggaggcgaccttctgtagtacggggactaattggacggtggtttacaaagtaatgaaactaacaggcaagcgatcacctgggatagtgaaaccagcctgagtctaggaatcaagaaagctgggtattttctccagtcgtgcctcaaatgacctggggactttgtgcaagtcacagtctctctgagtcaccattctgtcatgtgtaaaataggaaagttgaattagatgttctctgggttccaaaattctagttggttagattttgtactttgcactttcttgacgtagagtttggctcttggagaaatcagctccaagcaatctatgtaatattcagcctgtgggtcactcctaaaaatttagaggactttgatgaaatgatgaagctggaattacatattaaagacatactttctagtgccttatggatctctgatcatactgtaaatgcctcattgaattagtggagtttatgtttgtcgccgggggagtttgacataataagcagttgaaaacaacgagtgtcacaggggcttctgggaccacagaaactctgctactatgatatctggtgtaattccctgggattacactcaatctggggaccctaagctttttcctgtattattaaaagggttgttgggatggtagccaacctgtggaagccacagtgactgactgaaaagagaaatatgacacaaatcagagagttttggggcaaagattaatttagaggttgcatatgggatggaatgaa

SEQ ID NO: 44518 - DNA, 1803 bp, Homo sapiens
ccacgcagtttctacattgctctgacctttctgatattggtggatccggaacattcaaagtgccatgggcatccttcttgcagtatttcctcctgatgtttgaaaagaaagtctgttttcataagaccttgggcctgatttccagtgggaaaagggctgaaaaaaatttggcttcatttccaagtatctttgcatatttccccaattgcacagaacctccaagcttccccagattacctcgtttcaatgacatcgaatctttcaaagggaatgtaataattccacagaggacttagcatttctgacagcttacctcccactgtcctcagagcttcataaattatgctgcctctgaatgtgagctgggcagcaccattttcctggccccttacgtgattcatggtttctcttaactatgtcagtgccttgtcagcaaagctgttccttttggacacagtatgatgtgatctgcttcttggaggacagcttgctaattatgtactgattttatatactgatgattttgttttacaatttcaaggtaactaataactattaactttagaaattacttccaaattcagaaaacattaccatttaattaacaatctgctctctgcaatacactgtgacctgagaaaccactctaatggtaatacactgttatcattaaaattaaccaacaaaccaaaagaatgggtgctgttaaggtcagatatggaaagaccataattaaaagaaagtgaaactaaaaacaagtatcagaccaaaagatcaacacagcacagacagccgccgtgccagcttccctgttttgcactgccaaaacagctccctcctgacctgcagctccgcagaattccaaacctaggcccttctggagctcagggctgagacaatttgttgcatggtttagtaatggaggctcaaagcaaagtggataaaacattcctgaaaatgacatgcctctaaagttccctctgaggtatctatgatctttacatatgagaatgagctatacatttttatgaataagttttatctttccccagccttcagaacttcccacaagtcttccaagctacacaggctcttcctgacttaggaagcttccactcagggacgtttggtggacgttgttcatgtggggccttcccagcattgtccttgcccctgtgtcctcagggagggtcttgtcattgccagatgcttctttagagctagagaatgcagaattgagagaaagagaagagaagaaggaaaaaggcacatgggatatgtctaggaaaaaaggttttcaagatttagagaagagagttcttgaaaagctataggaagtcaagaggggtagaaaaggaggctgtggactgtgtgctgacagcatggtgtttgagaaaggcaaataaagaactcaatcaattattctgaaattaccttttaggtacaggctatgtttcttggtcaacatgactaccttgaggttagacctcttgaatttcagcctcaggagaatttctttgggaaagattactacagaaaaaaagttggcactactcggttctactgccagagtccacccgacttctgaggcttagacacaggaaccctagagtcagtatcgtacaaggctccctgcccaactcccagctcctgctgttgctcaagctcctccaccagttccatcctgggtctctctccttagaggattttaagaggcccaaggcttacagagaataaaggcatagggattgtgctaccttagaaggatttaaaaattggcccaggacaggccgggtatggtgc

SEQ ID NO: 44519 - DNA, 1503 bp, Homo sapiens
aaatgtgacttaaaccttgcaaaggaatgcaactcttttctccctcccccaggccattctatctttcttagagggccagaggtggatcagagggaggaaggtttaaaattttagcccctttaccaaaacatggaaagtgtcaaccactaagtctcccgccatccccgcccccaatgctcaaagtgttcaaaactaaaagctacagcatcttttcagcaagtaatcagcacaagttgaaaggcacatgctgttgcatttctgatcagattgtatgttaagcaggaaaatatacccccaccccaaccctttttggctaaatgcatgtctgtttaaagaagccaccaggcagtgcctctcactttgtcttggcagggcacaaccatcagacgaagtgggaggaagaaacattaacttcaacagctgtttcttgaccccggctgtcagtcttcccaagaataaattttggagagtcctatttgaaacaaagagggagttttgggggagagaaaagttggttggttccagggcgaccgcccaaagaagcagggaacaagatgtttgcagttaccacgcagcctgcaagcctctgccgggtgcagggatggagcaaagtaacttgaaagctcccctctcggcgccctgtgcctgcagcttccccccctaacgcgcgcccagatccagcgccggtggtaggagccgtagctcgactacagtaattccccagctcgggcggcttgaaactgctcgggctgaatagcatttgctgttccgtcctgcggccgcctcccgccgcggctgccgcgctccctgcaaagcagctctcattatcccggaagttgtgctgacacagtctcgctgccaccagaagtttgtcaacatcaaacttctcctgtgtggggtacgttcaccttccacgagtatttaatcgagccaacaagcaaacaaacaaacccaaataaacctgcccgtgatgttgtggtcttttttttttttttttttttttttttttttgctttcctggaaagctggagctgttaggaatgtgctggtggggtctgagagtgcctgtggggtgggcgggggggtgggcggatggagataagggagacggccccccgggtggggagtgaggaaggggcagcggaggcggcaggcgggcagctagagctgggggcgggaaggcggctggggctgggggccggcgagtgggtcctgcagcctcttggctgctgcttgtttggaggatgtacggacaggggcgaaggtggctttgggtcccccgaccccgcaacaaaggttatatggaagtgatggcgaggcaaagctgggagggccgggacgcccactgtgctctccacactcctgcaggacatttctgcagacatctcacggcatctttcggaataaagggcattggggtcataaaatgtattctgagacttaaattgcaacattaaaaaaaattccataggattggagggcagggatgcaccatcatttctg

SEQ ID NO: 44520 - DNA, 2316 bp, Homo sapiens
agctctcattcagaacacactgccttgtgcttttaaaaaaattaaatggataatctaaattggcagctaccaattaatttatatccatagttgctaaaaaatgttagtgtaagttcatttttattagtcgcatcattttgagttttaaactatttcacatgcagtaaaatttatacctcttatgggttttgtcaaacagtggtttagtcaccaacacaatcacggtatagaagctctcaagctccttttcagtcacccccttcctccagccctttgccctggtcgccactgatcagtattctctccttttaaaaacacttattatttggaaataattatagacacaggaaattgcaaaaatactacagcacctagagtcccgtgtacctatcacctagtttcctccaatggtgacatcttacacaactgtagtacaagatcaaaaaactatgtcatgtagtttgaaggcaggttttcctttcacttcttcgcctgcattttctcctttcatttccaacaaatttaactctgttgttagaaggagcagatgctagttttctttcagatgtctgctatttcagttcgattacccctgttactcctacattttttctagtctttatccccatcgtttcgccccaatttaattttgctgctagttttttttttttctcctctgggatatgtgccacagatggtactattgtcaatattcgaattcctaacttctccctccatccgtaagttttcaaggggtagccgtgcttgtgcttaattgtggtgtttacaggactttttgtagcgtaagcatgctggcatggttccccaacctcttagggggatgctagtaacccgctcccccgtcaacgagccgcctttgtgctccgcggagggcaccgcctgcgttgggttggaggtgggggttggcgggggagagctgcccgccaggcgaggggcggggccttggcgggggtggtcgcgggcggcggggaggtctcgcttccctcctctccacccgctcccagtcccggcctgggtctcagccccgccctgcccagagcgcgcggccgatcacgtcaccggcctgcgctaggcggcccccacggcgcgggaaggcgcagtgcgcacgctccgactcggccgtggcggacctgactgaaggaggccgcggacctgactgaaggaggccacggccacttctggttggcctcggggcgcgctggctcggctcttcctccgccctcgaggcccccgcagtcccatcattcagttccgtagggtcaccggcgcggcagtggcctcgcagggcgctgggtccctctccccagctctcctccccctggccccgtcgccccgccctcgccgggctgggctgcggggtcaggggccgagcggagaggggtgagtattccccacagcccttgccggttgtctcctcccggctctgcttcccacacggtccttgccccactcctaggacagggaggaagggcacgcgcgggtaggcgggaaacagcccagtcctgaacaaaaggccggggaagcgggtccccgccggtaactgcaggcctgtgctggccgccgcgagcggggaagggcgaggacactccctcctcggggacccggtccccgtcgcgcacacggtgtcaccagcacacctggcccagtacccaaagcaccctcgaagtgggtagtaactactttgtgtttaaaatccacatactgatagcaaatctttggttgaaacagtattaaattactggggcttccagtggctgagtccaacttaatttgaagtttcagattaagtatcaggaggaataacttgatatttagagccaacaggtctttcttttttttttaaacctcccaaaaaacctataaaatcaagaattggcggggaggaccggagaatgataaaggaatagttgactgatttatagaaacttttagtggcggtaaaaattacaaaagtattggaaataaggcaaaaggacagcatgtttttttcagagtcaaaatggagcctaacaggcccacctgaagatgatttagatgtctaggggactatattttgtttggcatgatgatattgattagggcctaggctttgtagttaacatctttttcattaatggagatgcaaattatttctgagtgggagagaaaaaaatacagtactcctaaaggttgtagttttagtgccttgtaggatattagccatttttcttttcttttttttgagacagagtcttgctctgtcgcccaggctggagtgcagtggcacgatctcggctcactgcaacctctgcctct

SEQ ID NO: 44521 - DNA, 765 bp, Homo sapiens
cctcctcctgtgctgattctaggtaatactttttctgacttgtctgagaagggatctcctgtcttatatttcttgatgttatttaagtgaagagagctgagtgttcagtaattctcaattcatgagctaggtctatgtgagagcatccactgaacccaatgactttcaaactttttaaatataaacccataataagaaatacattttacattaagacctagaacactccacacatgcatacctgaaaccaaggttcatgaaacaattcttactctttctgatctattctactcaatctaccctgcgctattttgttttttaaaaatgctggtcaaggcccagcaattgatttcagaacttactaatggctcatgagtcacattttgaaaatacaacctttgacccttagtggttgctaacatcagcagaagggatttggaaggtaacatatgggtctgccaggggctttgtgtagcaggtggtgtggcatggttgaaagaacaagggctttaaaattagggaaatttggttttacatccctgctttccctccttctgtgtgactttgaaaatattactgaacctcttaaagccacaaatctcttatctagaaaatgggatcccaaatacaggagttgggaggttgggaactgggagctgtatgtaagcatgtatgggtgtggatgtgtgtattaaatatcatgaagtaaaacagttggctaatgctgtgaaagtaaaacacatatgtggtaggtgcttcattaag

SEQ ID NO: 44522 - DNA, 500 bp, Homo sapiens
ttgtttgatgaagaattgctgttaaatcttttgggatgtaagaatttctttgctgcagtcatatatgtaactgtatatttcagtgagaatgccctctgaacattagaggacatattcatgaattgaaattccaaaaacaaatctaatgatttgacagctctgctcaaaaacagaagctcagcattttagaggttgccatttactgaatgagtcagagggagtctgggaatacccttctgtactctgactcttttctccccactcctttgtgcctggctgccattgtcctatggcacccacctaacagagtggcacccagtcaccagccaggctttgattttgtcagttgcagaggctaacagtcaagaatctcggcacaagaatgccaatagtagcttactgcagtggctaaacccttgttcttgttcacatggagatttcttaaggaaaaaatgatttccaagctatgcagaatggactaaaaatacaattttgacttt

SEQ ID NO: 44523 - DNA, 1299 bp, Homo sapiens
tcagccttccgagtaactgggactacaggggttcaccactacacctggctaattttttgtatttttagtagagataaggtttcaccatgttggtcaggctggtcttgaactcctgacatcaagtaatccatccgcctcagcctcccaaagtgctgagattacaggcatgagccactgtgcctggccctgagcttaaaataaaagttaaattaaaaaaaaaataatgttgatgttttcatttttgcaatcaatagcttagttagactcaaattgcaaactgtcattgcctgtagtaggcagtggcatagaactcaattcagctcttttaacctgagttttaagctgctttcagattgccccacacatacatggttcaggagtcagccagagacttgggctgagtttaaacatagaatctggggttgtcctcttctggctgtcttctttcttgggcatctgcatcattctctagcacctatggtttttccaggctctttcccccagtttcctccagtcagaaagatggcaagagtttttgctgcctgccctcccccagtccttgtgccaacaccaccaccattgcagctgcctccagggaaaaactgcaaaaaccaaatcacttgctccaggtgttgactcctcttcaaaatctatttttgttaaatctccaaagcctcaaataggttttcttcctagaatttatatctgttatttgtagcaggattggtctgtaaggcactcagtcttctacatcatgggtcagcagattacagcccttgggttaaatccagccacctgcttgttttattaataaagttttgttggaactaaaccacacctatttttctgtgagtgatttcatgctataatgacagagttgagtagtagttgtgacaaagaccttatacctagaaagactaaataaaatactatttggccctttagagacaaattttggtgaactctgctctgtatcaagagaactcacctaatattttgacctctgatccagtgatctgattctcttccagctgcccacaggcacaataacatcatgttctagaacatcatctggaattgcgtcactgtagagcacttctgtctcaggagaagcattatctcttctttttatatgcttataccacttacttcatctcctattgcatcatgaaatctgaatctctcttagcatcctcatttctttttctctactgactcattccattcaacatacagataaacccagattgaatatatatttctaaaaactcttactttgacatttatatcccctcaagc

SEQ ID NO: 44524 - DNA, 3803 bp, Homo sapiens
tgtatagcaggatttaagcaggggcgggggtggggaggaggtgtgtgtgtgtctatgtgtgtatatgtatttgtgtgccaaaaatcaaaaagtctaaaaaaaatacactctggcctgttaacgatggttacaaacctgaggtataggagtgctgagatgaggggaatttcattttttcttttatgtacttgtgcaatatttgtaatttttaccaccaagatagaattattttataatattaagaaagaaaggaaattataaatgctaagcaacccaattattgaccaaaaagaaagaatttggttaaaagaattgatgtaatagaaggtacagatacctatgcctagtgaaaatttaaaaagaaaacaaaatagaaaaatctttttcttgctactgtattaattttctgtatctggcatatttatttccatgatttctttctgtttattttattatgtttaattgatggtgtttactggagtttagtgaaaaatattttgtaaacatctccagttgtgatttatccattgtaatatctccccagtgaactgactgtgagtagggaattacagaattatctgtaaaggagatacagatcttgaaagtagtctggggctttgcttatctccacaggaaaccttatttcatattgataaagtatgaaatctttccttagttatttctgattgttcattgttgttactgttttaatgagaggtagaaatgagctaaaccaacctgcttcattccttctagtactaatttaatttcaaaggaaattcttcaaccccaataaataagtgaaagtggatggaaccagggtctgactcaacatgtccaattaattgcttctaaacagtaaggtacattcttttaaaagccccacacacaaaaatcaaccagtaaaaaatgatcaggtgagaagtgagatgactatcatcatctctgcttacaaaactctgttcaagttgacattaatatttgccatctactctattataaatcaagatttattgtagaaatataccaaagatagcacaataatgaagaaaacagaatcatctcaggttttgaaatatacctaacaaattcaacctcttgcaaaataactttcttattcaaaatggaactgggaattgttcagcacacaatgaatcatcttttggcaagtacaatagaatctttagggacatttcacagcctcttgttcaattgttaggatgtttttagctttcacaggtagggaagaaggtagcttatatagccatcatcttgttgctaaaattgtacagtaaagatttttcaggcaatagatcttttcagatttttttttcctttttctttatccagagcctctttgtgtctcaaaaacaatctggaattacttaatgctaatgttttctggttttactatttacccaggactcaaatgttaaacattaatatgggaaactcccttttccttgcctcatagccttatatttatttaactgttattttgtgagaagaaaatctcctcttttcctctccatgttagtacttttcttattaagaaacccgttttcgttttgtttttgcttttttttaggaggctttcgagctacccttggatgattgtgaagtgattgaaactgcagcagcgtccgaagtgattaaatatgagtatcatgtcttatattcctgtagctaccaagtgcctgtactttactttagggcaagctttttaggtaagaacatgtctgaagctaaaagtaaatttataacatttacatataaagcaaaaagcatatttggaaaattattctccagaggaaaaaaaatagagttaaaaatgagaaaactgtgggtgaggtaaggttttaccactaaattttctcatgcttcagaaagggtatcaagacttcagcgtgaatgatatcatctcagccttaagtctgatcttcagattcttggccttttgcctgaagttgactaagccccctggccctttttcttttctttactttaaacaagtaggaacaacttaaagctacaatgtttatttacttctaactttacagtaaaaatttattttaatctcagatgatccaattaactcagaagctcctgtgcctccttccccaaaagctaataattattttaagaaatgtttatcaattagcttaagctgtatttaaaaatagcactaacatttccttcagccatctatacatctccaatgccttagcttcctgtgatgctgttactcaactcattcccctgccaagaaggtggaataccctgtctccttggaggccttagctaataaagcttatttaatcagcagccacatggcgtcctcactctgcagcacagccatggcttcccgcttagagtccactgcctaaaccgggtcagcattgggatgtgctgccacccaggcccagggaccaagatgagcctcctgttcagccaaccccttgccctatttctccttttgtatctggccttatcagcagcattgtgcattttgaacagccttctgacttttttctggatagctaagacatctgaatttagccaatgatattttatttttaattcaaaagtagcttaagctgcttgaatgtatgtttggtagatttaatcacttgctgttatattgtttaatggtctctaattttgcagtgttggcagtttaacaagcacttaggatttaaaacacaagaagaaattctcatagactccctggtgagaagattttaatctgaggtgcagttcctaagaactgacaatttggggtaaattttcaacatgggacatggggaatggaggacactgatagttcactaattcacaaactcttgctgtggatttatccatataattattacaagcctttaaaacactcattttatggtaattatatttggtttggagcccagaggttaaaggaagtttcttgtcagtgagctgtgctatactaaaaagtaggagatatatttgtttattcagggggaggaaaatgtctttcttggttctggtttgcaatggctctgccttctagattcagagacaagtcgaggctgcaggtagaggaaataagacattacttcttcaatactgtactttcatataattagtattcaccataagcagttaatcaccagagaagagctcccagagacaaaacaagttgtttagcttgtcagcattagggaatcagaggtgttgaaacatgactgcttctagctggaagtgggtcttgccaaggcctgctgatgagctcatatgtgtgctttgctcttatgtgccaacagctccccttacagtacagcacagtaattgttcctgcaagtccaattatattttaatgacattggtgtagtttctgtgatcctttcttcacgattttctattcttttaaaaaaacacaattaacattcttggcttctatttgtatacttttacaatgccctccatttatgccttataaaggtaaaccaaaacaagtcatttgtttttatgtagaagcattcgccccccaccaccactgctttgtgttgtgtagagtgggtattaggaatttaaaattttattttggcccagaattcatttagtgcttgttcaggtacattaaaatatcaaatttaatttttgtgcagcatactgaatgttttctggtggagaaacatgaagaatggttctttctttcctttatcatattctaataatttattttttctttccacctaacttaacctcatggatatttttaaaatgtatcaacctttactctggagtcacaatttttcatttattcc

SEQ ID NO: 44525 - DNA, 1889 bp, Homo sapiens
gaacctgggaggctaaggttgcagggagtcttgcgctactgcacaccagcctgggtgacagagctagactgtctcaaaaaaaaaaaaaaaaaaaaaaaaagtctgggttaaaatggctctaccatcaaatatgatagaactatatgaaattattattttaaaaagtcaaaaccagtcaaatactggcagtttcatgtctcaatcttaggtgtatgacctcaattaattctgatgcaagtcacttctcttcaccttagttttatcaagtcgataaagttcaatagctgacacgtgccatttacttataacaactcccacagtaaaggtgtttgtgtcctttacttcatcattgctagtatcttctccaattccttccaggccaacgttaaattaaaaccttaactacctaattcccaaaaactaattttaccaacttttaaatagaacaaacgctttgcaattttaccccacaatgcccaaatgaatactactacacaaaaacctgcaattactttcaaaacaagaattcgtaagttcatgtctcgaattcctataataaactaaaacttgacgggagcaatggacttacactttttccagcacgattccttttgcatgagaagcacctccaaaagggttggcctttagggctgtgcccaaatgagctttcttatactgtttatcatgccacttctggtctcgtcggtgactacggagcttcctagcagtacgaagtccacgacacttgcctaaaaattaaatattttagttcttccgtaaaaacacgccatctacgtgtttcccatcttctaagacactcgcctcacctggaataaacccttaagccgattggctctcgtactatttattggcctgtgggccaaacatttggccttcaagttgccctgaaccgactaataaacgttcgaagagggctccggagaatgtgttctcccgaaggacgaggccccgctcgaatgcccgggaggaagcgctggcctccctgcgtccctcggtaccccgacctcggcggcctccacgcctcatgggccccttccgcgccggaccacgtgcctcctggagcggcgcttccccggccctcccccatggagcctctccatggcatcccccgccctactctattcgcatccgcccgcccgtccccaagaccccaagtcccgcttgcagcgcccttaaaccggccacaacagctcacccatcctgtcggcgccacgggcctgagcgaaagagagaagcaccgcaggaaggagccacaagccaccgcgagcaagccccgcccagccaaggaccccgcgccgctgtctgcgccgcgcctgacccgaggctggggtctctcctttgaaaacgacgcgtttgcatcactttcctgagccagaatctgcgtcttatttaatttgcaagaaattcagagatatctaatttgcatggttttttttccccctttttcttttgaatgctggagaccggaggaacatggactaccaatcccagaatgcgttttatgggacccgctcaccgcgcaggcgctcttgcccaagccactgagagcgggacgcggggctaggtcagagtaggaaggagtcgctgagctgaatctttgtggagtggagtggggcgagagtcctccgagtagtctggaaaattagacttctgagccttaattcatacttataagcagctagtaaattgtaaaatatagtgaagcaatgtagtgtagtaactaaaaccccaagctttggagccagattgggcctttaaccctaaagttgccgtttattttgactggcgagtcatttacttatagatttatttatttttatttttatttttttctgagacagggtctcactctgtcttctaggctgttg

SEQ ID NO: 44526 - DNA, 793 bp, Homo sapiens
attatttggagtgtattggagggaaattttaggaaagcttaccccttggggtacgttttgaatgtgtctcaggctgggttcccttgaagcagagcctgaggcaagcatttagctgcatgcaattccctgagggcatggcatattctttagggggaaaaacctactaataagagagagatgcaggagaggaaagggcaaagagctgtacaatgatgtcttctcaaggactgtgatctgattcattgtgtgcgtgtgggtgggttctgatgaatgattcacaccacagaattgactcaccttgaggcaaggggactggaattttgtacacccatatcagttggtcattatttacaggtaaccataggtgaagcctgaaaggcgacagtcttcagtcaggaggcaattccccagagaaaggaacagctataagctgtatgtagtcatggtgtgctagagtcagctcaccacagctcacgagtgctgtgtgcacatcacttcccaaatgccctttctgtgacttcaccctgacagcttgcaatcggccaggacagaagcattacatcatgaaaatcaacaaaagctacaaatcccaggccttacactccacaggcagccagatgttaaacgtttaccagcatggccctggccaaccttctctgtagcgagaggctggtgtcctagctggtgaaggggatcggaggagggcaccaacagcatctactacattggagttacagaggatttgcccacaaatgatctccccaactaattcgtcagttggcaaagccattcc

SEQ ID NO: 44527 - DNA, 825 bp, Homo sapiens
atggatttatgtaaacatttgttccattcacgagtagcacattaatgcctaattctggaaaaaatacaaagaaaaaaccttttctgcctgtctagacagagtcttgttagtgtacgtctgatcatatgggtactcatgccggtaatattaattggtgggaaatgagccaaggaaagacaaccctatctaccaattaaatttactgagcttacagggtggtttataaagtcaacatgctgggcaaagcttacatctgaccagggaaattgttgttttctgatccccagttggccgtcagccacctcaaacacgagacagatgttggctttactagggtcagggttatcacagggtgggatgaatagtctttggctctggggtttgctacttttcctttgctgatgaataagagcaaataaaattatttctgaatgccttgggggtggggtgggggttagtgttctaaagctggatagggccaccgcataccaacatcccagggacaaacttcccatgtctcagacgttcttagtttagtttgtttgatctgaggtccactgattccgttatctcaaagggcaagggttaatgccttctcataaagataacaatgataaacacaaacaaggtattcactttgatatattggtttcttatccagggatcaaggcaaaaatgtgggagaactgaaaacacagagtttgaagtagcatcaaagtaatttgccagtttttgaagtaggaagttttttattaatgttttttttccagtggaattgaggtatatagtagcgtgaactaaatgaaggctgtgacattgggaggt

SEQ ID NO: 44528 - DNA, 1158 bp, Homo sapiens
gtgaatctttattaatttttatgtaatttctcttcttttgtatttggtccatagataattgttctttttttctttttttgcatttgattcttttataaagtctgatggtgttggatattcttatacaaattctgataataaaccttaatattgatttgtctaataggagaggcacagcttgaacatactactactgaatgaaaataagcgtaactcggaagatttcttttagtaaatcagttggtgtatagtgacatttcagagggaagtggatagaagatgcatggataaaaattattttatgcaaaataaaaattgaacatatctctactctgaatttgcactaacttaaaactctaaagactactaaatgctaaaaggattcattgtggtcctgaacttggtggacagaaatgtgacattctgatattctgacttgtgatgcactacttccagtgtattttctacaaacttagcttgatggaactttcctgggagcaaattttctagtgagatttccaagccaaatttgatggcatttggttgaattggatgagcttcaaagtaaacacgccaaatctgaatctttgtttgaattggctgaaacccattgggttcatgtcactggtgaaaaatggctttgtttgggtgaatagattttgctgaggcttccagtagctatctcgtggctaaggaaaggcatggaaaaatttggcctcaaaaacaaaaaacaaacaacaacaacaacaacaaaaaacaaaaaaacctgagaatgtggagcagtgttattgggatctcatcatccctaaagttcttgctgacatttaggatgagtgtagactctgcccttcagttttgtaggggttgaattccaactttgctagttgacttctaagtatgtcatttttactttttaataaccaatacctaacaattactcttattgtgattgaattttagatctctctttaccctgaaaacacaaaacttattgtgggaccatagggatggtggtggggatgctctttccccttccttcttgcaaactgaaatttggaggtcaaataggaagaaagaggagtcccttgctgagtcacagtccactttggcttactcagtcataaaataggtttcccaatttggggtgtgtgtctgtgt

SEQ ID NO: 44529 - DNA, 687 bp, Homo sapiens
ccttgttgggaggtcttacccaatcaggaggagggggatcaagaacccacttaaataagcagtctggctgccccttggcagagtgggtatgctgtgctgaaggaaattttccttgtccgggctgccctgactctccagggctggcaggcagaaaagagtaagaccactgatctacaatcctgtagccaccccttctcctagtggctcatctcagggatatcagagatctgtccataaccccctgactggggatgctgaaattcctgcagggggacttccctggtgaggaggaatggatcaaggtccagcttaaagaagcagtctggccatgaactgtcccagccgctgtgctgtgggggaattgctcccagtccaaactgcccagtctcactggcaccggtggcaggggaaaacagccaactggagctgcagtgatgctggctgcccctaccccccagaactcagtgttcttgggcagtctccagcctgctgtgctggccagtggggatttcaagccagtgagttttagcttgtggggttccgtgggtgtggggcccgctgagtgaggctgcttggctccctggtgtcagccccctttccatgggagtggatggatctcctgcctcactgagctcctggagctggagtaggtaaaaactcctgcagctctgtgcctgctctgagcag

SEQ ID NO: 44530 - DNA, 1230 bp, Homo sapiens
aatgctctcagtagtagaagttggcagacagttcatggagataccaaccgctatggcaggactgtgtccagccaataacggggaatattataagagtgaaggcaaaacctcaagcctacaatatttataaagtgttttgcaattgcaaatagattttctagagtcatttttctcacacttaaaagtttgcttgtatatctaacatcatccatatcctgatataaaagtaaatattcctttaaggaaacaatggtggcttgttcagggccccagaccaaatttctggagagaccatctcactgttattgtttaagtcatgttgacctgcggctcagaaaatgcattctcagcagctgtctttattcttcttacatgttagctgtctcccatgacaagcctttagggttaccaaaaaaaagatgtatgttgaaaactcttattgtttgtttttcctgcagttccctataaaatgtcagtatttttgaagaggttctccttaaattgaacccctgaggctggagatttaccaggttgatttaggagtttgaaatcctggagtgtttccataaaatgaggatttacagttcataaatataatgacaaaagtgtgaagatacatttttgtccttgaaaaactactggaacaaaagtacttttcataaaaggcccacaagctgctatttccttcagacagaggcctatcctggctaggaagagtgaagtggcgttttattgccacttgtttaagatggtctccctctctgcttcttggggagccactttctcctgacaggtacacaggtggacatcggaattgagcactgcgacatttaagcagcgacaagtataaagaaataacaggaaaacatgttaataggtagagcacatttcttttatttgccctgttcctgcctgggttcagcttctggatcactatagtctggttgtgatctttgctctcagatcgttagctgagttccttcttgcatatggcaccaaacaacctggttaataattgacattaaattatctgctgtgacaaactgtttagggaaaatatatgccatgctttggctttataaaatgttaaggggggaacactaaggaaactgtgtcactaatggaccttgtttttttgtttttttttttttttgagatggaatctctctctgttgcccaggctggagtgcagtgacacaatctcagctcactgcaacctccacctcccag

SEQ ID NO: 44531 - DNA, 1562 bp, Homo sapiens
ggaagtataaggataccctgcgtttaaagacatgcaagcagttagttgtgaatgatagggtaggtgtgaagggaaaagagatgaagtatgaacctagaagaaggccagtgtcaaattgtgagaattcacagtgccatttgttaaaggtttttcactatatcttgaatgtgatgtatttgaagatagtcaagtagagatgttttctcaaggcagaagagtctgtggctcaggaggaagttctgggcttgaaattagatgtttggaagtcgttaaagtacagttgttagtgaagccagtggggtagatgggctccacaggaaagagggaggcagagcaagaatagaaaaaaatacacatgcccctaacatcagcatttataggacactagaagggaggaagcaaactcagaaaataaggccaaggagttggaggaaaaccaggagagaataggatgtcagaaaccaaccaaagttaacaattttatcccccagattaaaattctatatataatgtataaactaaatatccattttttgtcatctgcacattccttgcatgtaatttgctgagctatatagataagtagaccagttaccatgcctctttgtcagtggatctttagcaggaaaaatgaggaactatatgagctgatttctgaggtcttttctgctttaactctctctgatattattgatgcttggtcagaattcagaactcaggttttcaatgctaatagaaaacaaagttaaatgtgtttcatttatactatgatgtggcaggaactgcagctgggtatgacttatttccaaagaaggcagaggcaagcctttggaaacatatttcaaatcattctaacgctgcagtcatatgaaacttaagtgtttaaggcaacagaagaaatagcactgctatttgttagaactgctcgaccacatggcttcatttacatcgttacattgggctgagttgtggggctgaggttaaaagtttagtcttcagacaaaacaggtgattcagacactgtcacagctgaagggcccagccacataccctcaagcagattgtttctggtttttcataaggaatctagttattcattgacttgaaagtatttgtacacatgtgtcatttgtgtgtttttcctgaatcagtttgctcagcaaagagccagtgaataggtactttgtgtaaacactgtgctatccactgctgaggaatagagagatgaaaacaacatagccccagacaacaagaaacttacagtctaacaagggcagacagatatctaaatatgtgtactctttaaggtaaaatagaactgatgctatggtagatgaagaaaaaaaaatcttagctcatcattttctgctacaggcacaaatggtacaccaaatctcttgatttgtattgtaacagtagaggcctttgaaagcaagggatatcgaacatttgaacttggctcttagctacagcattaatgggatgtgattaaaatgtacctgaagaccaatatttaaagcaggacaaaattctgtttctaattgttccccttctcaaaagaa

SEQ ID NO: 44532 - DNA, 1755 bp, Homo sapiens
gcagtcttcctagtctcaactgccatcttcccaccaggtggtaaattcgtccagagaagaaaatgaattattgctatatgggattctgcagcaacttctgtgaacataggctcataatttttcaccatggagactcaagctttttggagtcatagttgtttttgggtctatttgcaggcatgcatcctttgtccagaaatatacataacatttggcacatggacctggaggtaaaagaggaggaaggcctgaggctagacaccactccaataagtacattaagctcctagaagggcaatccacctttgcagagaactcttaactattaaaacctatagcttgtaaagcagcattttcaaagttaagagaagaaggtggaagggtcttgagaggctactgactaaacagatgaaaatgaaggtatggagtttggtgccaaaagaaactccccccaaaaatcaaacaataacaccagagtaaagcccctagggcgagataaggagttgcaacaaaacaagcggaaactcgagaagcgctaatgcttcaaagggtcaatgaccacacataatctacgtagccaacgtgttaaaacacaccaacgcatttttttttcctaaacaaagtaggaaagcggactttgcatgaggggcgggctgccgacccagcagtcttcctcggacagtccgtcctgattctctctggttggccgtggagggaccacatggctccaaggcctctcagctccgggcccacacaccccgggctgccgcacaaactccagccctagtctagatccacaaccccttctcgaagatcaaccgcgacctgggagccccacttcttaccatagcgaggccggcgatgccgcagccacatcacccttccggggctcaggcggaagaggctgcatgtcccgtctgcccttctcgccctctccagccgtccggttgggcttgtcacggcaccgcctaccaagacgggcggttaagacactaggataggctcctctccaccggaaaaggcgggatttagatcacgtcccgcaggccggcggaagtagctgatactctcattggttgcaaaaccttgatctgtgaaagcgggcgttttggaagataccggaagtagagtcacggagaggtaggatccggaagtggggctgcctctttaaataacaaaaatctgaggttctgttctttttatctttttgctttctttttaaaaaagttccctgctacttacccctagaactccacaatgcgagaatccccctcaatttgtgagctcccgcgacttcctcttgtgggcttttggggatgctagggttctcggcattatcctcagggtgcgacctgttcacccccttttcagtttctccgtttgcatctgagggattcttgggaatgcgaagcacttttgaaatgctctgtgttggttgtgggattgggaggacggttgaatccagagggtagtgttgagtaggctgtttgagcatttccccagcactggcctgtcctttcaatccccagatattggtaaactgtgggttccaaccaggcatcgaggctgaaacgtactaggcaatttgaggtcaggaaagaactttctgtggtaaccaatgggaaggaactgccgtttgcggactgcagcgattgattaggtactttaaagagatcaactggcaagacaaatgacaaggcaacttttaatcagtagtagtatttagctttttctgattttaattatcccattagg

SEQ ID NO: 44533 - DNA, 1216 bp, Homo sapiens
actccccctccagactgcaaacaaatgcctattgtgtacaccagccatctagggataaaaaagtcattttaaaggtaccaaatgttttgatttctgtaataagtagtcctcatagcctcttttcagataaccatttgacctgtgttctgaaaggctgaggctaaccccaagtggttattctgtttgttatttagtgaaaagatggtttcttatcggcatatgtttcaaacaggtacctgtcctcttgggaaagtgttttctgtttggaatttgctttcctacttcggtggttatctgcttgcccttggtatccagtgcgtttggattgaattttgtagctctgggagtacagcagtggcaatatgggccccaggtgatgaaaagagtttgcgcacaaagaagtcagctcttactgcaggtgtcatgttttcatagctaatctagataaatttttacggaaaaacaaactaactgtgactcacgctgcagacattgcatttgtgtgcttaggtgtttatctatgatctgacctctcctaaggattttaggtggatgttgcacatttggctttggttctgatgcaatttcaccattgatgtaaatcatcggataattttaaaagacagagtggaaaagaagaaactaccgtaggtgaacattttagacagaaagaaaattcagattatggatagaatggcttgcaacagaatagaatgcagtcaggttggtaaatactggttcaccgaggtctgtcttcttgcaaagtgttctctttgtgttttcactcacaaaactgagagaacatatcccagacaatcttttattttttatttttatttttttatttttgccacatggagtacataattacgattttgggggacatattccaagttctcttttgttaagtggtgtagccgttaattcataatgtaagaatggatatatatcaccacctagtggtcgtattgtattttgtgtttcaaaaccacattcacagaactacacccagatacacacaagaataatactatctgtaaatcaagttcctgtagttttgaatagtttcttaattctagtataaattgcatgatactgtgatcctgaaagttaaatgtgaaatgagaggatttttcaaatgcagcatgaagctaacacatgtagtcaaatacttagtaaaatcctagcaactaaggcaaatattaggacctatctg

SEQ ID NO: 44534 - DNA, 1347 bp, Homo sapiens
tgttcttggtcaacttttgtgagtttctgtaggatatatttccaggagtgaagttgctgagtcataggatatatgtaccataaaatctactttaaaaagccaaatttttttccaaagtggtggtaccaattttcactcccaccaacaatctgtgatagatcctgttgctctacatcttctccaacatttggcactattggactttgaaatttttgccaatctggtgggtataaaatgtaatctcttgtgacttaattcacattttttgatacgtctctctgaatatcttttcatatatttatcaatcacttgaagctctgcttttgtaaagtttctgttcatatcttttggttatttttgaaaattgtttacttataatcttatacatactaatttgtaggagttctttttatattctggttactaatcccttgacaattttatatgttgcaaatatcttctcccagtttgttgcttgacttcacccttaccttatgatattttctgatgaacagaatccttaattttatttattttttttcctttatgatctaatcttttttgtgttttaagaaatctttacctactgataacctacaggtcacattggcaggcttccaaattaatccgcctgggggaggtcttatgattcatggcttacatcctgtccctgagtaaacaattttatcgtgagttcctcaaatcttatcatgaattccttaaactgttgacatactgattaatatgtagcctactgacagtggaaaaacactgatttgtttctgaatcctgaagttttactgattgttttgcacatagagcattttagcttgtattttgtaaatcgtagccaatgattataacctctgtattgtaccctccaatgaaaatcacaactcgggtctgaggagttgccctcccttctgaacttccccataaaaaccttccaacttgtagcagattctggaatatgcccaaatttgtggtgtgtcttcccaggtagatcctggcatttggcttccaataagcctttatcaaattatttctgcctcaacagccttaattttggttgacactatcctgaagtcataaagatattctatagtttctaaatgttttatagttttgcctcttatatttatatatttcaaccatctagaattgatttttaatgtcttttctgaagtatggaaccaagtttattatttctgtatgaatacacaagtgttcaaatgaaaagactacactttccctctgctctgccatgttgcctctttcaaatatcaagcatatgtgtgtaaatctctttctggtctattttcctgtccttgccaataccacactcac

SEQ ID NO: 44535 - DNA, 521 bp, Homo sapiens
acttcaattcacttgaagctttaacttcccttttggtaaactatttattacttcctgagattggccaatttcctaggtacaaatgactagatttctagaaatggcacctcagtgagtcattgtttgggtctgaaaatcccatttccagtggtacaacatcagggatagtggcacacccattatgagacatatattagcagaaatgaagcatttatgcattaaaaaaatttttcctaaggcttttggtggaaaactaaataagaagtcattcagtgggtatggccaaagactggtttgtgcaatgggattatgcaactacatactagcagtgtttcagggaacagttccagagaaactattgagaaaagatctagggtaggaggtaagaagagagttcagtagttcagtagttgccaagcccagttactaggagtcagaaccgaaaaatcccaaggtcaggtggcacagataacagaattaaaattgtgaatgggcagccacaattgagaaccagatgacgc

SEQ ID NO: 44536 - DNA, 1363 bp, Homo sapiens
cttggcctcccaaagtgctgggattatagacgtaagccaccgtgccttccctatcaatagatatttttataggtttcagtcatgtctttgactaagagagggaaacacttcctaaggttttgtcttctaaactataatattgccatgtattttccagcatcctccaaagtactgtctccttgacaactcatatatcaaaaagatcagaagcagaggattctgatcctatttaagccaaaagtttttgcacatattttgctgtttcagaatatataatagtatcaataagattagtattatgctttgaagatacatggttaactatagtttatataactcggataattatagaactaggtattaaacattatgaacatgataagaaatctgtaatacgcatgtatgtacgggctgttattccataccagataacagaagcaagagcaaacctcagttcttctgactctaaaggtacaatgaaattctgttttaaaattaatcctgtatgactatttttactttcaacagtaacattaaaatatcctcttagacctgtacaaggagaaactccggctccgctaaacttaatgattaatttgagtacaaactaaatacaagaatggaatgtgtgagctaaaccaggtcctcctgttaaatgaatgtgaatctaagagttcacaagtgtgtgagtgagtgtatgagtgtgttgatggcagggaagtagaaaagcgtggctgtaggaaatttggctgctttcgttttaagctggccacccaaatcagttaaaatgtgtaaccaaacagatagctgagttttctgtctttccttgacttaagtggtcttaattggaaagaccttacctgcctggaaattcagaacagataagattattccacgggatagagaaacagcctgctcagctctctgaagagtgtgacgaggtcagtttccatcctggttcaggattcctggacaacccacttccggctttgctctctccaaccccagttataaatatgctcaggctccaagcaccagacctgctgtaaggtgaaatatggcttttggagagcctctgggttgtacagttaaggtgtaaagggaactaaaagtgggatccacagctgggaaaagggatgggtgatacttacatcttcagttaaaactttacatatttagaccttactatatgggactccatttatggctcctactgtgaggagtgggtcagtaacatgcattatactttgctacttcctagcaattagacgagaaaaatttactaatataaatctggaacacagtaggtaattaataagtatttgaaaatgaatttatgcataataacatgaccaattaaatt

SEQ ID NO: 44537 - DNA, 793 bp, Homo sapiens
ttttccttttacctatttgtgagtttagattgttcttgtttttctagtcccataatgttaggttatttatttgagatctttctacttttttgatgcaggcatttattgctataaacgttcttcttagaactgctttttctgtatctcatagactctattatgttgtgtttccattttcatttgtctaaaataatttttttacatatactttgtaaatttgtttattgatccattggttgttcatgaaaatgttgtttcacgtccatgtatttgtatagtttcccaaattaatcttattaatttctagttacattcctttttggtcaggcttgctatgacttttatttttaaaatgtattacgacttgttttgtggcctaacatatggtctttcctagagttggttcaatgtgctgttgagaaaatgtgtattctgcagctgttgggtggaatgttctgtaaatgtttgtgaggtccacttggtctaaagtccagtttaactccaacatttgttaattttctgtcaagctaatctttccattgctaaaagtggggtgttgatgctccttattattattgtattgaagttaaactctccctttaggtcttttaaaatttgttttatatatttagatgttccagtatgaaattcaagtatgtttacaattgttctatcaccttgctgtattggctcttttatcattatgtaaagactttttttaatattttatcatctttaacttaatgtccattttatctagtataaaacagaataaaatccagtcatttgaagc

SEQ ID NO: 44538 - DNA, 1280 bp, Homo sapiens
tgtatttccacacaaagtcaaagtgctttctttaggtcctgacctgtttccatctgtgttttgagtatttccaccaaaatatacaattgacacttataacaattttatattttgatgtttgatgtttgtcaataagcaaaagaaactgaatctgacaaaagtataagaagaataaaaaggattggaacaaaatcagtagaaacagactttggaaagtgcagaaatcaaagcaattttaggtagttggtagcaggacttcatggataatgtcgtaagcatttctgcattacagtgggtcagtgtcacctgtttttttcttctagcctcaccaacatgagaggcaaattcccaaacaagagtgagtcattagttgttttggaaggcagagcaagtcaatgctaagtgtcactaaaactgtccaaaacaggaaaggtgtaatatcccaaatttgttacccaaaggtggaggaagaatactggcaagtataaagtttaaaacgacagattttcttacgcagatagtatcaccatttcaaaatcaaatcaagctctcatgtctctggaagcggacctgtgactctgtcccttagctcagatattagcctcaacatttaccaataacgttaaatattaacttcattgtcaagctcacctcatcatagccattaataatcaatcatttctgacatttattacaaaattctacatactgttcagtttaatttgtataccttttatttgaaataattttaggctcccatagtagttgcaataattgtagagttctgtgtacctttcacctagttatattagcagccaattcatttaatgtcagactgcacatcttgacccaagtttggaccgtagctagaatgttcatttagttttcagtctttacagtacttttctggtcagctctgaatgtaccgttcaaaggccaatctgaaacgtgggtggcattctacaatgttcagttcccaaaaaaaatttgctgtttattctaaatgatttcacacagaggtcacagaagagtctgcccaggactttatataagggtttcaaaaatctttttctccagctccctctttataattttctcatcactctagtcctgcccagggggtttccacctctttgctgtcttttgcgtagtgcagaggagccatggtctgcagagctccaccccatcatctctgtagtcacagccctggtggttagtaaagggcagggatacttgacttcagggtatcttccctggctgtatctctcagagaatggagc

SEQ ID NO: 44539 - DNA, 1422 bp, Homo sapiens
ccctttcacgtggacccgcttagagttgtaagcccttaaaaggatcaggaatttctctctcagggagctcagccctgaagacacaagtcagccgacactcccgaccaaataaagccacttccttctatatttcggtgtctgaggtgttttgtctgtgactcgtcctgctacatttcttggttccctgaccgggaagtgaggtggttgacgggcaatcaaggaagccacttaggtggcttaggcctgccctgcagagcatccctgtgggggactccggccagcttgagcgacgcggatcctgaaagtgctcccaggtaggcatttgccccagtggaacgcctcgtcagagcagtgcatggcaagcccctgcgtgagatcgacgcagtggctgaacactgggaaggaactggcttttggagtccggacatctgaaacatggtaagaccggtcttaggaacttgcctactccatttgagtggaagtgtggcctgatcacccacggtgtgcctttattggcactttggttttggttttgattttgacttggcttgaattgcttggcaaacaggcatgcctttatcaacactttggcttaggttttaattttgatttagtgtgaattagacgaatgagtgaccttttaccctttccttcttgtagtatgagtgttgttttgtctcaagaaaaaaacaaaataaaataaataagaaaaaagtcatcagaacatccaaaacttcctctgttaaagtgcatgttacagaaccttaaaaaaggttttgcaggggattatagagttaagttaaccccccagaggttgagaactctctgtggatgtaaattaaaattgccctcttttgatgttggatggccgaccgaaagaactatagacagggaacaattggccatgtatttaaggtggtgacaggggtcagaggacagccagtgtacccagaccaaattcctttatattgactcatagttaaatatagtatgataaaactggcatagatccagccctgtttaacagcttattgcaaaaaaggccaaaagtaaaagtgagagcagctttgacagcagacagagttaaaagaggaaatcccagaaacagcaagagaaacctgttttgcaggagccgccagaggtaacagaaattcttcctccatatgtcccagcctacccactctttactgaggtcaacagccccccaggaaccaggttcaggagctaacatgccccaggtctcacctcgaaggggaggagcagagccttgagaggccatggaaggaagtcaagatagtcaaatgggcactctcaaatctggccatgctcaagctatgcaaatccccctgagggagcagtgatatactggggtagatgaggaagggcatatggtagaaaggcatgcctttgtgtatcaacttt

SEQ ID NO: 44540 - DNA, 1751 bp, Homo sapiens
gatgtgattacacagtgatcatattcttttcttaatgaacactgtcagagtggtcttgttggatgctaatgcttgctgaaattgtgtacgttcatcaggcggacaccagttcctagtccaggctagctccaggtgtcagaggccacttttcccttctactcctcacacatgctgtactcataccagacttgagttttccctgccctttgttcttccttcttttttattcgattcccattatctttagtgatcattcccttagcatttcagttttctctctgaagtcctttgtgctgcacgttgtttgattacttgtgtttatgctttgtttcttcagctaggatcattagcacatatctctcagcattggcaaaagtcctcgaaatcattgacacctagcatatactttatttttaaaaaagaaagaaagaagagaaaagggatgggtttattgtccttttcaacagactagagtatacggggtgaaactgcttcacttgattcaataaaatcgtttccggtaacaggccccaggaatcctagacctaagcctggcgcgaaactacatttcccacaatccttcgggggctgataaggctccgcaatggtctgaactacaattcccacaatccagggcgatttccgctttgtcgcgtttcctcaaggctccgccccatttcccatctttcttttcagtccttgcgcaccggggaacaaggtcgtgaaaaaaaaggtcttggtgaggtgccgccatttcatctgtcctcattctctgcgcctttcgcagagcttccagcagcggtatgttgggccagagcatccggaggttcacaacctctgtggtccgtaggagccactatgaggagggccctgggaaggttagtgtgtaaggggcacggcttcgttgggggagggggcgcttggctgtgactcgcgcacctgcaaggccgcctccgggctgtggcgtgggagatgatagccagaaaccaggctgagacgcagactagcattccacttagcccaaggaccagtgaggaagctgggcatcctagcgcgtagccgctaaaggaatgggcaggtagatccggaagccctgcctccatcagccacctgacgccccctcccccgccccgcagaaagccctgagatggctccgggaggccacggctgtaggtgtgttggttaaatccgagctggaggtcatcggacccgaaatgaaggtcattggaaaatcatgaggaaatcagggcctctggttatggaacaggctttttaaactagctgcctaagttagaagtactaacccttcacctcagttaaggctgggtttggcctcaggtgtaaataacttaaaccacatagcagtaacaatctcggagggtcacacgaggcctagtcataaaggccagagaaggtgcttggtaatgaaaaacaaacaaacaaaaaaaactgtgggccaggtgcggtggcgcacgcctgtaatcgggaggctaaggcgttcggatcacctgaggtcaggagttccagaccagcctggccaacatggcgaaaccctgtctctactaaaaagtacaaaaaaattagccggacgtggtggtgtgtgcctctaatcccagctactcgggaggctgaggcaggagaatcgcttgaacccgggaggtggaggttgcagtgagccgagatcgggccactgcactccagcctggacagagcgggactccgtctcaaaaaaaaaaaaaaagaaaaaaaaa

SEQ ID NO: 44541 - DNA, 1599 bp, Homo sapiens
aaaaagaaaacattaatagtactgccccgatcttcaaagctacctgacccctgcccggtttctgcgctgctggttaaggctgttttttccactggtcaggaagtacggaactagtttctgggcattttcctttccctttccccctccttcctctccaccgcctcctggtccccctctggtctctccggctttaacagcgccaagcacccgcgtgctcaggtacccttccctcttctcccgcccatcaaacaaagccccgggagacaggcgcgcgccgccggccacgccaacaggagatgcggccgcgccgccacacgcttggaaccggaggaggacagcaagcgcgaccacgcaccgcgcgtccccgccgcttccttccctctggactcttccttttcctcccggcccggccccccgcccccgctccgggaacgcgcctgcgcacaagctgccctctcccttctccgcccttccttccctccgtccctcctcccctgccccgccttcctttctctctctcccgtttcactcactgagagctccaggtagtgagcagttcagtcgatttcctcgttaccccgcccccctttctcttgcccccccacccctctcatctgcctggtggaggatgaagcggctgcagtggccccagcctcagcagcggcaccggcggtggctgcggtgtgggtggccggaactggggtggtgaagaagcggtggtggcggctgaaggagcggtagcagcctcagcctctttccctgtgcttcctttcctctttagtgcagcgaggaagttttcgcttctgtacatgtgtttgtgtgcgtgagtgtgggtgtgtgcggtgaggtttgggtggcgtttgtgcaggcgttgggttttttgcccacttggcttcccgtaacccaggcagctggggagcctgggctgtggccctaggagggggcgcggcggcgggctctctccttttgttgttgtttcctcagcctggggagctgaaggggagacgcgtctgggtggggctgctcggagcccgggcctggtggcccctggggctcccgggcgggcagggtagggcagagtagagcgggcttcaacatgatggcggccgaggccggcagtgaggagggcggcccggtaacagccggagctggaggaggcggcgcggcagcgggctccagtgcctatcccgcagtgtgtcgggtgaagatacccgcggccctgcctgtggcagccgccccctatcctgggctggtggagaccggagtggctggaactctgggtggcggagccgctttggggtcagagttcctaggagccgggtctgtggcaggggcactggggggagctggactgacagggggaggtactgctgctggcgtagctggtgctgctgctggcgtggccggtgctgctgttgctggacctagtggagacatggctctcaccaaactgcccacttcgttgcttgctgagactctcgggccaggcggcggttttccccctctgccccctcccccttacctgccccctttgggggcgggcctcgggacagtggacgaaggtgactctctggatggaccagaatacgaggaggaaga

SEQ ID NO: 44542 - DNA, 1938 bp, Homo sapiens
ttccattctctcccttcttggctcttttatcaaattactctcctttccaccccttctgttttttagctggacttggaccaacatagtatcccaggtggtctccttccttggttacatgatagaagacagggaggatatggattagtcaagatatttttgctgtgcactttggctcccatttatcacacctcaatctttagccatactaacctgtcattcctcagtctgaaatccttctcccttttatttaaaatcacaaacctgacttaccctgcttcttatattttaacatcatttgtctctcaagttgaaatggaaacttgttacttacctttgtaggccctctagtaactagcttgtcagtgttgaaataaaatctctcacactttaacgtttttaatggggctgggtgggaaaattttcagtgataagtgtggaccttgctctgatgccaaagtttggcgatctgaaagggaaaatgagacaaattgtgaacatcttgtaattctgtctagagcctagcagcaatatatttaactaggactgcgatggaggatttataacttttggcttcttccactctgcttttgtaaaaatctcacatcacgaattttattcctttcactctggaatgagaaaaaaaaaaaacccacaaaactcaagcctacagtgtaaagaattattgttagagagatgaatatgcatatagtaagtattgccttaaaatagatgtaactataatggtacctacctttctggaaagtacagcctgggatgtactgagactgaggaggtgtgtgtatttgtgcaatttaattagattcaggacacttgaattactcggaattccttcaagccagttttcctgaaaaaaatctggcttggtaaacagacgtccacagtttggttccaattataatagttaacacttactgaatactagtgtatgcaggtactattctaattaatcctatgaagagtaggcatttttatcttccccattttcagtgtgggaaactggcacttagaggtttaataacttaccaaggtcacatagtgaaatacagctggccatgattcatatgtaagtaatttgctgtaatagtctgtgctttcatatttttatattgactcatttcaatttgaattacatttctctaacatatttaatctgcaaaattcctagtaactgttataatctacttacacggattcacttataggatctaataggttaattataaggctgtggtgatgtgtgcctgtagtcccaattactcagaaaactgaggcagaggatcactagagcctaggagtctgagacagcctgggcaacatagcaagaccttacatcaaaacaaaattaaaaaacaaccacaactgaatatacaatttgctgctacctacttatctatactagcgtaagagtttgatgtagacagctattcaaaatcatatatctggttttttttaaaaacccatttggaaatgttttcgggtaactaaagaaaaataatattcattacccagacgactggctttcagtaccatgtaacagttgaaataccttctgcagtttaatagtaatggacaaatagctaaatatatcaggatggcattcaaaaagccatttataaaggtttctagagggcaaaacacattccttaacacttttaaagctggctactaagttttgttttttgtggtgccttttttaaaaaaagcataggtttgcctatcatattttgcttaaaaaattaggcaaatgagttgcagctttaatttgatattagtcacgatggaataagaatattcaaaacaggtgctattctagctcttttgaagatggtttattttacataaagttactgtgaaagggaaagaaaacaatagaaaagttttaatatattttatgttttcacattatactttttaaat

SEQ ID NO: 44543 - DNA, 1524 bp, Homo sapiens
aggctgtgtgcacatgctcacagttgtgatatcattatttataaattaaaaagtagacagactttttaaaatatgattggaaagcttccaacatccgtttctcggtcagtcattacgtcacaagttgtaaaaaaacagcaaatgtttcaataaatttctgttattttaagctacccagtttgtggtgatttttttaaggcagcccttaggaaactaattcaggtgctaaaatcagtgatatgaaatagatgtgaattaaaggtagaaagtaaagtaactcagtatcggtaatttggaggcactgaacacttgctggagtggagcttgcaggaaagattaaaccagtccgagagctgtaacagaaggaacttggctagcgggccatagtccaaaccatcttcagtcacttggtttgtacttggtctctggtctccctccctcatccaacccattcaccacgaggttgctagagcgctgtttccagaacggaaatctgataaggttagcttcccattttaaatatttcaaaggttcctcatcctttcagtggaaatgttaaacgcctcacttccacttacaagttcccttcctaccctccccagccattcctgcacaggtactcaacttcggccacatacgaccacaaacacgtccacgcaccatctctgtaacttctgacctccctcccactctgaacggtggttctgactgcctggaacttcctttcccattttctccgcattggctactgggaaaaaccttccccaacatcatctcttgacaagtgaacggctcttgccacgcactaccttagcacactacttactctcttcttcactacgttacaaagactggttacttgtctgccattcgacgacggggatggcgttgttcgtctttgtacccacggaacctggcaaggtgctcgcttattttgatagaaaaacgcactccgcgccgcagaggcagagaaacgacggagcgagattgtcctgggagccagaagagctcccgcagctgctcagaatttagtgaccgggcaactgggcaaccgttgggaaaacctcaccttcccgttggccacggctttgcatctgaatttgcggttggcgtcagcccgcagtcttgccagctgctcctcgctggagaaggtccagtgccgcttctgactactgttgtggtacattatggaatcgtgaccaggtccagagggtctgcagacgagaacccaaacgcatcagcgtcctggcgtaaaacacccgtacccccaccgaagatctcgcggaagcctagggcgtccggctagccggcgctggcgcgctgtcgtcacgattacgcggccagcccgtacgcagttgcatttccggagcggactaggaacagaccgtatcccgggttcgttagggcgcccactgagacgtaagtgggcggagcctagagaacgctcctctcggtgagtctgggacatagctccgccccttccaggcaagatttaaaggagaagcgcccggcaagagtgttcaa

SEQ ID NO: 44544 - DNA, 1064 bp, Homo sapiens
aaatttctcattatatacagaacataatggaaattattcagctaatgattctcaaattataggcaaattgagaaagaatcttgcctagacagtcaagattctttgatgaactatttacaggagtaggtttcctgtgacacaaagaggcatgtcgccaggatgacctaagataaccacttccaccatcctgaaacttctccctatctcctattcctaaacttctccttatctcctatcttctattgaccaatggctccatatggtcaatgaccgctcagagtgggtcaaagccccatagtattcaccactcctcccctaccctccacccaaccacataattacatttgctcctttagtcctatctctctcaatacaaccaaaattccctattataagagtgtggcaaacctagacattaccagaaagctcattagatttatttttttttacactgggctgtaaatagctgtaattcttctaataaatatttttaattttgtaaagggatttaacccaattgaatctcttattttttaaaagaatgatcagacatattttgtttagggagtacttgtggacaggacattcccctggttctactctagcatgctaaaatcagcaacttgatactctatttttgaaaagttctctgacttggatttgaatttcaaagcccaaattaaagtgtcttaatcttcttagttttactccaaggctagctaaaaacaaacaataaaggcagaagcagaatcatgtaactttttctaaattgcatttattgttttactttttctcttcttatttttacccgaacagaaaggagctgggaaaggaaaggccaaagagcagacagctactaactgttgaccaagtaaggcctggcaagtctccagctggactggtcttcgttgtgagtcatagaggttctcttcgttgaatttgcaagtaaagaggagggcgtgaaggtgtttttgtttatattgaatttttgaagtctgtgggttctattattaactcagttttatgtagttttgattagggaagactttagacagcacggacct

SEQ ID NO: 44545 - DNA, 824 bp, Homo sapiens
ctgaagctacatagcagaaaaagctaagccaggcctctaattctttggcttattacagttctattttagccctgtcctctttttcccactcaaattctgtagcctagcatgtgtttggatatgctgcatcctccagttcttcacactaaatatactctcagaagccacgagcaaaacttgcagatgagtcattctgtttggaagacttagctccatggtggacagctcgtaaactggaacagattcagctggatagggggagtagggacaacagtagttggttcattgtgttctgcaaaaggagccaaggggggttggggggtgggtggtttcagagtaaattgaagcaaatgctcatattacactttaaagaaaagttggttaaagagacaatactcttaatgataatactctaaagcttagaatttgtgttcatcacttgttttgggggtcaggcacttttttgttgttgttgttatcctttgaccaattctcagagcataatttgtttccagtctttttgttctaagagtgaaaaggtcaacgccctttgacacggcatgagctgttcagtgcacaaggggaaacgtcaccagcagtgctggacttaaaacaacttcagggcaaccagagtcaaacacaggaagtgttgttcaagcccctagagaatactggctttgtttattagccaacttacatctggttgaattgctaagtgccactatcttgaatgagcagatatatcagagactacagacccagatgaggtatttgtaggcatgatataacaacatcactctcctaaagtgtcccctacaggaacc

SEQ ID NO: 44546 - DNA, 967 bp, Homo sapiens
ccccgctcctattaagcagccaacgctgggtgatctcctctccagttcttcgtggtttcattgtagccttgatatacaagacaaatgcacactttactctgggcttaaaaaaccatctatcatcatcctttgggcatgacaaatacattgtgtgtttcagagaaattaatctggtatttagggggagaaaggcatttccaaccagtctccgtgcagaaccttcccgcaaaccctgtagcggcatttttcgacacttttctcctcctttcggcaagcctcaaacttgaccttcgagaggattttaagggtagagccttcctccctttccctcgtctgctccaagagctcacgtaggccttcttctgggaaacagcggctcaggaccagagctcggagaactgcgcgtccaggagcgcgggcgcggccggggaaaagggaggaggcggcaggagggggcaggaggtggagggaggaggaggatcggtctgaatatgcatgaggcacccagcactgccctcttccccggcagctgctcgggcgggggcgaaggagggaaggggaggggaggggaggaaatgaggctggggcggggtggccagagcagccgcagaggctgacgcgggtttggagaacggaagagatgatttgcatggcgcctggtgattggctgatggccgggggctgggtctgagaggcggcccctgaatggtttaacggaggaaattacaagattcattcgactaaagaaagccggggcgggcctggtcggcgcaatatgcagcctgtccgcaagggggcgcgatggcctatctttgttctggttaaaggctccttttccctcctcccccgcccccgcctccgcccccgcccccgcccccaccccccacacacagacacacacgcagaaagtgcagagaaaccctgtgatccagtcaactggctctgccccatctattaagaaagatga

SEQ ID NO: 44547 - DNA, 1977 bp, Homo sapiens
gggctcagggtaaaacattatctggttactgccggatcatacccatattttcatcccaattcctgacatcttatttacccctaccaacaaaagacaaaccctttctgcctaacctttaaggtgcatgcaaatcttacggtcattctccctactgcaacagttccttcaaccttcctccacacccctgcaatattcctttcgaataaagtctgtccttactaaactcgggttttttatttgacacccttttcaattatgaaatggctaagtgtaaagaataaggggactaccgtttctttaaatgacaggtgttgatcttatacaaggagacccgttgtgtccacctggagaggctaaaagcatttctaagatctgaagttcttggccactgttccgcggatggagaagggggcgcagaagaggtgactgacccggcaaggtcaactctgggatcacctggcgccacaggccatacacagtaaatgggccatgaacaggcaggctacccagtccatactccctgacagatacgcccctgcctccggcccgctagtctcccagacaggtaggcgtaatgctgcttcctcaggggctcagacaccctgagataggtggtgggtcctacccagcagctcatcccaacgtctcaactccattctgagcagagcacctgatggctcttttcacagtactgacctccccgcccttttcgccccaccgttgtcactcctgccctcacagaagaactcaccatggcgcctaggataggtcgtggaccagacaccctggagttgccggggcagtcccaaacctcttacctcccggtccttgagccgagagactctcaaacagcgaaagagagggtcttccggctctgccggaagttgtgcgcgcgcgggacaggaagttcctcccttctccagagcgccgtcgaccccacgccacgcagaggtgaagatacgcaggacgtcctctaaagcaacttccgtgggtgccaggttgtgggctgggggcggtgctgaccttgagagagcggaggaggcgcaggcgcagcacaggtacgtgggcgggcggatcgtggtggctgcgcttgcgaggaccctgaggtagattgggtggtttcaacaggaacgcatccactgtctgagaggtgacggaggcacacgttggtgtggggagcgggaggggagagggaggggggcgggtggggggcgggagggggccaggggtgggagtgagggtgcgcgatgggagtcgactccagacccaggtgatttagagagagtaaagaccacctttggccgtcattttgtctcagcttaactgacgccctcttgttaccctctagttttcctgactcggtcccttattagcatatcctcatttccacagacctgtccgtctgttgcttctgttccctgccttagtgggtaccgtagctctaccctccttccgggcaatggaatctcatagtgagaagtttcttcactattcacaggtggcaattgaagccggaagaacatctaccaagagcagagaacccaggaagaaaattctgcctctttaatacgttccaatatggacgttttccatatagatacctatctatatagatagatgctctgggatctgacggtcctggacacctgtatggctgtgtgctgtggtctttgcctagcctgcggttcacttttgctctggccaccacctcccctcatgtacaaaccgcgtctctgctctgccagtcttggcccccgtcaggcagcggttcactccctcaccagggaagtctagatagatagatatagatagatatcgatcgatagatatagatatatatatagatagatagataggtagatatatggatagatatagatatttggatagatatgtagacgtctatctataaatatatcgatatatcggggttctcagccatcccaaagaagcttgcacagggccagttgctttatg

SEQ ID NO: 44548 - DNA, 1165 bp, Homo sapiens
atagaaaggtaccaggaagatgttgaggaggggaaggtcaaccagctagttcagagcaagtttcaaacaacagggtaatggtgtcttcatacctaacatctgatttttagttttgaaattgcagtggtggtgatggggaggaaaatcagcgaggggagaggggaactgatgaacctaaaaagcagaagtaaaaaaataaagtctgtaggcatggtagtgacaaaatgctgattcttatggctgcacttcaaagcatgctaggacaggcttgcaaggtccagcaggattatttaaaaggcttggaattttgaatatatattttttaaaacccttttccttctgttttattttttccccaaccactagactaccagaaaaaaaaaaatactttctatgccatcttttagattgggttactttggtggatgagtaacctcacccattcctaggattcttttcttttgactagtttcatttttcaggcagtgacctttccctgacctcagccccaaactccaggtcacctttctgtagccctggtgtagcactgaatagagggtttaccagattgttggcactggataagtggtactgggcacaatcgtcctctttcataagcaggagggaagtttcctttcctaggattgagagagctggctgacttatgcccccttttcattttgttgtccagtaatttcccctctggccatatctgcaaactagttgccttgcaggaaggtgacatgcaccactgatgcaaaaagacaaacaaaaagactgttattggcatcagcacaactttcaatggtacttcaaaacagattcatttgatagtgaaacgttagttatttgccccaaataattaaaaagtttaattgattaaagcttaatctcagctatttaaatatttctatgcttttttaaattacactctcctgaataaaatcattactagctatgccaatcttcaatctgccctcaaattaccctaggaaagatctccttttacctcaacatgaaaacaattttttcccaagttttcaaatagtgggaaaaacatcatctgattagacttcagtaggagaccttaaataccctctatcatttggccttcatgttgccacatagccatggccctaccaacaggatgggcacttctgatgtt

SEQ ID NO: 44549 - DNA, 1001 bp, Homo sapiens
tttccctcttattgttaggacacaagttacactgaattaaggcccaccttaatgacctcatcttaacttgattacatctgtaagaatcctatttgcaaatgaagtaccattcacaggtactggggttaggacttcaacatatcttttggggaacacaatttaacccataacacttagtaaataggaggaatatttggatttattgattttattttctcatattgatttccttttaatagtcatatactgttctaaggactttacatgtctcaactcatgtaatactcacaataaatctgtgagttagatactatttgtctctatttaactaatgaaaaaaaaaaaaccgaggcagagaggttaagtaatttgcctagggtcacatagctggtaagtgacataatagggattccaacccaagtagtaaatatttgttgaatgaatgaattaaataatgaagtaattgcttacatagtcttgtaataagtataagtcggatgatgaatgagggcttaaaagtctcttttgatgcatatttgttgaatgaaagaatggatgttttatgaagctttttagaagctacctcataccaggccttccgttttaaggaccctgtccttcctcttcctggttcctgtcttaatgctatagtcattctgatcttttgtttccttgaactattctcaatcactttccatttttccccattttccccaactctgatgcttaatagatactgcagctctaatcttcagtattcttcggccttttaatttgaggtttaaaatggatgtccttggtatttgatcttgactctaaaagcattctgctttggcttcctgctaactcttaacactctttcttaactctaacctggtgtcactgatcccaaacctggctatgtggctagcacacagcttctccataaggtgttggtagagtgaggcaggcagatattaagcagaatgatcagacattgggtttagtctatgttctgggta

SEQ ID NO: 44550 - DNA, 1213 bp, Homo sapiens
tttaacatttacactgtcctactctgtttcccttctctatctccaaacagtataatatttgatacttataatgactatcaaatattttcacagtcatgtgtcagatagtacaatacaattattccatttccttttttatttttatgtgtttctgaagttattgattgccttgcttttttcacctatttaattttctttgcacctattgctaattttccttaccttctaataacttcttagtacaagtttctacacgttcaatcatatcacatttctaaaactacatattatttcttgaagccttcattcctggaaccaacattctactttcatctggttgctcttcatgcccatttcttagttgtctttctatacctttgctatcatctatagaaattcctttgccttctgaattgtttctcatttcctggacctaatgtcttctctttctgggtctgctcctttattttaatgaaatctattttttagaagttttttcaggtagaaaagaggcaaagagtatgagtatgagaaccttcaacatgcctgtcttttgagtcacactgtcaattatggactggttgccttttatacctggtgcacaatttttatcttgatatgtccaggacaatcaacatcatctgtaagattctgttcaattcttttttgtgtggataccctgttttctgtaactcatgtaattctttatataaatgtgtgtgcgtttgtgtgtataaaaatagatttactttaagagattggctcattcagttgtagaggctggcagatctgaaatccagcaggctggaaattctggcaagagtaaatgttgcaagtctcgagtccaaagtctggagtctagaggcagaattacttcctcttctgggatcctcagtctttataaatctctttttttaaaacatattttttaaattggtaagtaaaaattacatatatttatggtatacaacatgatgtttgagatatatatatataatatgtacatatatatatatatatatatccattgtggaatggttaaatcaagctatttaacatatgcattacttcacctatcattttctgtgtgattttaagaacacttcaaatcactcttttagtaattttcaagtatacagtatattactatttaactatagtcaccatgatatacaatagatgaataaaaggtaaaaattttgagactatatat

SEQ ID NO: 44551 - DNA, 816 bp, Homo sapiens
tagaaatatatgtacaaaactgctcttttccttttttaaagggctttacttgtcttttgtggaagattttaaaaagaccaaggcaaaggtatttctgcttctctctaatctacatgaagctagctgtttggagtagactgactttgtagtgggaaaacatgggcctggaatattttaatcctccccttcccccacaaagtctgactacagcttcctaagagttcttgaaggcagtttgtacctatgtccaaaaggaaagcgatttatgttactaccatgaaaattcacagagacttttcatgagaaacagcagttgcaattgaagttactgggtgttgtaatacagtaagtacaagctttactgaaggtctatgaaacctctgtgatatttagacagaggtacaactgcttccataaggctcatccagctagttgcagagtcgttttggggagagagtagaaggcccttttgaccctgagactcacaatcacagagatctcaaattcagactttggacattatttctaaatgaggtcacacatacagctgcagagctacactgacaagattgaaagaagttcattgtgtcactttaaactcatgccttgctgcaaagacatgagtgctgacagcccaaatcaaacccccagcattttccacctgaattactgcaggagactctgaaattgtctccctgcttccactcttgcaccctaccacctattctccaaaaagcagaccgaatgatctttttgaagagcaaatgtcataaccctgatcacaaacttctgatgcattcccatcaaactaagaaa

SEQ ID NO: 44552 - DNA, 1180 bp, Homo sapiens
gttcaagaatctccctacacatgggaaacaggttacccataccaattaaatcagaattttgatgccctgtgtggactaaaccagggaagcagcctcttctaaatcctgcttcaatgaggcttatgtctgcatgggtgtgctactcattgaacacaaatataaaggtgccaccagacaaggagtttttctggttcatcattgcactgcaggatgccatgaaggagtcacaggctgtggcttccatgaagcccgtgacaaatttaataccctattacttgtgtcgtctgcactagcacttcatttggtgacatcactgggtacaactaaagttgaaatttgtgtgacatttttgcaggtgttgcttttcaccaaaaatgttattttacatagtttagccacagtgcagtgctttaagtctagaactaaacctcaggaaatctaatgaggttgaaaagaaaagtgaaagttaacggctgcagctttaacaaaggctcatcctccctccggctctaaagagtcagtaactgagttcagtaactgaaaattaaattagaagaaatgccacctctgcagctacagctacctttagcattaacaataatatagaatgggatgggggtggggggttctgctcaatagagccatcaagaaactttcagagcctttaaacgggatggaatctgctcttaccatgttttaagcttcccttggttttatattttgccctctctctagccttcatttccctcatagccatatccttgtcgtattttttctgttctctcctttctgctgttttttcctccattgcaagtcttaatttccattttcttctcttcccccactgccacatttttttccttgattctctgagtttgttttccctcccctaccatgtttacatctttacaagaataatttaactgatgacaaggtttttgtgatttgccctgttcagaatctgggagaaaacagttaaggattctccagggcataaggcttttgactttatctggtcacatcaaatgaacaggaaccattttctcaggatcgtattatcacagtaagtgataaggatgtgcaggaagaacttacgagcagtggctcacatttaaaaaaaaaaggctggggggaggagtggcaagaaaggaaaacatattagcctttgtcaggctcctcc

SEQ ID NO: 44553 - DNA, 544 bp, Homo sapiens
actgtttcaggacatatgaggggttaaaagaagtagttaaccacaattctataatcgttttgtatacatagttcggagagctataattgcttaaaagataaaggctataaagttccctagtaaaactcactctgtgtgtataattttggcgtggatatattttgtaagtgcaattactcatggatacagagtaaacacttgtaatttcaccaatgattgagcaattctaggtcatcctcgtgtgcttcaaaatgattactctgacttcaagtgaccagttggaatgaaagctaattgactgttgcttatttaatcttcctcatatctccctgctctctgaccccttcattcacataaatattactggtccccttaactccaaggatattcccagactattctccagagtgcagcatcattttcccatctatatctacctaccttttctgtactctgccttctacaaacctcctcagatacatcaatttccataaagatttagtggttttacaaatacattcatctcttcttctggcagcccaat

SEQ ID NO: 44554 - DNA, 1194 bp, Homo sapiens
aatggggatattgtctcaaagagaagaaagaacgcttaataaaataaatcttaacatttcaatggaatcataatatatatatatattttctattgttgtgcatgagaaaatctgggaggtagaagttattttcctctaattttcacactgcctataatttttcagtttttcctgatgcccaatattttctttagagctgaataagtagattcagagattctcttaacccagagagccccttttcaacatcaagtctaataaggaggccccagacataactatagtgtcccagactgcccttttatactagacgaaaggtaaaacgagccgatcaagtaacaaattacaaattgatgcaggcagtgagaacagaagcctggttttctgccctgtaatgtctgcataaaagtggagaatatggttaaaaacattggcgacagccagttaccggaatagctagcacttccaggaacaaatgcattcctaatgaatttgtggacactgcatttaccgcaacaacagcaggttttctcacacatgcactccacagcacccgcctgcgcagggtttattgaccttcagcaaacactgatgggagagcgggctgccagagagtgagaggcagagagccatccaaaacatcttggaaaggcctctgagagaaatttttagtgtttagaagacatactcttcttccttctgccaaaagtcatttttctgttaaaggattcagagagtgaaaaaatattatatggttttctaatgacatagtcacacaatcccttccaagcccacaatacctgccgagattttgtctcattctaaggctgctcttgtttcttgattgtagtataaacatatcttctgactgactgagaagggcttttcttctttcactgctcatttacatggttttgtaatcttcatgtgtattaaacagtaagtgtggcatgaagaagtatgtttccataggacataaccttacataaacactaaataatctggaccttggaactaattggccagagaacagttcccgcccccgcccccacaatctggctaaaactagatgaaccaaagtcatcaaagtatgttttacttatttcgaagtcactggctgactcacctttggatactgatggtaagaagtcaatatgggccgtgcacagtggctcacacctggtgggattgctt

SEQ ID NO: 44555 - DNA, 720 bp, Homo sapiens
taaagggaaggaaaaataagacagcggtctccacaactcaacatttacttcatctctatttactaattcacacatagttcaaagaattagaacccattagaattatgcccttttatccccaatgatatggaagggttttttggttttttttttattttctgagtcaggagattgctttccatttgaatttaacgaatatgaagaaacggcaaacaacttggcttcacactgttacttacccctcccaaaaccatttttcctttctccttcccaacagagtgatgatttccttaggtatctatgccttttccccacaattcaggggaggatattccgacctcttgccctctctaagtgttatctctccattgagcaaacaaaacgttgtgtaagtcttcaaactgcttttgggccagtgtaggaaatgacctaagtcatgccaatctgactgaaaggaacaatctaatttcatacttgaggtatgggatctcactctctcctgttggatgtgaatatgatctcactaagacatggaaaataaaaaaatcaaactcgtagaagttgagaatagaatgaatgataggcatcagtggccgggggatgtgggtggatagggaaagggaagatattaatcaaagggtacaaagttttagctatacaggaggaataagccttagtaatctattgcatggaatggtgacatacttaataataatgact

SEQ ID NO: 44556 - DNA, 2283 bp, Homo sapiens
attaacatgtcaaaccagttgactgtacttaaaacacctatctagttgcatttgaaagtcgttttggtctctgaaagctccaaaaaaaaaaaaaaaaagctaggaagtgactagtaggtgcagtataacaaagctgaggaagatcttcctttcatgagacctgacttgacacaaacttgggtattcctggggtcagtcttttccttcctgagacttttggaggccaagtccagaaccgacccacccctgaccccatccaagggtaccatgattatcccttagcagaacatggaatattttcggagtgtcgtaagtgtatggatagttttacggtacaacgtctacatagtgggagagggcaacagagggttagaggttagaactgaaaggtaaaaaaatgcaagaaatttaggaaatccaagagacagactgccaattaaagtcactaaaatgggtctccaattacaccgtaaagcagggccctgggagaagaggaaagagtttttgttatttccaaaatttataggtgggtgattgcattagcagcggagcagccgaggtggggccctgaccaggcacacggatgaatgaagggatgtccgcgacctgatctgagaaacaagagtagaagcctcgcgatatttcattcccacctcgctcgcaactaagcccaaccttctggcagtccaaagccctacgcgctgacagaaataacctccttagcagaaatgcactggtctcgttccctgcagggcatcagagcccagagggtgagtgatccgggcaggctgccctaggctcctttcccgcgtcccaaactacatcccctgcctcgcctcggccccaaacgtcctcccttccacacacaccctccctgggccccgctccggggtgtggagagcactgccgcctccttattaccgacctcagagctaaactcattatctcttcgcacagagacgttcctctcaagaacgattttaaccccctacccaaggcagcaagacgcccacagccgttcaacagacacgaacgacctcagcggcctcagggacctcccacaacatagacacttttgagctggattggttgaaatgtcgctatggttctgcctattagggggcggaagctttaccagttctattttcattgggtaggttttacgtcaatcaaggaaaaaaaaattttttttctgtgccccgcccacctcctaacgcccccccgcccccccaatctagggccgctctcgcccttcggattggctcgatgcgtttttccccgaatcctttgcgggtccggcctccgatccctgtgtggctgtttggcgggtgggcgctgtgttcctctctcgtaaagccgtgcggtctgtgggccgccattcagaaactggatggacagcttcggcggtgggaagggaagggacatgctgcaggccaccctccggctagaaggagggagtacttgaggaacaaggtctgcgaaaattggctgtgctctgttctaaaacttggaatggcctcagtacctggggaatgtgtttaaaatgcagacttaaatgtccgtttctccattctaatttcagtaggtatgaatctgcgtttttactcctcacaagccttccaagtgattctgaggcaggtgctgtggctgtacttggattatcacagggttagattatcaggctatttatgatttagctgtatctaaaccacctttccctctctttcctcctttgaactgtttgaaacggatttgttcccttctgtctcttatttttcagtgctgtaagctgttaacacacatgagactgtcttcactaccaaaccaagtctcctaaagctcacttgaatgtctgcttattcgtgtctcttactaggttcaatttcttggaggccgtgattatatctatttaacgcttttccttgtacctaataaaatgtctggtgcgtaggtgctcggtaaattgagtggaatcttttgaaaatccacaaaatactgagctaaacagcaaatctcataaacgtgaataaaatagcctgaggatgggagttgaaggcggagaatatataaacattatatgtttaagggatgtatataaaattttagagaagggagagaacacaagatatgcttcttaaaggaggtgacataaacgttagacctagaaggatgggctaaatttgcacaaggaaagatagtatgatagaataagctaaaaattagctaagggatagcacccctaaaaaacaaaagtggaacttttattttgttcgtattttaaat

SEQ ID NO: 44557 - DNA, 2240 bp, Homo sapiens
ccctacgtagggagaatgggctgaggccctatttattttcattccatgaatttctctctgaattccatacttgtctttcacagagccaaagaggaccatggctacctatgcattagtccacataatttacctctaccgaaaattacttccttattgatctttctcaggctttgctttcaaccggaccaaatatctgtcataaagtaagactcagacatattctacgtttatgattactattaagcttttgcaatcgtgaggcaacatcaagaacagaaacctatctgaaaggtttccaatcgcattagcggattggaatcactggtctgatgactctctaaggctacaggtgggaactgcccatacccggtggggaccaagctgatgaagtctgcaattctcaaaagcacagatcatgacatgcactctccgtgaggggtcattccttaaaagtctgctcactacgaaagctcctggaaatgtcgggcaggtgcttagggaaagaatgagaaatccctagtcagtcacaagtctttgtagtgttactgctacagccgatgcaggaaagtggctagggagggggtggtgccggctttcaaaggagtactcagaatctctacacgatgccagagctggtctctggcagggaaggctgtgatggccttgactctggtcaagtgggtttttactcagggaagggtgaaacagaagtggctctgcgaggtgccaaaataatcccctttatggccacgcaagtctgcaacatgcggcactcggacagtctcttcccaataccctcccttaacgagagcgcgcgcccgcgggggcccattaccatcctgcaggatgagggtgggctgcaccgcctgtacccggaactgtctggccctccagccggggctgggcgtccgcaccacctcgctatcggaaagccaggtcacggtctcaaagttgtccccgcgagccagcgcctcggcctcggcgtggtgcactgccacgcggtcgaactggtagaggccgccggagtggtcgaagtgcacgtgggtggccacggcaagcagtggccggcgcgccgcgtcctctttggcctctcggtcctgcaagaggccggaggagtacaggtactccgggaggctgcgcagccccaggcctgtatcgatcaccacgtcctgctcggagccgcgcaccagccagatgttggcacggttgcccgactcgtagaaacgttcttgaatccagaagataccatcgcctagagacttgtgggcgtaccactcgagcgccgacatgctgggcaggggtgcagccaggcggggtgagtgtgggcgtgcgagtctcccacaggctgtccacacacagggcactgcggctgtgtgaagcggtctgcctgcagccagggaggaggcgtagagcgaggcgggggcgtgggatgcgggggtcggaataggaggaggaaggacgcagaccgacgctgcccgtagcgtgcgctcccgcacccttccgccaggtcggcagcaagcagaggctgcgccaccagcacgggggcgcaggagctaccgcagcctcggcagccgcaccacgagagagctttaacgcaggggccactgcagcagaatggagactcaggtggcgaccgtttcgccaccccgggcgtgtgacagcagaggcccgcagtgagggtgggaagagctagaaccgcccacccactggctctgcagggcgcgcactcccagctggcgcagaaagtgtggggcctcgcgggttgtacggcgactacggcgcctgccaagggcaaaaaaacctctttgccgagggggtggggccttcctagggagtgggcggggctagttggtagggctcactccgcggtcctggtgccgcgtgcaggtcggtgcgcgcttctcccgaggtggaacgggcggcagtcaagcgccggcgttctctgccgtcaccctttccttgccggccggcacttcggctgcagagttttgcccacgcttcgagacttagggagcaggtaaccgaggaagcaatcgaagacttgggaggggtggtgagggtagaggggaattaaaggggcacgtggaaaaggtgaggggaagtcaggggtagagattcattaaagcgcctctggtttgaggggcgtttggagatagcttggtacctcccctccttgtcctgctcccttcagaattttttaagtccaatttccagatcttacctagtctctactcctagga

SEQ ID NO: 44558 - DNA, 1962 bp, Homo sapiens
atctgggtattctgaatgatcaagaactggctgtgtcttcaaccgaagtgaacagactgacccaggcgatcactccagtctactactcagagattagaaaatacataatatttaagtcatctggctcaattctattcacctctcttaattctcttagagcaggaaaaaggcacgaactccctttcagaaacttggaacaagcctgcgtgctacctagattacgaggggccacaaaacagtgttaaagcattcttcagctcagtctgtaactgaaaacggtttcccaaacaccttcgtactgtagaatggctgctgggtgtttcgccttgaccttctttaactaagcaaggtgcaataagagggtcacagggcacaagttaaagctgcaaagggacagaatcaaaggcaccctatccgctgccagggacaattttgttttttaaaacttaactacctcctccctctgtattccacacgtcaagtttttctttccctgctatcgtcagcgaagattacgtctcagagtcttctgtcacagcatgacacttgaacgatgtgacaagatgccgtcagcgaatatttcacgccaacataaagtcgtgggagaaatgctgtgtttgggtgggaaattagctgcccaggtaatccagcaggtaggcgtccttcctctgagcctcagtttccccgacagtgtgacaagagggcctggcagggctggtctggaagttcttccctgtctcgggggtgtccgccacacgggccgagcccggccctgcagcccccaccacacctgtggccgaggctcagcgcctcccgtgaggacgcagctggggctcaaccccgccctcctggaccgggctaccctcacctcctgccaccatctttacctgtccccgttagcagggagcactctgcgagaagatggccaaaaggtccgccgccgccgctgtcccgggtaagttcatggccgagcctctgctttgggctgaccccgtccgcctccgcctctgccgccaacgtctccgccttccgggccgtacgccgccgccacgtccgcaaacctgagatgcgtcatcgcgtcaagtgggcggaggtgggaaggggcgggggaggacgcggagggcagcccaaaacgggggagtccaaccacaggtccacgcccggcacgcaggcgcagggactcctccggggcccgggggcgggtccaatccccgggcccgggggcgggtccaatccccagccccgcccttgactccgctccttccgtgccgcttcactccccgaggaaaagatttggtggccaagtcagcggatccaacccgcgaccaccagcgacctactggctgcgtctttgtccagcgtccacactgcgctggcagagactgtcgggtgcaccctgaggacgaggcgtggctcaggatgtgtcggggagctgtcttgcatttttttcttgctgtgcatctcgaattttctttagggtgggaaaggacacctcaaaaacactgttgacatcacggtttcagaaaattgcgccatgtttgttacccttttcatgctgaagactccagactgctgcagaagaggcagaattctggagagaaatccttgggggaccgaggacgagggttggagggggttgtctcacccttcctgtttttaggtgagggaagtgagccacctagagtcaggccccaggaaatgttttccctggctcgaggagtcaagggagtcaacaaattgtaatctaacttattttggtttgaaaattaactgagtcattggtagtcaccattggactctatggaatattagcttattaaataaactcatgacttcatacatgatttttatcacaaatgtgttaaatgagtatcataatgtgtttgaatttatgtatgactttggcaaaagccgcaactacttttgcaccaacctaattaatgaatgtaaagcattttaatg

SEQ ID NO: 44559 - DNA, 2806 bp, Homo sapiens
ccagccttggatctttcatttgggatcctctgtcaatgttatattgtcatttttggaggttaaatcaactctagagaagtcttaaaaaaatgcaggcttggcctgtggttctttagctaagagggaaaattctatagctgacctagagtgtttgagttgtgaatactttgcagacaagtctgccaagaccattcattttcaaatctttattaatgaactaggactaagtagaacggcttttgtggagaaggaaagaatggaaatgtggtagtcctggacttccttttggagcagtgtggtataatgggtccgtgaatcagaaagtcaggaaaatatgctcgtccagctctactttctacttctagaaatatgtagactattataactataatttattgtgtatgtgtatatgtgtgtgtgtgtgtgtgtgtgtgtgtgtattttcttgattggaggaatatagatacaaatccaaagattattcctgctttaaaaatcaagattctgcttgaatctggagtttgtcattatagcacccttgagaatcattgactataaaatatcagtaggtggcagtagaagatttatttttctcccttaaatttatcgatctctctttagccatgatggcgttcagtaaaaaacttgagagatgctttcatagtacttctttaactgggcaagagggtatttgcagcatagcaaatacacatttgtggtgtcctacctttctctttttatcctctttattcagaatttaattaaatgcaaatgtaccataagaaagattgtactccactggctttgaatatatctttctactgcttatatatgtttaaattcagggacataaaattagcttcatcattatatttatgagcattaagtgtgttattgatacagaaaaatgtttttattatgtcatagaagctttgagataaaggtctctattttcagtttatcaaaaaatgtacatatttcttcaataccaagttattttttctcacttatataaatgaaaatgattaaatgacaagaaattgtggggctcttcaagtatgatgtgaagaaacagcaaacaaattttcatggtattgggtgatatttctgagaaaaacatctaattatatctttgggatttttatctttgaatcacattgccaacccatgtgtgccctgataaggctggtaaacaactagtgacaaagagcaagtttgcagttcagggttctcagttctggaggttctgtcaggaaaagcaatcctccaaatctaaaaaaagaacagaagtttcctcatagaaaacatgatgaaaagatagaactgtatttactctgattaataatacttaacaagggaaaatatttgtttttcttctctatggtttgttatttgtacagcataaacacattttctgaaactaaatagcaaattcatctagaaatgtgtataagtccgtacattaaccgcaagactatagcttaggggtctattctctggaatttaaaaaagttggactgttactgtcttttgatcactttctcattctgcaacattttgggatgtcattttgcaatgtcctgtttcccagggaggatcctactcagacacccttgcgaaaagattctgctttaatctggaattatgtcattctcgctttgagtacctagcatctttgggaatctttgtgcatgactaaaggcagaagtcctgtgtgacttcccaaatgctggctccttctggatactatgaatcctggtttctgttccagcagcttgcgctgctttgttgagattgccaactcaagaaagtcattgtgtgagtaaggcttgaagacacatatgtaacaagcatattttaatcaactgaagcagagtaagatagagatggtaaaatgttcatcagtcagaaaagaattttccttagttggaagtttttgttaatcacttattaaccagaatatcctttgttatttctacttttttgctgaataaaaaagtatgtaagcgtttaagtacaaggatcaaaattaaatcttgctttgaagattaggaaattgagaagcagagggtcatttttcagtagaacatttatgattatatgttagtggagatataaatggatcaagaaagtagcaaggaaagtgtttcctaaacttcaatgcaggcatcttgttaaaattcaggtagtgcatcagtgagtctatggcgggtttccggatcctacttgttaagtaaggtattagattagctatattatgaccccaaaacatctctggttgttgttgttgttgctgccactgttgctgttattattattactaaatccatataatcaagctatttttcttagtatgaaattttatttaagaaatcccattaattaatttttttagtttcatttcaaatattattgcctttaaaacgactgcacacttgtatctttccctcattaatgaaaggctgctgctgtgtccttctgattttttttatttcttttttctaagaaagggaaaggtccttaggcaagtggactaagagataatttagagtatgaacaaggcctttattctggtcattctcatagcatttgacaatttgtaaaacttctcagtgttgttttggacataaaataaactactagaaagaagatataactagttcccctgccccaagttcattcttttctaccaagatcctgtaggtgccctccccccgctagaataatattgagtatgtaagcctttttttttttttttgtacaattaactgtatttaaatgtgtctttatgtagagattggggtat

SEQ ID NO: 44560 - DNA, 564 bp, Homo sapiens
taacttttggaacacttttaaagtgttcaattaaatatttattttagaagggcaatataagcatttacaattatataaaaatatccatgtaggcactgctaacacagtttcttcacttcacaggaggacaaaggctgcaggcatctaagagattaaccccaggaagccagagtagctgaattgccagtgttttaccatttattgttaactcactagatactcgtgaaactccattaaaaaatgcccttgtattatacaaacaatccacacttgagcaacctttcactctaagattaggaattgctctttgacaacctttgtcagggttaattattgaagacttttgtgtgaattataggaaagtcagatgaggtcaagcaagtctgtctaccacctcctgtttgagtcttaaagtagcagaaaaatctattctccaggtaatgaaaagaagaccttttctgaaaattttgttgaagcacaatttaaatttatctcatgtttgcagttattcattcattgctcccgttctccaactatttagtgtcatatgtactatgacgcagt

SEQ ID NO: 44561 - DNA, 1115 bp, Homo sapiens
ttctggctggcaaaagtgcttaaaaacaaaataatacattcttggcaaaagttggaatgatacattcaaacatataaatgtgcttgtggactttgcaggaaaaaatgactaatgggccttcatactttacaaatggataatgtatttgatgttggatatcatatatcatttggtgtttttatcattgtactgcagatttgcttagtcaactttatattagttgcctttgttttctcctttcttatctagccattttcaccttctatgcttggcttattcaggttcagtggtacaaatattgagtaacaactgttgatgttggcatacttttcacaacccctctgtggcctttctcctcattaccttatctgacactcctttcactgtatttttactattcctgcaaaacagactctagtgaaatataggagccatagtgtaatcctctgtctactatttttctcatagtagaaactgtggctacatctgggatatcattagcaagctaaatgctgactatcaaatcttggattgtggccttctatgagtcatttgtctgttgaataaggtgtgtacaatgttggaaagaaatcatagcaaggtctacactggagtgccaacaagtttttcaaaaagagttaccacacccaaacaagcattttttcaagagctaacattaagagtaattaacatttaatatacccccacttgtttgtccattaagtattcttgaaaactaacattttagccatgtgcgtcagtgctcagtttagccccttgatcttttaagtgtttgtctttattaggtttgtcttctctgaaaagagacctttttaaatattaattgcttttcatacaaagtgaacctactctgtggaggttgatggtttagttgaattaacatcagcattgtggtctcttaacaggcctctcctcattatagagaagacttattcagggaatgaggaagagctcagggctcttccttgtacagaccattgttttcactactagaatatccccttaagtatatattcttaaacagggtattaatacatttttgttgatagtctgttacagtaagagggaaacttctggtgaatctttcatctaca

SEQ ID NO: 44562 - DNA, 2553 bp, Homo sapiens
tactgcaagcattagcacagtgcttagcactcaacaaatacgaatatcattgataatcatattttctcctttttgtgcccccaaggtactctttggacaaagtactcttggacattttgtattctactattgtaatatcattcaggactaaatcaactctaaaataagtttttacatctatttggaaacctagatcttcctttttgagggctatcgttttgcctaggaggccttctttggcttgggttagctatgattaagagggcaagaaaatgtttcccttctgccgtgcctttagagtatgtgtgggtgggaacaatgtgctcatgtaacctaacagcataggagagggaattgcagatttggtgaacttgccaaaccccataacagtagcagatggatgaggtttagagggtgttgtgccctgtcaccagaccctgctgactttagcctggcttttccaaatttcagagtctttgcctttatccagttccctccaggcccaggaggatcttaaaagtaagatagaggttttctaatgaacaagattgcttgatgtgtcccctaagaagcactcttcttttggctaggcatgtgtagtattactttggaaagtgtttgtttcattcccatggcacatttatatgtattaatccctgaaggcactatgaagtgtaatatgaattgcaagttcattttcttctgtcatgtttgactatttggtgctgatgatcttttgcaaagagaaaataatggataacactttctgttcagaaccagaacatgagtctcgaatgaccttaatttttatgcttgggccaaaaagtagaggatcctggcaatttcagtcaccattgtttggtcttcagtgctcataccatttccttaggtggttatcatattttagtttagctcctacattttaaatagatagtagagattcatttttaatgcttgataagcagccaagtttcaggcttaattcacttagtcagtcttgagtcattgctctatcctcactttcatagcaaatatcatcattgggattacaccacaatgttttccttctgaatgaacagtttcacagcttaatataggttagtattttcaacatgcttgattttcaagcatgcttgaataagtttacatgctagaaactggctgggtgcggggactcacacctgtaatcccagcaatttgggaggccaaggagggaggatcacttgatgccagcagtttgagaccaagcctatgaaacatagtgagaccctgtctctacaaaagatttaaaaaattagccaggtgtggtggtgcacacctgtaatcccatctattcaggaggctgaagccggaggatctcgtgtgttcaggggctcgaggctgcagtgagccatgatcacaccactacactccagcctgggaaatagagtgagaccctgtctctaaaaaaataaaataaaataaaataaatgctagaaactggttgaaagtaactgaacaggaggaactgaggatgtggcactcattcttggaaatcagttctggttaaagattaaaacagactctgctgctgtctttcttatgtaaatataaagtccaagggccacacatgacatagaaaaaatatcacttagcttctgtaaaactttttaaaaattccttctttaaatgtttcatgattatacattgtttgcaaagtaaatgaaacaggttaacttcctggatgcttacttttagcagaaatatatcagatagcaaacttgctgacagatgaatcacagctttgcccacctgtaatgaggatacactgctggatcccaggttggtcccagactttcagggtggtatttctggcctccagtccacttagggaactgatcattctgcatacctctctgggattatgttctccacctcatctggcccttgataggtaaacatcccctacctggccaaaagtaacaaagctgaaaaaacttggccaaatctgggaacttgttagtctgcctcttcctgtaccagaaccgcgttccagattgtttcccagggtctgacttcaggccactgttctttgctggccttgacctcagtacttgtcttataaatgactttatgcttttctccctctgcctcatcccaccctcgttctttgtatcctacctctaatttttatccttcagacactttttatttttctcccttgtttgaatatatttttagttttctctaggccttgcttaccaacctatcataccttccagactctcatgctccattccttccactctttccacctcaatctgttctacctcacctgaagactctgataacgagagcaaggtcttccacctgagcctgatggggttttggccagctgacattcctccatcacctaatggtcttagctgccttgtgtcctgtccacctgagatgacaccccttgcatccagttctttgagagaaataattcttattatagatttgtcttaaccgatccgtcaggtttcctttctctgactcatttagtcattactttttctcagcgaatttcat

SEQ ID NO: 44563 - DNA, 1371 bp, Homo sapiens
ttatttattaacaacaacagaaacaaaaacaacctgtttttcaacattccttttctaataagcagttgttataggaccacaatggaatatatgttaattgccttcaagatctcttaaaagacaaattctctaagtaaccactggagcatttatgagcaaagagattttattgtccctgcctacatgctcccctaaaaactggatgagttgtgatgtaactttttttcttctaagaaatttaacagttacagaaaattcaaagaatataccaaatatctccataataaaatattactactgttatattttccttcaattattttgttaagaaatattgcaaacataaacttttaaaaaatgttcagtattattaatttgtgggaattatttattacctagaaaatgctcacttatccagacagcgttctaaaagtaatcatagaaaaggtattccaatgtactttaggataatatattcttaattatcgtttgtatagggcattatttattattttaaaacagcaagtaaagaatttaaaatgatcagtaatctggtttaaaggactctgatgctaaaataattattttgagatttgttgtgtagaatgactggattttgacttaagaattcagtggctgtttaatccccctgactttagtattacttattaatctctgtgtcctttggtcaggaatttggggaagagccacatgaactgagcatgactaggtccacaagcttgtttatttgtttttccgttgtgactgaaggctaaactcttttagaaaggcaaaaggagtctgcaaaaattaacgctgattgtgagattggtggaaagagggtgggaacaaagtaaaaaatacacatcaagttctaaaattagccactgtgatcaatgcatgctaccaagggggtgctgctggctgacctatgatgggaagaccctcccccagcccccgtgggtgctgatcatgctaagttggcacgcttcatcattaaacaaagtactaagattaattacttcaaaggggtagattagttgattttaactgtaaaaatgcacatatttaacagtttagcatttcatgatttatgtgtataaacactgagactctaatggtaaggcgtttggccatacctaacataatttatttgttcatactttcaagcccttgaaagtttttgatccccttatatttaaggtggcaggttttggtttagaagggtatgggcagagaatgttggcctttctgtagcatttctaagaggtttttgagtgtgaactagcaccagggcttagggaattggagagataggaaggaggggatatttggatgcaagatgtcattggcctctcactgagtattcag

SEQ ID NO: 44564 - DNA, 2691 bp, Homo sapiens
aaaagtttccatttctgcttgtattttagtttagttttttatccatattctgttttatagcagatgaattttaaaaggccagtctatatttaaaataggcattaattttagccatgggtgttggctttccattttaatggcctgaccactaaacatcttctttttgttgtttctttttaaaaaatatatgatttgtctagcaaatctttggtaaaaaaaatacatttcttaacagtactattttaaggacagattatgctgtgattttgctgcaacagcctcctgagtgatagagtcagatgttctactttcttattagaaacatcgatgccaatatttactttcagtcctggtctaacaaaatgaatacgttgccagaggcatatcatgagtccttccggcaaactccaaataagaaacaaacagaaatagtgaatgagaatgccaacttaaaaaaaatacgtatttttattatagacttaattggccaagaacattcctacataatctaaaattcataacgaccaaatggtaatacttttattgcctgggtggttttgtacatggacttttataacttggtattcaatgtatgaattcttgtcaatgaaacagtatcattttgtgtctgagtatttatgtgtcttttttaaccaaagaaaaaaggaccaaatattagtgttagccaaaattttaatttttaaatactagagagttatttctaaatttacgtgagtccaaattttcaagcagaaactataatcctcctttgcttacctgataatttttactgccctaatcaacttggtcttgcactactgtaaataacttacatgaggaaatattgtggtttcatgttcggtaacaataattttacctaggttttaatgaaatatctctcacaatatgagagcctgcataatatagaatatccaattcattaaacacttgcagagggtcccctctgggccatctgggattactactgcctaactttgaaggagaaacctaaccagaatattttagtatgttgcatcagtgataagaaaacttctgaacttgtgccatgagacctcagagaaggggccactttgttcatcccaaggtgactcggaatagatgacaccaaagctgaaagatttgtagatttttttataggtgaagagagagaggagggagaaggaggtacttgctggaagtgtgtcctggcaaagcaagcagcactggtaaaagcaggcagatccgacagaatgtcgtgtatggatggagaaagagaatgaaacagcagtttaagatgactggtgggtaatgcaaatttgagaagtcatgggggatgaggctggactggtaaacaagagctaagtcatcaagggccagatatcaaacaagtttatacagtgaagatttagggcaaaggggtgatgtggaagggatgagttttccaaaaagttagtcacttatccaagaatgtatccagctcacttaatgaagctagctcacttatggagctagatacattcaaatagtttctataaatcaaattccttttcttagttcagttctcctagtgatgcccaaattgacaaatttcactaggtaaaatgtttgcttttcttgaagtaatataattctacctggaagtcagcatatttttaaaaatcacaaattgtaagaaaaaaatcattttgcttatgtgccaaattttatatgtgattatgttgaagtatggaaaacagcataattcaacaaacattttattaaaattgacaacacaatttcttaaaagaaatattttaataatggttaattcctacttgttagtctataattacgcatgtttcctaattgatgaaaagaaatgaaatcactctttctggacaggcatatacttgaaaatcctttaccgtatattggcttagagaaaaattgatgttccttgctgcttaaataaatttaagcccctaaaatctgaaaacttaattgaatatttagtggacataaaatgaatggtccataagagcagaggcacaaagttgaaacagcaaagataagcatgagggactctagctttagatttttactttactcactttgttttattttccttctccacataaattgttataaattttccacttgctagaagggatttctcaagcattgcagggcagcttagtttattttcttcgtgggtaaatctgtatgtaatcattttagcaggtgagagaattcaaggaagtggtaacttgccaggaaatgagttctcagggctgtgaatgttttttcattagtggtatgatttcccaaatatcccatttcattttcgtgtaaaaggtacttttccatctcatcacgtctacattgagttagtttgcccactaggaggcactctttccaagctctgtttcccagggtgtcccgctgactttccccaataaaaacctgtgggtatttactcatcttttgtgtttttgttactaagctaagttttgtaccttgcttctgtttgctagtggaaatggccttttttgttgttgtttaaaacaaaccaacaaaaacaacttccaaatgttttggttggtacttgtttttcaaggtactagtttgtggagagatgcttaacttactagaaaaacacaatgtgtttgatatcaagtgttcactaaaagttctactattacctttaaaata

SEQ ID NO: 44565 - DNA, 1290 bp, Homo sapiens
tttagaaaacatgttcacttcttccagctttgaaaacaaagttaaactaaagcaatgaaagggaagcacattgtcagtttaaacctcaaagttacattttaaaacataatcaaagaaggggcccatatttaattagatacaagatacagattagagtttctctcattaattaggtagctgtgtgagaaatcactcttaaaagcagttttagggtattagttttcactgacttacacattttgttctgatctgctgctgtgattaatgaatttttgagcaatgacgattaggttaatttgagttcattattcaaataccagcgcctaacagatggaacactaaactgaaggtcaggaaatgtgaattccactctaggctcacagctgactttccatgcaatttgaatttcttctgctttgtgaagatatttgtggattaatgttactgtaaataaaatgctctaaatgacaaggatataaagtactatgaaagcaaatgggaaaaaatgataacttaggataaagagtctctcttcatctgggaataatatttagaattcataaacaaccttttaggggaaaatttagatgctgtacaggtggcagaattgcttttttttacttgactttaaaataataatacctgatacttgaatagtgatttccaggtttttaaacactttcttgtcctactcttatgtgaaccttagaaaagccctgtaagttagaccattattctctgtggcctcatgtggaaaatagacaataatctgatttcctggagagattaagagagattagacatatatatgttgtccttcaaacctgatgccattttagagttctccatgtaagaagttcctgtcattcttacctagcctcatatcttcacatagttcagaaataacgtgttttctcaagcatataacttggtcttcttattttccttaggccttcaaaatgcattgtcgacttgttttcttctgaagaactgttcctgtaaacagctcctagcatttattgcagactagcagagcagtaaaagaactgcagttatttcaggctaagaatctacctcccctcactgactgtcttttgaggacttggatataaatctgattctgtcttgtaaccaaaatatgagttgctttgattttgtgaaatacaagagcacactcagtgttcaaactattccacaaagagaaaatatattatctgtgttactatctagtgttcactaagaatccaagctaagtcaaaaggccaggtatggttggcatttactgtgaat

SEQ ID NO: 44566 - DNA, 2104 bp, Homo sapiens
gtattgctacagattattcacaacaaagacagaatcctcataaattctacttcatgtgattttttaaattaaaaataagtatattaagcatttataatttaatatactagatatctttctgataaaaagagaaatacgggtatgataattggaagcatttttcatagatcagcttctgtatctgttcttctgtatctggacccagttggacattttcatatctttgtataacctctgaccctgcatgtccctgtcactgttgccacaggaggtggtacagtgggtgattgccaacaatgacttcatgataagtggaagtgcctgcaagccacatgaatatttcccacacactccagcaaaattaaatctcatctgaacttccccttaaccacatcccaaattaccagtcattccaatatacccaatgcaagagcggttatgccagaaggaaagttgggattgaaaagacagtggccttaactaatcgtaattaaaatatcttagttttacaaacttaacaaaaaatcttcaccagttgaacatattgctggggccactcctgaccctggaaggggccatgcaagtgagtggccctgacacttaaacttcattagcttcatggtacatctacctctggttcattacaagaaagaccacactttactggctcctgataattaatacaaaatgttttttaacatatactcatagtgtagccttcagtgcttagactcattccattcttttcctcctttgatctccctacctacttccttttctctcccctgggtcctactccatcctgctactgcctcttgtggtcacggtcaaagatgcccatttctgtctccattttgaaaggttactggtgaatccttatatcctcagaacagagcatatataagaaatacaaatgtttttcttgataatattgatttttctctcatagctttaagtattagtattttgatgtactgaaagacttccccctaccttgcagagaggttgagatggaaaagagaacagagccgtatcgcaagtgaaaatacataagaaagataatgggaaattccagtgcatttttaggatgaaacagaagaaatcaaagaaactccatcttagcagtgggccttttaaagctgcaacttcagatcaccagaattacccattcgttctttgccacttttctaagtggaaaaatctgagaaacactgctgtgtacatattcaattatactactaatagtattatttcctattttgccctttgcttttttttagaagagcatttcccatctctgccaaatgattttttactcaactttcaaggtctagttcaaaggttattattctatgttattctatgacacgtcctcaggacacttaaagcaaaattaattgtgtctctttcttcttttctaatggctttaacccctattttatcatttagaagatatcttacagtcaaatatttatctctcataaataaatattaggtcataatatttataaaggcgatgtctcattcttttttgtaatccaggaacctatcctgacagtgttgtgctggtaaatgtttaacagctgacttccgtggtcaggagacaactgacttggagcatcagttaatttctgtgttttaaattctcccaacgtggtagcttccaaactaccaatggagaatcactgaccacagaattggaaagagatgcatacggcacactattctggggcatttctaccagatagatatagtagatgcatgaataataataaaatgtagcaaaataattaagaagtcatgagttttcagtatttattacctttgcttttaatctacttaattgtaagtctatataattttatttatttttttatttatttgagacagagtctcgctctgtcacccaggctggagtgcagtggcatgatatcaactcactgcaacctccacctcccaggttcaagtgattcttgtgcctcagcctcccaagtagctgaggttacaggcaggtgccaccatgcccggctaatttttgtgtttttagtagagagggggtctaaccatgttgaggcgggtcacaaactcctgacctcaagatatc

SEQ ID NO: 44567 - DNA, 1356 bp, Homo sapiens
agtatatatgatattctgaaagaatgtaaaacaaatatattatattgagagtattcataatctaccctactatgtttttaacaagtacatgctggatcttctatattcacttagaaaaagaaaatgatatacagagacctaataaagaacctggttctgaaagggaaggaaataccttttctgaaagtctctgagcatcttttctctcttctgaccttgtctgttctgaaagatgaatgtcctacaggcaatcccagggggtcttcctagactgcaattctccctgcccttaaatatgtggagttaactgaagctccagacagctcagctccagatgaatttctcaaacagttccttctgctgtcccgggacctggccagagattccatgggagatgcctttggtaaactggatatgggagatttacatagcagcatagtgggagagaggttttggcagagcctcttcaagagaagtgttgaaagaaaagctgagatttatgttacacagtatcttgacctcaagtagtgtttgctttgggttcttaggtgtgaaaggcaacttttgcatttctaaaaagaagaaacttgtaggtcttgcataccatgtttgccctaagtcagctaaaggggaaaatgcaactggacattcatacaaataaattaagaaattaatcttaaatccttttgttaaatagtcacatttggattcctttatgaagctgtcttctaaagcagagttatactgattcaataaataaatatccctatatttgatgaagcaaacttaggattcatgctaatacaaatgacagaaatccagtgtaaactgccatggcttaagccttaaagcttaagtaagttggcgaatgactggcttcaatcattgctgaattcagaggttcaagatgtcacagcattctgactttcaccatctaggtgttgagccggtgttatagaaatcggtcatttcatcactgtaagatgcctccctcagggtggcaacataatggctggtggcttcaggttctcatcctttcagcctaccagtccagaagaaagatagtttctcttttcaacagttccaacagaagttctaaataggagtcctgttggctgcatggattcaatatccacgcctgaacttatcattgtggctaggagagcagataacattgattatccaggtcatatgcccatggctagagcaaaagcagggaagatgaggtcagttatgatgaaatcacatgaatttcaaaggaaattctaaactgctgttaccagaagaacagggaataaatgtactggcaactagcatctatgtctgttacacaggtacaccataattagtaagtag

SEQ ID NO: 44568 - DNA, 1747 bp, Homo sapiens
ggcaagatggcaaggccagcccagaacattgaaagatatggaaacagcataagaaggaaagtcaaaaaggctactgggctagttaggacaggcactctggaaggagggcagtcactgaggagatggctctgctctgtgctgaaggcaaactggaatgaactgacaattttgctttcaggggagggggtgatgaagagttcagttttgttctcctgctttagtgtactatgctttatacattggtccagactatctaatcaggatctcattaagggaaagcttagcattgtttgagttctctttcacacagcagagctaaaagtaaacagcggccaaagataaacaaggagcattgctttttcctgtgttgtacaatagttaagtctaatttattgacaataattgttggtagtataaatactgaatctgagatgaactttgcaaagagcctgctggtttttaagctttaccaagccagcagactttcttttgttgctaagggaatttttttccaaatcaggatttcttaaatagcaggctttgtatgctggaagacacaagtgacccactcactactgagatccagctttttttttctttctttttttttttttttaattctttaaatcaatgaatggctgaacttcaacttttctctgctgttgtttcttataaaagaagtagataagatagatttatgagcaaagaatagagcttctgcttctgaatcctcctttggggtcgtctgagtcatggtttaggaaagaattcctaccaaaatccctgaaacaatggaccaattccactattccctcttctccctcatatccagctatccccataaacccagagagaggacctgaccccgtaggagcaaaggtgccctggattatggtcctggtttgtgaaagaaaattgcatttaccaatatctgcctcacagttctttcttgactgattgcttatttactcctggctatatttacaaaacacttcaggccgactttgatatccttaaagttggtcttgatatcttttcattttgctcttttttgtccggcccaatccacaccctgccctaagcatattttctcagtaatgacgcccatttacacatgaccagacttatgtaatttactagatctatcctagtcatgctgcactatcttgccctcctccagtttaagacatctctaccatcaaggaccagcctctttaaacacaatctgttccaggcagatttatcatgacacccaacatgtctgagccaaagtccaagtgaaaacactagactctgtttttttttttttttttttttttaggagtcttgctttgttctgtcgccaaggctggagtgcagtagtgcaatcatgtctcagtgcagccttgaactcctgaggtcagggagtcctcttgcatcagcctcttgcatagctaggactacaggtgcacctcaccatgtggctaagttttttttattttacatggagacagattttgctatgttgaccaggctagcttgaactcccaagttaagtggtccttccacctgggcttccaaaagtggtagaattacaggcatgagtcactacacctggccaaaacattagaacttttttctttagggtttttaaaaagaaatgtatcaaatgtacaattccactccacattctactccttcatattatgaaagttggtgtatattttttccatctatctttttatattcttcatgaactacataaaaa
